(19) United States
(12) Patent Application Publication
(10) Pub. No.: US 2024/0301345 A1
(43) Pub. Date: Sep. 12, 2024

(54) BIFIDOBACTERIUM LONGUM TRANSITIONAL MICROORGANISMS, COMPOSITIONS AND USES THEREOF

(71) Applicants: The Broad Institute, Inc., Cambridge, MA (US); The General Hospital Corporation, Boston, MA (US); Société des Produits Nestlé S.A., Vevey (CH)

(72) Inventors: Ramnik Xavier, Cambridge, MA (US); Hera Vlamakis, Cambridge, MA (US); Tommi Vatanen, Cambridge, MA (US); Olga Sakwinska, Lausanne (CH); Léa Siegwald, Lausanne (CH); Stéphane Duboux, Lausanne (CH); Catherine Ngom-Bru, Lausanne (CH)

(21) Appl. No.: 18/574,816

(22) PCT Filed: Jun. 28, 2022
(86) PCT No.: PCT/US2022/035310

§ 371 Date: Dec. 28, 2023

Related U.S. Application Data
(60) Provisional application No. 63/216,127, filed on Jun. 29, 2021.

(51) Int. Cl. C12N 1/20; A23L 33/00; A23L 33/135; C12R 1/04

(52) U.S. Cl. CPC C12N 1/205; A23L 33/135; A23L 33/40; C12R 2001/04

(57) ABSTRACT

Described in several exemplary embodiments are Bifidobacterium longum subspecies, microorganisms and formulations thereof. Described in several exemplary embodiments are formulations, such as synthetic formulations, that contain one or more of the Bifidobacterium longum subspecies microorganisms. Described in several embodiments herein is use of the Bifidobacterium longum subspecies microorganisms and formulations thereof, such as in an infant and/or young child.

### CROSS-REFERENCE TO RELATED APPLICATIONS

[0001] This application claims the benefit of U.S. Provisional Application No. 63/216,127, filed Jun. 29, 2021. The entire contents of the above-identified applications are hereby fully incorporated herein by reference.

### SEQUENCE LISTING

[0002] This application contains a sequence listing filed in electronic form as an ASCII.txt file entitled BROD-5315WP_ST25.txt, created on Jun. 13, 2022, and having a size of 82,361,264 bytes, the content of which is incorporated herein in its entirety.

### TECHNICAL FIELD

[0003] The subject matter disclosed herein is generally directed to Bifidobacterium longum transitional clade, microorganisms, formulations thereof, and uses thereof, particularly in infantile populations.

### BACKGROUND

[0004] Nutrition plays a critical role in the development across all areas (including cognitive, motor sensory, dentition, musculo-skeletal, immunity, and social development) in infants and young children. Further, the gastrointestinal or “gut” microbiome during infancy can play a significant role in the health and development of the infant both during infancy and later on in life (see e.g., Tanaka and Nakayama. 2017. Allergol. Int. 66(4): 515-522). Various factors, including diet, can significantly influence the microbiome structure and thus influence the health and development of an infant both during infancy and later on in life. During infancy, a mammal, including a human, will transition from a diet that is composed of all or primarily a mother's milk to one of solid foods. This is referred to as the “transitional period”, “transitional feeding period”, or “weaning”. As this occurs, significant changes in the gut microbiome structure can take place due the change in diet and other stressors during that time (see e.g., Vatanen et al., 2019. Nature Microbiology. 4:470-479; Dizzell et al., 2021. PLOS ONE. https://doi.org/10.1371/joumal.pone.0248924; Moore and Townsend. 2019. Open Biol. September; 9(9):190128; Magne et al. 2006. FEMS Microbiology Ecology, 58(3): 563-571; and Edwards C. A. Ann Nutr Metab 2017; 70:246-250). The change in microbiome structure can in turn impact the physiologic, cognitive, anatomical, health or other state or characteristic of the mammal. Although several studies have and are currently investigating the gut microbiome during infancy and young childhood, it and its impact on the immediate and lifelong health and well-being of the infant is far from being well characterized. Paralleling the lack of characterization and understanding of the gut microbiome in infancy and young childhood is also a paucity of compositions and formulations capable of facilitating a healthy gut microbiome appropriate for infant or young child use. As such, there exists a need for improved characterization and understanding of the gut microbiome and compositions and methods to support and/or establish a healthy gut microbiome, particularly in infants and young children.

[0005] Citation or identification of any document in this application is not an admission that such a document is available as prior art to the present invention.

### SUMMARY

[0006] Described in several example embodiments herein are synthetic formulations comprising one or more Bifidobacterium longum (B. longum) transitional clade microorganism which has at least 98.6% Average Nucleotide Identity (ANI) with at least one strain selected in the group consisting of: CNCM I-5683, CNCM I-5684, CNCM I-5685, CNCM I-5686 and CNCM I-5687.

[0007] In certain example embodiments, the synthetic formulation comprises one or more Bifidobacterium longum (B. longum) transitional clade microorganisms characterized by the presence of all genes from Table 1.

[0008] Described in several example embodiments herein are synthetic formulations comprising one or more Bifidobacterium longum (B. longum) transitional clade microorganisms characterized by the presence of all genes from Table 2.

[0009] In certain example embodiments of the synthetic formulations herein, the one or more B. longum microorganisms is not of the subspecies B. longum subspecies longum or B. longum subspecies. infantis.

[0010] In certain example embodiments of the synthetic formulations herein, the one or more B. longum microorganisms are isolated from a human.

[0011] In certain example embodiments of the synthetic formulations herein, the synthetic formulations further comprise a fat source, a protein source, a carbohydrate source, a dietary fiber source, or a combination thereof. In certain example embodiments, the fat source is a milk derived fat source or equivalent thereof, wherein the protein source is a milk derived protein source or equivalent thereof, and/or wherein the carbohydrate source is a milk derived carbohydrate source or equivalent thereof. In certain example embodiments, the dietary fiber is a prebiotic fiber. In certain example embodiments, the one or more B. longum microorganisms are associated with the prebiotic fiber.

[0012] In certain example embodiments, the synthetic formulation is a milk fortifier or milk replacement.

[0013] In certain example embodiments, the synthetic formulation is adapted for infant use.

[0014] Described in certain example embodiments herein is a genetically modified microorganism or population thereof, wherein the microorganism is not of a Bifidobacterium longum transitional clade and is genetically modified to have modified expression of one or more genes from Table 1.

[0015] In certain example embodiments, the genetically modified microorganism is a Bifidobacterium species that is not of a B. longum transitional clade.

[0016] Described in certain example embodiments herein are synthetic formulations comprising the genetically modified microorganism or population thereof described in any of the preceding paragraphs and/or is as described elsewhere herein.

[0017] Described in certain example embodiments herein are methods for, in an infant, promoting/assisting transition from a milk-based diet to solid food and/or promoting gut microbiota adapted to metabolize both milk derived carbohydrates and fibers or any derivative thereof comprising administering a synthetic formulation of any one of the preceding paragraphs and/or is as described elsewhere herein to the infant.

[0018] Described in certain example embodiments herein are methods for promoting/assisting transition from a milk based diet to solid food and/or promoting gut microbiota adapted to metabolize both milk derived carbohydrates and fibers or a derivative thereof in an infant comprising administering, to the infant, one or more Bifidobacterium longum (B. longum) transitional clade microorganism which has at least 98.6% Average Nucleotide Identify (ANI) with at least one strain selected in the group consisting of: CNCM I-5683, CNCM I-5684, CNCM I-5685, CNCM I-5686 and CNCM I-5687.

[0019] In certain example embodiments, the one or more Bifidobacterium longum (B. longum) microorganisms characterized by the presence of all genes from Table 1. In certain example embodiments, the one or more B. longum microorganisms is not of the subspecies B. longum subspecies. longum or B. longum subspecies. infantis. In certain example embodiments, the one or more B. longum microorganisms are isolated from a human.

[0020] Described in certain example embodiments herein are methods of identifying a gastrointestinal microbiome modulating agent comprising administering an amount of a test agent to a subject; and determining a microbiome structure of a gastrointestinal tract of the subject by at least determining the relative abundance of one or more one or more Bifidobacterium longum (B. longum) microorganisms characterized by at least 98.6% Average Nucleotide identity (ANI) with at least one strain selected in the group consisting of: CNCM I-5683, CNCM I-5684, CNCM I-5685, CNCM I-5686 and CNCM I-5687, wherein the gastrointestinal microbiome modulating agent is effective to increase or decrease the relative abundance of one or more of the one or more B longum microorganism characterized by the presence of the transitional clade genes.

[0021] In certain example embodiments, the one or more B. longum microorganisms is characterized by the presence of all genes from Table 1.

[0022] In certain example embodiments, the one or more B. longum microorganisms is not of the subspecies B. longum subspecies. longum or B. longum subspecies infantis.

[0023] In certain example embodiments, the one or more B. longum microorganisms are isolated from a human.

[0024] In certain example embodiments, the test agent is provided in a formulation.

[0025] Described in several example embodiments herein is a Bifidobacterium longum (B. longum) microorganism characterized by at least 98.6% Average Nucleotide identity (ANI) with at least one strain selected in the group consisting of: CNCM I-5683, CNCM I-5684, CNCM I-5685, CNCM I-5686 and CNCM I-5687, and combinations thereof.

[0026] Described in several example embodiments herein is a Bifidobacterium longum (B. longum) microorganisms, wherein the B. longum microorganism is characterized by the presence of all genes from Table 1.

[0027] Described in several example embodiments herein is a Bifidobacterium longum (B. longum) microorganism as in any one of the preceding paragraphs and/or is as described elsewhere herein, wherein the B. longum microorganisms is not of the subspecies B. longum subspecies longum or B. longum subspecies infantis.

[0028] Described in several example embodiments herein is a Bifidobacterium longum (B. longum) microorganism for as in any one of the preceding paragraphs and/or is as described elsewhere herein, which is isolated from human.

[0029] Described in several example embodiments herein is a combination of a microorganism as described in any one of the preceding paragraphs and/or as described elsewhere herein, milk derived carbohydrates, and dietary fibers.

[0030] Described in several example embodiments herein is a synthetic composition comprising a microorganism as described in any one of the preceding paragraphs and/or is as described elsewhere herein.

[0031] Described in several example embodiments herein is a synthetic composition according to any one of the preceding paragraphs and/or is as described elsewhere herein for use in promoting/assisting transition from a milk-based diet to solid food in infants (as of the age of 4 months) and/or in young children and/or promoting in infants (as of the age of 4 months) and/or in young children a gut microbiota adapted to metabolize both milk derived carbohydrates and fibers or any derivative thereof.

[0032] Described in several example embodiments herein is the use of a microorganism as described in any one of the preceding paragraphs and/or is as described elsewhere herein for promoting/assisting transition from a milk based diet to solid food in infants (as of the age of 4 months) and/or in young children and/or in promoting in infants (as of the age of 4 months) and/or in young children a gut microbiota adapted to metabolize both milk derived carbohydrates and fibers or any derivative thereof.

[0033] Described in several example embodiments herein are methods for promoting/assisting transition from a milk based diet to solid food in infants (as of the age of 4 months) and/or in young children and/or in promoting in infants (as of the age of 4 months) and/or in young children a gut microbiota adapted to metabolize both milk derived carbohydrates and fibers or any derivative thereof by administering a microorganism as described in any one of the preceding paragraphs and/or is as described elsewhere herein to such infants.

[0034] These and other aspects, objects, features, and advantages of the example embodiments will become apparent to those having ordinary skill in the art upon consideration of the following detailed description of example embodiments.

### BRIEF DESCRIPTION OF THE DRAWINGS

[0035] An understanding of the features and advantages of the present invention will be obtained by reference to the following detailed description that sets forth illustrative embodiments, in which the principles of the invention may be utilized, and the accompanying drawings of which:

[0036] FIG. 1—A diversity box plot showing an increasing microbial complexity with age.

[0037] FIG. 2—Graphs showing a comparison of HMO cluster genes (used to detect B. longum subspecies infantis in DIABIMMUNE and TEDDY) abundance to core genes to determine the relative abundance wrt. B. longum (HUMAnN2 B. longum-stratified CPM) (see also Vatanen et al., Nat Microbiol. 2019 March; 4(3):470-479 and Vatanen et al., Nature. 2018 October; 562(7728):589-594).

[0038] FIG. 3—Graphs showing a discrepancy between B. longum relative abundance (MetaPhlAn) and median core genome coverage (StrainPhlAn).

[0039] FIGS. 4-5—Graphs showing more polymorphisms in B. longum during the transition from breast feeding to solid foods.

[0040] FIGS. 6A-6C and 7A-7D—show the general results of a strain analysis that included seven additional B. longum genomes.

[0041] FIG. 8—Shows analysis results that demonstrate a longitudinal B. longum subspecies infantis to Clade 2 (see e.g., FIG. 7C) to Clade 3 transition (see e.g., FIG. 7D) with the introduction of solid foods and weaning.

[0042] FIG. 9—A graph showing that B. longum subspecies infantis is present in most samples from Dhaka babies.

[0043] FIG. 10—A graph showing that B. longum subspecies infantis is less common in non-breast-fed infants.

[0044] FIG. 11—A graph showing that B. longum subspecies infantis is more abundant than other B. longum strains.

[0045] FIG. 12—A graph showing that the abundance of B. longum subspecies infantis and other B. longum strains differ during breastfeeding.

[0046] FIG. 13—A graph showing that B. longum is ubiquitous with longitudinal strain shifts, including a change in B. longum subspecies infantis.

[0047] FIG. 14—Shows a general timeline for sample collection from 222 babies that were followed in Dhaka, Bangladesh. Metagenomic sequencing analysis was performed on 1, 314 stool samples with an average of 26 million reads per sample.

[0048] FIG. 15—Graphs showing the number of assembled Bifidobacterium genomes per species as a function of genome completeness. The number of genomes with completeness >90 is shown for each species. Only species with more than 50 genomes are shown.

[0049] FIG. 16—Graphs showing the average number of high quality (HQ) genomes per sample and timepoint.

[0050] FIG. 17—Graphs showing the number of B. longum subspecies infantis and B. longum subspecies longum genomes (completeness >90) over time.

[0051] FIG. 18—Graph showing that there were no multiple HQ genomes (completeness >90) B. longum genomes. N=8 samples with second genome with completeness >50.

[0052] FIG. 19—Graph showing the number of genomes vs. number of genes demonstrating how common the gene is among MAGs+reference genomes. 234 HQ MAGs were labeled as B. longum subspecies longum or B. longum subspecies infantis. A pangenome was built together with 25 B. longum subspecies longum/B. longum subspecies infantis reference genomes. 259 “unique” genomes in total. Genomes harbored 484,213 genes in total (sum of genes on all genomes). Genes with >95% identity were considered non-redundant genes. The pangenome harbored 13,834 non-redundant genes.

[0053] FIGS. 20A-20E—MAG analysis demonstrating that three clades were clearly separated on reference genomes.

[0054] FIG. 21—MAG analysis demonstrating that B. longum MAGs are clearly divided between B. longum subspecies longum and a B. longum transitional clade. MAGs from the B. longum transitional clade look more like B. longum subspecies suis than other reference genomes.

[0055] FIG. 22—A phylogeny map and heat map generated using the most prevalent marker genes to estimate and show clade abundance. Points on the phylogeny show the dominant strain by marker gene abundance. The heatmap shows clade abundance within B. longum.

[0056] FIG. 23—A ternary/simplex graph showing the succession from B. longum subspecies infantis to B. longum “transitional” clade to B. longum subspecies longum. B. longum subspecies infantis and B. longum “transitional” clade coexist while B. longum subspecies infantis and B. longum subspecies longum do not.

[0057] FIG. 24—A workflow of a comprehensive, taxonomy-aware functional annotation of genome assemblies.

[0058] FIG. 25—A graph showing distinct longitudinal trends in B. longum subspecies.

[0059] FIGS. 26A-26B—MAG analyses demonstrating that the B. longum MAGs are still clearly divided between B. longum subspecies longum and a B. longum transitional clade. The MAGs from the B. longum transitional clade still look more like B. longum subspecies suis than the other reference genomes.

[0060] FIG. 27—A comparison of abundance estimates between previous MAG analysis data (see e.g., FIGS. 20A-20E).

[0061] FIG. 28—A phylogeny map and heat map generated using the most prevalent marker genes of the expanded dataset to estimate and show clade abundance. Points on the phylogeny show the dominant strain by marker gene abundance. The heatmap shows clade abundance within B. longum.

[0062] FIGS. 29A-29C—Graphs showing the relative abundance of B. longum subspecies infantis (FIG. 29A), B. longum transitional clade (FIG. 29B), and B. longum subspecies longum (FIG. 29C).

[0063] FIG. 30—A heatmap of selected clade-specific gene functions among isolate genomes (or B. longum subspecies longum references).

[0064] FIG. 31—A neighborhood of the beta-lactamase gene on a B. longum transitional clade isolate.

[0065] FIG. 32—Nucleotide alignment of B. longum isolates. The overlapping region in the end of the genes (top is B. longum transitional clade beta-lactamase genes, bottom is B. longum subspecies infantis beta-lactamase genes) on nucleotide level (black indicates match). The average nucleotide identity was 52% between the clades.

[0066] FIG. 33—Amino acid alignment of B. longum isolates. Overlapping region on grayscale by amino acid seq. Amino acid sequences are distinct per subspecies clades. The average amino acid identity was 34% between the clades.

[0067] FIG. 34—A heatmap showing significant rank-correlations between B. longum transitional clade and other species.

[0068] FIG. 35—A graph showing the relative abundances of Bifidobacterium longum subspecies overtime.

[0069] FIG. 36 shows Average Nucleotide Identity (ANI) UPGMA based phylogenetic tree computed with OrthoANIu software showing separation of the Bifidobacterium subspecies. The scale represents the percentage (%) of identity at each branch point.

[0070] FIG. 37—Cell density of selected B. longum subspecies suis, B. longum subspecies. suillum and newly described B. longum clade strains after 48 h growth on glucose or an HMO mix as sole carbon source (0.3% final concentration). Blanks (growth on a medium without carbohydrates) has been subtracted. Significant differences to B. longum subspecies suis ATCC 27533 were calculated using one-way ANOVA, followed by a Sidak's multiple comparison test performed on the different substrates (* p-value <0.05, ** p-value <0.01; *** p-value <0.001, **** p-value <0.0001). Values represent averages and standard deviation of biological triplicates.

[0071] FIG. 38—Cell density of selected B. longum subspecies suis, B. longum subspecies suillum and newly described B. longum clade strains after 48 h growth on glucose or on two commercially available scFOS fibers as sole carbon source (0.5% final concentration). Blanks (growth on a medium without carbohydrates) has been subtracted. Significant differences to B. longum subsp. suis ATCC 27533 were calculated using one-way ANOVA, followed by a Sidak's multiple comparison test performed on the different substrates (* p-value <0.05, ** p-value <0.01; *** p-value <0.001, **** p-value <0.0001). Values represent averages and standard deviation of biological triplicates.

[0072] FIG. 39—Glucose to scFOS growth ration of selected B. longum subspecies suis, B. longum subspecies suillum and newly described B. longum clade strains after 48 h growth on glucose or on two commercially available scFOS fibers as sole carbon source (0.5% final concentration). Ratios were calculated based on blanked values (growth on a medium without carbohydrates was subtracted). Significant differences to B. longum subspecies suis ATCC 27533 were calculated using one-way ANOVA, followed by a Sidak's multiple comparison test performed on the different substrate ratios (* p-value <0.05, ** p-value <0.01; *** p-value <0.001, **** p-value <0.0001). Values represent averages and standard deviation of biological triplicates.

[0073] The figures herein are for illustrative purposes only and are not necessarily drawn to scale.

### DETAILED DESCRIPTION OF THE EXAMPLE EMBODIMENTS

### General Definitions

[0074] Unless defined otherwise, technical and scientific terms used herein have the same meaning as commonly understood by one of ordinary skill in the art to which this disclosure pertains. Definitions of common terms and techniques in molecular biology may be found in Molecular Cloning: A Laboratory Manual, 2^{nd} edition (1989) (Sambrook, Fritsch, and Maniatis); Molecular Cloning: A Laboratory Manual, 4^{th} edition (2012) (Green and Sambrook); Current Protocols in Molecular Biology (1987) (F. M. Ausubel et al. eds.); the series Methods in Enzymology (Academic Press, Inc.): PCR 2: A Practical Approach (1995) (M. J. MacPherson, B. D. Hames, and G. R. Taylor eds.): Antibodies, A Laboratory Manual (1988) (Harlow and Lane, eds.): Antibodies A Laboratory Manual, 2^{nd} edition 2013 (E. A. Greenfield ed.); Animal Cell Culture (1987) (R. I. Freshney, ed.); Benjamin Lewin, Genes IX, published by Jones and Bartlet, 2008 (ISBN 0763752223); Kendrew et al. (eds.), The Encyclopedia of Molecular Biology, published by Blackwell Science Ltd., 1994 (ISBN 0632021829); Robert A. Meyers (ed.), Molecular Biology and Biotechnology: a Comprehensive Desk Reference, published by VCH Publishers, Inc., 1995 (ISBN 9780471185710); Singleton et al., Dictionary of Microbiology and Molecular Biology 2nd ed., J. Wiley & Sons (New York, N.Y. 1994), March, Advanced Organic Chemistry Reactions, Mechanisms and Structure 4th ed., John Wiley & Sons (New York, N.Y. 1992); and Marten H. Hofker and Jan van Deursen, Transgenic Mouse Methods and Protocols, 2^{nd} edition (2011).

[0075] As used herein, the singular forms “a” “an”, and “the” include both singular and plural referents unless the context clearly dictates otherwise.

[0076] The term “optional” or “optionally” means that the subsequent described event, circumstance or substituent may or may not occur, and that the description includes instances where the event or circumstance occurs and instances where it does not.

[0077] The recitation of numerical ranges by endpoints includes all numbers and fractions subsumed within the respective ranges, as well as the recited endpoints.

[0078] The terms “about” or “approximately” as used herein when referring to a measurable value such as a parameter, an amount, a temporal duration, and the like, are meant to encompass variations of and from the specified value, such as variations of +/−10% or less, +/−5% or less, +/−1% or less, and +/−0.1% or less of and from the specified value, insofar such variations are appropriate to perform in the disclosed invention. It is to be understood that the value to which the modifier “about” or “approximately” refers is itself also specifically, and preferably, disclosed.

[0079] As used herein, a “biological sample” may contain whole cells and/or live cells and/or cell debris. The biological sample may contain (or be derived from) a “bodily fluid”. The present invention encompasses embodiments wherein the bodily fluid is selected from amniotic fluid, aqueous humour, vitreous humour, bile, blood serum, breast milk, cerebrospinal fluid, cerumen (earwax), chyle, chyme, endolymph, perilymph, exudates, feces, female ejaculate, gastric acid, gastric juice, lymph, mucus (including nasal drainage and phlegm), pericardial fluid, peritoneal fluid, pleural fluid, pus, rheum, saliva, sebum (skin oil), semen, sputum, synovial fluid, sweat, tears, urine, vaginal secretion, vomit and mixtures of one or more thereof. Biological samples include cell cultures, bodily fluids, cell cultures from bodily fluids. Bodily fluids may be obtained from a mammal organism, for example by puncture, or other collecting or sampling procedures.

[0080] The terms “subject,” “individual,” and “patient” are used interchangeably herein to refer to a vertebrate, preferably a mammal, more preferably a human. Mammals include, but are not limited to, murines, simians, humans, farm animals, sport animals, and pets. Tissues, cells and their progeny of a biological entity obtained in vivo or cultured in vitro are also encompassed.

[0081] As used herein, “nutritional composition” refers to any kind of composition or formulation that provides a nutritional benefit to an individual and that may be safely consumed by a human or animal. Said nutritional composition may be in solid, semi-solid or liquid form and may comprise one or more macronutrients, micronutrients, food additives, water, etc. For instance, the nutritional composition may comprise the following macronutrients: a source of proteins, a source of lipids, a source of carbohydrates and any combination thereof. Furthermore, the nutritional composition may comprise the following micronutrients: vitamins, minerals, fiber, phytochemicals, antioxidants, prebiotics, probiotics, and any combination thereof. The composition may also contain food additives such as stabilizers (when provided in solid form) or emulsifiers (when provided in liquid form). The amount of the various ingredients (e.g. the oligosaccharides) can be expressed in g/100 g of composition on a dry weight basis when it is in a solid form, e.g. a powder, or as a concentration in g/L of the composition when it refers to a liquid form (this latter also encompasses liquid composition that may be obtained from a powder after reconstitution in a liquid such as milk, water . . . , e.g. a reconstituted infant formula or follow-on/follow-up formula or infant cereal product or any other formulation designed for infant or young child nutrition). Generally, a nutritional composition can be formulated to be taken enterally, orally, parenterally or intravenously, and it usually includes one of more nutrients selected from: a lipid or fat source, a protein source. and a carbohydrate source. Preferably, a nutritional composition is for oral use.

[0082] As used herein, the term “infant” means a human subject under the age of 12 months or an age-equivalent non-human animal.

[0083] As used herein, “young child” or “toddler” means a human subject aged between 12 months and 5 years of age.

[0084] Various embodiments are described hereinafter. It should be noted that the specific embodiments are not intended as an exhaustive description or as a limitation to the broader aspects discussed herein. One aspect described in conjunction with a particular embodiment is not necessarily limited to that embodiment and can be practiced with any other embodiment(s). Reference throughout this specification to “one embodiment”, “an embodiment,” “an example embodiment,” means that a particular feature, structure or characteristic described in connection with the embodiment is included in at least one embodiment of the present invention. Thus, appearances of the phrases “in one embodiment,” “in an embodiment,” or “an example embodiment” in various places throughout this specification are not necessarily all referring to the same embodiment but may. Furthermore, the particular features, structures or characteristics may be combined in any suitable manner, as would be apparent to a person skilled in the art from this disclosure, in one or more embodiments. Furthermore, while some embodiments described herein include some, but not other features included in other embodiments, combinations of features of different embodiments are meant to be within the scope of the invention. For example, in the appended claims, any of the claimed embodiments can be used in any combination.

[0085] All publications, published patent documents, and patent applications cited herein are hereby incorporated by reference to the same extent as though each individual publication, published patent document, or patent application was specifically and individually indicated as being incorporated by reference.

### Overview

[0086] Embodiments disclosed herein provide B. longum subspecies, particularly a new clade, that dominates during the transitional feeding period of an infant and various compositions and formulations thereof. This new clade is referred to herein as the B. longum transitional clade. Microorganisms of the B. longum transitional clade can be included in a synthetic composition and/or nutritional composition as a probiotic. The compositions can be used to assist and/or promote transitioning from a pure or partial milk-based diet to a diet of solid food in an infant or young child. Such synthetic compositions can be formulated, for example, as milk replacements, milk fortifiers, infant formulas, infant cereals and the like.

[0087] Embodiments disclosed herein also provide marker genes and/or signatures that characterize and/or uniquely identify microorganisms of the B. longum transitional clade. These marker genes and/or signatures can, for example, be used to assess a microbiome structure and identify modulating agents that can promote or limit the abundance of one or more microorganisms of the B. longum transitional clade within a microbiome, particularly a gastrointestinal microbiome.

[0088] Embodiments disclosed herein also provide genetically modified organisms that, while not being of a B. longum transitional clade, can be modified so as to have or express one or more B. longum transitional clade marker genes and/or signatures. These modified microorganisms can be included in compositions, such as a synthetic composition, with or without one or more microorganisms of the B. longum transitional clade, in a synthetic composition and/or nutritional composition as a probiotic. The compositions can be used to assist and/or promote transitioning from a pure or partial milk-based diet to a diet of solid food in an infant or young child. Such synthetic compositions can be formulated, for example, as milk replacements, milk fortifiers, infant formulas, infant cereals and the like.

B. longum Transitional Clade Microorganisms

[0089] Described in several exemplary embodiments herein are Bifidobacterium longum spp. microorganisms of a clade that is present in a gastrointestinal microbiome of the transitional feeding period of mammals, particularly humans. B. longum microorganisms belonging to this clade are referred to herein as Bifidobacterium longum transitional (B. longum transitional) clade. As shown in the Working Examples herein, e.g., FIG. 36, the B. longum transitional clade microorganisms are greater in relative abundance during the transitional feeding period (e.g., weaning and as further defined elsewhere herein) than either B. longum subspecies infantis (B. infantis) as the relative abundance of B. longum subspecies infantis decreases at the beginning of the transitional feeding period until the end of the transitional feeding period when B. longum subspecies longum begins to increase in abundance.

[0090] The term “complementary feeding period”, “complementary period”, “transitional period”, “transitional feeding period”, which are used interchangeably herein, refers to the process or time period in which an infant or young child is moved (or transitioned), typically gradually over a period of time, from exclusive or partial milk feeding (such as breast milk feeding) to mix diet comprising breast milk (or replacers) and/or solid foods. This period depends on the individual infant and/or young child, but typically falls within the range from 4 months to 18 months of age, such as from about 6 to about 18 months, but in some instances can extend up to 24 months or more. This period is also referred to herein as the “weaning” period or “complementary feeding period”. For humans, the transition feeding period typically starts at age between 4 and 6 months of infant's age and is considered completed once the infant and/or young child is no longer fed with breast milk (or substitute infant formula), typically at 24 months. In one embodiment, the transition feeding period is between 4 and 24 months, for example 18 months of infant's and/or young child's age. This period is also referred to herein as the “weaning” period.

[0091] In some embodiments, a B. longum transitional clade microorganism has about 98.6%-100% Average Nucleotide Identity (ANI) with at least one strain selected from the group of: CNCM I-5683, CNCM I-5684, CNCM I-5685, CNCM I-5686 and CNCM I-5687. In some embodiments, a B. longum transitional clade microorganism has about 98.6%, 98.7%, 98.8%, 98.9%, 99%, 99.1%, 99.2%, 99.3%, 99.4%, 99.5%, 99.6%, 99.7%, 99.8%, 99.9%, or 100% ANI with at least one strain selected from the group of: CNCM I-5683, CNCM I-5684, CNCM I-5685, CNCM I-5686 and CNCM I-5687. In some embodiments, a B. longum transitional clade microorganism has at least 98.6%, has at least 98.7%, has at least 98.8%, has at least 98.9%, has at least 99%, has at least 99.1%, has at least 99.2%, has at least 99.3%, has at least 99.4%, has at least 99.5%, has at least 99.6%, has at least 99.7%, has at least 99.8%, has at least 99.9%, ANI with at least one strain selected from the group of: CNCM I-5683, CNCM I-5684, CNCM I-5685, CNCM I-5686 and CNCM I-5687. In some embodiments, a B. longum transitional clade microorganism has at least 98.6% ANI with at least one strain selected from the group of: CNCM I-5683, CNCM I-5684, CNCM I-5685, CNCM I-5686 and CNCM I-5687.

[0092] Average nucleotide identity (ANI) is a term of art that refers to a distance-based approach to delineate species based on pair-wise comparisons of their genome sequences and is an in silico alternative to the traditional DNA-DNA hybridization (DDH) techniques that have been used for phylogenetic definition of a species (Goris et al., 2007, “DNA-DNA hybridization values and their relationship to whole-genome sequence similarities”, Int. J. Syst. Evol. Microbiol. 57: 81-91). Based on DDH, strains with greater than 70% relatedness would be considered to belong to the same species (see e.g., Wayne et al., 1987, Report of the Ad-Hoc-Committee on Reconciliation of Approaches to Bacterial Systematics. Int J Syst Bacteriol 37: 463-464). ANI is similar to the aforementioned 70% DDH cutoff value and can be used for species delineation. ANI has been evaluated in multiple labs and has become the gold standard for species delineation (see e.g., Kim et al., 2014, “Towards a taxonomic coherence between average nucleotide identity and 16S rRNA gene sequence similarity for species demarcation of prokaryotes”, Int. J. Syst. Evol. Micr. 64: 346-351; Richter et al., 2009, “Shifting the genomic gold standard for the prokaryotic species definition”, P Nat Acad Sci USA 106: 19126-19131; and Chan et al., 2012, “Defining bacterial species in the genomic era: insights from the genus Acinetobacter”, Bmc. Microbiol. 12)).

[0093] The ANI of the shared genes between two strains is known to be a robust means to compare genetic relatedness among strains, and that ANI values of about 95% correspond to the 70% DNA-DNA hybridization standard for defining a species. See, e.g., Konstantinidis and Tiedje, Proc Natl Acad Sci USA, 102(7):2567-72 (2005); and Goris et al., Int Syst Evol Microbiol. 57(Pt 1):81-91 (2007). The ANI between two bacterial genomes is calculated from pair-wise comparisons of all sequences shared between any two strains and can be determined, for example, using any of a number of publicly available ANI tools, including but not limited to OrthoANI with usearch (Yoon et al. Antonie van Leeuwenhoek 110:1281-1286 (2017)); ANI Calculator, JSpecies (Richter and Rossello-Mora, Proc Nat Acad Sci USA 106:19126-19131 (2009)); and JSpeciesWS (Richter et al., Bioinformatics 32:929-931 (2016)). Other methods for determining the ANI of two genomes are known in the art. See, e.g., Konstantinidis, K. T. and Tiedje, J. M., Proc. Natl. Acad. Sci. U.S.A., 102: 2567-2572 (2005); and Varghese et al., Nucleic Acids Research, 43(14):6761-6771 (2015). In a particular embodiment, the ANI between two bacterial genomes can be determined, for example, by averaging the nucleotide identity of orthologous genes identified as bidirectional best hits (BBHs). Protein-coding genes of a first genome (Genome A) and second genome (Genome B) are compared at the nucleotide level using a similarity search tool, for example, NSimScan (Novichkov et al., Bioinformatics 32(15): 2380-23811 (2016). The results are then filtered to retain only the BBHs that display at least 70% sequence identity over at least 70% of the length of the shorter sequence in each BBH pair. The ANI of Genome A to Genome B is defined as the sum of the percent identity times the alignment length for all BBHs, divided by the sum of the lengths of the BBH genes. These and ANI determination techniques are known in the art and are described elsewhere herein.

[0094] In some embodiments, a B. longum transitional clade microorganism has about 98.6%-100% ANI with at least one genome sequence selected from the group of SEQ ID NOs: 1-4010. In some embodiments, a B. longum transitional clade microorganism has about 98.6%, 98.7%, 98.8%, 98.9%, 99%, 99.1%, 99.2%, 99.3%, 99.4%, 99.5%, 99.6%, 99.7%, 99.8%, 99.9%, or 100% ANI with at least one genome sequence selected from the group of SEQ ID NOs: 1-4010. In some embodiments, a B. longum transitional clade microorganism has at least 98.6%, has at least 98.7%, has at least 98.8%, has at least 98.9%, has at least 99%, has at least 99.1%, has at least 99.2%, has at least 99.3%, has at least 99.4%, has at least 99.5%, has at least 99.6%, has at least 99.7%, has at least 99.8%, has at least 99.9%, ANI with at least one genome sequence selected from the group of SEQ ID NOs: 1-4010.

[0095] In some embodiments, a B. longum transitional clade microorganism is characterized by the presence of all genes from Table 1. In some embodiments, a B. longum transitional clade microorganism is characterized by the presence of one or more genes from Table 1. In some embodiments, a B. longum transitional clade microorganism is characterized by the presence of 1, 2, 3, 4, 5, 6, 7, 8, 9, 10, 11, 12, 13, 14, 15, 16, 17, 18, 19, 20, 21, 22, 23, 24, 25, 26, 27, 28, 29, 30, 31, 32, 33, 34, 35, 36, 37, 38, 39, 40, 41, 42, 43, 44, 45, 46, 47, 48, 49, 50, 51, 52, 53, 54, 55, 56, 57, 58, 59, 60, or 61 genes from Table 1. In some embodiments, a B. longum transitional clade microorganism is characterized by the presence of 1 to 2, 3, 4, 5, 6, 7, 8, 9, 10, 11, 12, 13, 14, 15, 16, 17, 18, 19, 20, 21, 22, 23, 24, 25, 26, 27, 28, 29, 30, 31, 32, 33, 34, 35, 36, 37, 38, 39, 40, 41, 42, 43, 44, 45, 46, 47, 48, 49, 50, 51, 52, 53, 54, 55, 56, 57, 58, 59, 60, or 61 genes from Table 1.

[0096] In some embodiments, a B. longum transitional clade microorganism is characterized by the presence of all genes from Table 2. In some embodiments, a B. longum transitional clade microorganism is characterized by the presence of one or more genes from Table 2. In some embodiments, a B. longum transitional clade microorganism is characterized by the presence of 1, 2, 3, 4, 5, 6, 7, 8, 9, 10, 11, 12, 13, 14, 15, 16, 17, 18, 19, 20, 21, 22, 23, 24, 25, 26, 27, 28, 29, or 30 genes from Table 2. In some embodiments, the one or more B. longum transitional clade microorganisms included in the composition/formulation is characterized by the presence of 1 to 2, 3, 4, 5, 6, 7, 8, 9, 10, 11, 12, 13, 14, 15, 16, 17, 18, 19, 20, 21, 22, 23, 24, 25, 26, 27, 28, 29, or 30 genes from Table 2.

[0097] As used in this context herein, “presence . . . of a gene” refers to the inclusion of a gene or gene homologue in a genome of an organism (whether expressed or not) as determined by a suitable detection methodology and/or analysis. Suitable detection and/or analysis includes in silico analytics, genome sequencing, gene and/or protein expression analysis, or any combination thereof. One suitable method to resolve genomes of a microbiome to resolve microbiome structure and diversity of a microbiome is metagenomic analysis. Such an approach can be employed to survey individual microorganisms and their genomes present in the microbiome. Generally, metagenomics applies a suite of genomic sequencing technologies and bioinformatics tools to directly access the genetic content of entire communities of organisms. Generally, whole communities of microorganisms can be shot-gun sequenced in parallel and using in silico bioinformatics approaches, genomes can be resolved. The resulting genomes are referred to as Metagenome Assembled Genomes (MAGs). See e.g., Chen et al., 2020. Genome Res. 2020. 30: 315-333; Sangwan et al., Microbiome 4: 8.doi:10.1186/s40168-016-0154-5; Olson et al., Brief Bioinform 20: 1140-1150.doi:10.1093/bib/bbx098. From MAGs the presence (or absence) of a gene can be determined based on various bioinformatic approaches and tools, such as those that are alignment based and using reference gene sequences and/or genomes for comparison. It will be appreciated that the population can also be resolved by using other methods such as single cell sequencing techniques to determine the presence or absence of a given gene or genes. In one example embodiment, a gene is considered present if it is has a coverage of 90% in the MAGs analysis and has at least 95% shared sequence identity.

[0098] In some embodiments, the B. longum transitional clade microorganism is any one of CNCM I-5683, CNCM I-5684, CNCM I-5685, CNCM I-5686 and CNCM I-5687. In some embodiments, the B. longum transitional clade microorganism is any one of CNCM I-5683, CNCM I-5684, CNCM I-5685, CNCM I-5686 and CNCM I-5687 and any microorganism having a genome with about 100% ANI to any one of SEQ ID NOs: 1-4010.

[0099] In some embodiments, the composition/formulation includes one or more B. longum transitional clade microorganisms is not of the subspecies B. longum subspecies longum or B. longum subspecies infantis.

### Modified Microorganisms

[0100] In some embodiments, it can be advantageous to provide B. longum transitional clade microorganisms to a subject. In some instances, it may be advantageous to modify a non-B. longum transitional clade microorganism to contains and/or expresses one or more genes of a B. longum transitional clade signature and/or such that it comprises a B. longum transitional clade signature. This may be advantageous to generate a microorganism with the characteristics, function(s), and/or advantages of a B. longum transitional clade microorganism with the characteristics, function(s), and/or advantages of the background microorganism (i.e., the microorganism that is modified). Further, it will be appreciated that modification of a non-B. longum transitional clade microorganism can take place in vivo (e.g., via administration of a microbiome modulating agent and/or gene modifying agent) and thus change a microbiome structure such that it includes (where it previously did not) or it has more microorganisms that have a B. longum transitional clade signature and/or characteristics, functions, and/or advantages thereof (such as those that assist/promote transitioning from a milk-based diet to a solid and/or adult food diet). Other applications for the modified organisms described herein are discussed elsewhere herein and/or will be appreciated by those of ordinary skill in the art in view of the description herein.

[0101] In one example embodiment, a genetically modified microorganism is not of a Bifidobacterium longum transitional clade and is genetically modified to have modified expression of one or more genes from Table 1. In one example embodiments, the microorganism is not of a Bifidobacterium longum transitional clade and is genetically modified to have modified expression of 1, 2, 3, 4, 5, 6, 7, 8, 9, 10, 11, 12, 13, 14, 15, 16, 17, 18, 19, 20, 21, 22, 23, 24, 25, 26, 27, 28, 29, 30, 31, 32, 33, 34, 35, 36, 37, 38, 39, 40, 41, 42, 43, 44, 45, 46, 47, 48, 49, 50, 51, 52, 53, 54, 55, 56, 57, 58, 59, 60, or 61 genes from Table 1.

[0102] In one example embodiment, the genetically modified microorganism is not of a Bifidobacterium longum transitional clade and is modified to have modified expression of one or more genes from Table 2. In one example embodiment, the microorganism is not of a Bifidobacterium longum transitional clade and is genetically modified to have modified expression of 1, 2, 3, 4, 5, 6, 7, 8, 9, 10, 11, 12, 13, 14, 15, 16, 17, 18, 19, 20, 21, 22, 23, 24, 25, 26, 27, 28, 29, or 30 genes from Table 2.

[0103] In some embodiments, the microorganism that is modified is a Bifidobacterium longum spp. that is not of a Bifidobacterium longum transitional clade. In one example embodiment, the microorganism that is modified is selected from the group consisting of a B. longum subspecies longum strain, is of a B. longum subspecies infantis strain, or a B. longum subspecies suis strain, or any combination thereof. In one example embodiment, the microorganism that is modified is selected from the group consisting of B. longum bb536; B. longum es 1; B. longum w11; B. longum NCC 3001; B. longum 1714; B. longum KACC 91563; B. longum subspecies longum SPM 1205, 1206, 1207, CECT 7347, MM-2; B. longum subspecies infantis ATCC 15697, Bifidobacterium longum subspecies infantis 35624, or any combination thereof.

[0104] As used in this context herein, “modified” broadly denotes a qualitative and/or quantitative alteration, change, or variation in that which is being modified. Where modification can be assessed quantitatively—for example, where modification comprises or consists of a change in a quantifiable variable such as a quantifiable property of a genome, transcriptome, proteome, epigenome, or other cell property or where a quantifiable variable provides a suitable surrogate for the modification (e.g., genotype, gene and/or protein expression, methylation, etc.)—modification specifically encompasses an increase (e.g., activation) or decrease (e.g., inhibition) in the measured variable. “Increase” in this context encompasses modifications that provide any measurable presence or activity where there was not any prior to the modification. Similarly, “decrease” in this context encompasses the elimination of any measurable activity or presence after modification. Thus, the term “modified” encompasses the change associated with introduction of a feature not previously present as well as the removal of a feature such that it is no longer present after the modification. For example, insertion of an exogenous gene can result in modified expression (e.g., an increase in expression) of that gene relative to the unmodified state. Similarly, deletion or disruption of a gene can result in modified expression (e.g., decreased expression) of that gene relative to the unmodified state. The term encompasses any extent of such modification, e.g., any extent of such increase or decrease, and may more particularly refer to statistically significant increase or decrease in the measured variable. By means of example, in embodiments modification may encompass an increase in the value of the measured variable by about 10 to 500 percent or more. In aspects, modulation can encompass an increase in the value of at least 10%, 20%, 30%, 40%, 50%, 75%, 100%, 150%, 200%, 250%, 300%, 400% to 500% or more, compared to a reference situation or suitable control without said modulation. In embodiments, “modified” encompasses a decrease or reduction in the value of the measured variable by about 5 to about 100%. In some embodiments, the decrease can be about 5%, 10%, 20%, 30%, 40%, 50%, 60%, 70%, 80%, 90%, 95%, 96%, 97%, 98%, 99% to about 100%, compared to a reference situation or suitable control without said modulation. In some embodiments, modification may be binary—e.g., presence or absence of a feature. For example, when a genome is modified, the modification may result in the inclusion (and/or deletion) of one or more nucleotides and thus the modification may be measured or evaluated in a binary approach (e.g., yes/no, or present/absent, A or T, G or C, etc.).

[0105] “Modified” encompasses a deviation of a first value from a second value in any direction (e.g., increase: first value >second value; or decrease: first value <second value) and any extent of alteration. For example, a deviation may encompass a decrease in a first value by, without limitation, at least about 10% (about 0.9-fold or less), or by at least about 20% (about 0.8-fold or less), or by at least about 30% (about 0.7-fold or less), or by at least about 40% (about 0.6-fold or less), or by at least about 50% (about 0.5-fold or less), or by at least about 60% (about 0.4-fold or less), or by at least about 70% (about 0.3-fold or less), or by at least about 80% (about 0.2-fold or less), or by at least about 90% (about 0.1-fold or less), relative to a second value with which a comparison is being made.

[0106] For example, a deviation may encompass an increase of a first value by, without limitation, at least about 10% (about 1.1-fold or more), or by at least about 20% (about 1.2-fold or more), or by at least about 30% (about 1.3-fold or more), or by at least about 40% (about 1.4-fold or more), or by at least about 50% (about 1.5-fold or more), or by at least about 60% (about 1.6-fold or more), or by at least about 70% (about 1.7-fold or more), or by at least about 80% (about 1.8-fold or more), or by at least about 90% (about 1.9-fold or more), or by at least about 100% (about 2-fold or more), or by at least about 150% (about 2.5-fold or more), or by at least about 200% (about 3-fold or more), or by at least about 500% (about 6-fold or more), or by at least about 700% (about 8-fold or more), or like, relative to a second value with which a comparison is being made.

[0107] Preferably, a deviation may refer to a statistically significant observed alteration. For example, a deviation may refer to an observed alteration which falls outside of error margins of reference values (as expressed, for example, by standard deviation or standard error, or by a predetermined multiple thereof, e.g., ±1×SD or ±2×SD or +3×SD, or ±1×SE or ±2×SE or ±3×SE). Deviation may also refer to a value falling outside of a reference range defined by values in a given population (for example, outside of a range which comprises ≥40%, ≥50%, ≥60%, ≥70%, ≥75% or ≥80% or ≥85% or ≥90% or ≥95% or even ≥100% of values in said population).

[0108] In a further embodiment, a deviation may be concluded if an observed alteration is beyond a given threshold or cut-off. Such threshold or cut-off may be selected as generally known in the art to provide for a chosen sensitivity and/or specificity of the prediction methods, e.g., sensitivity and/or specificity of at least 50%, or at least 60%, or at least 70%, or at least 80%, or at least 85%, or at least 90%, or at least 95%.

[0109] As used herein in, in the context of polynucleotide or gene “expression” refers to the process by which polynucleotides are transcribed into RNA transcripts. In the context of mRNA and other translated RNA species, “expression” refers to the process or processes by which the transcribed RNA is subsequently translated into peptides, polypeptides, or proteins. In some instances, “expression” reflects the stability of a given RNA. For example, when one measures RNA, depending on the method of detection and/or quantification of the RNA as well as other techniques used in conjunction with RNA detection and/or quantification, it can be that increased/decreased RNA transcript levels are the result of increased/decreased transcription and/or increased/decreased stability and/or degradation of the RNA transcript. One of ordinary skill in the art will appreciate these techniques and the relation of “expression” in these various contexts to the underlying biological mechanisms.

[0110] As used herein, “modified expression” generally denotes an alteration (increase or decrease) in the expression of a polynucleotide (e.g., a DNA or RNA) or protein according to the definitions of “modified” and “expression” provided herein.

### Bacteria Genome Editing Methods

[0111] Modified bacteria may be generated using known bacterial genome editing methods. For example, plasmid-based gene knock-out and knock-in approaches may be used to remove or insert genes into bacterial genomes, respectively. Lambda bacteriophage-based approaches, e.g., k Red systems, may also be used to facilitate recombination-mediated genetic engineering. Alternatively, Group II intron and/or Group II intron, Cre/lox combinations may be used to facilitate both gene knock-out, gene knock-in and other large-scale genomic modifications. CRISPR-Cas systems have also been adapted to for bacteria genome editing. An overview of bacterial genome engineering systems is discussed in Nakashima and Miyazaki, International Journal of Molecular Sciences 2014, 15, 2773-2793, particularly Table 2, which is specifically incorporated herein by reference. CRISPR-Cas based systems for bacterial genome editing, and variations thereof, are further discussed in Arroyo-Olarte et al. Microorganisms, 2021, 9, 844, particularly FIGS. 3 and 5, which are specifically incorporated herein by reference.

B. longum Transitional Clade Compositions

[0112] Described in several exemplary embodiments herein are compositions and formulations that can included one or more of the B. longum transitional clade microorganisms described and demonstrated elsewhere herein. In some embodiments, the compositions and/or formulation include at least one, at least two, or more B. longum transitional clade strains. In some embodiments the compositions are synthetic compositions and/or nutritional compositions.

[0113] In some embodiments, the compositions include one or more modified microorganisms as described in greater detail elsewhere herein.

[0114] In some embodiments, the one or more B. longum transitional clade microorganisms included in the composition have about 98.6%-100% Average Nucleotide Identity (ANI) with at least one strain selected in the group of: CNCM I-5683, CNCM I-5684, CNCM I-5685, CNCM I-5686 and CNCM I-5687. In some embodiments, the one or more B. longum transitional clade microorganisms included in the composition have about 98.6%, 98.7%, 98.8%, 98.9%, 99%, 99.1%, 99.2%, 99.3%, 99.4%, 99.5%, 99.6%, 99.7%, 99.8%, 99.9%, or 100% Average Nucleotide Identity (ANI) with at least one strain selected in the group of: CNCM I-5683, CNCM I-5684, CNCM I-5685, CNCM I-5686 and CNCM I-5687. In some embodiments, the one or more B. longum transitional clade microorganisms have at least 98.6%, has at least 98.7%, has at least 98.8%, has at least 98.9%, has at least 99%, has at least 99.1%, has at least 99.2%, has at least 99.3%, has at least 99.4%, has at least 99.5%, has at least 99.6%, has at least 99.7%, has at least 99.8%, has at least 99.9%, ANI with at least one strain selected in the group of: CNCM I-5683, CNCM I-5684, CNCM I-5685, CNCM I-5686 and CNCM I-5687. In some embodiments, the one or more B. longum transitional clade microorganisms included in the composition have at least 98.6% Average Nucleotide Identity (ANI) with at least one strain selected in the group of: CNCM I-5683, CNCM I-5684, CNCM I-5685, CNCM I-5686 and CNCM I-5687.

[0115] In some embodiments, the one or more B. longum transitional clade microorganisms included in the composition is characterized by the presence of all genes from Table 1. In some embodiments, the one or more B. longum transitional clade microorganisms included in the composition is characterized by the presence of one or more genes from Table 1. In some embodiments, the one or more B. longum transitional clade microorganisms included in the composition/formulation is characterized by the presence of 1, 2, 3, 4, 5, 6, 7, 8, 9, 10, 11, 12, 13, 14, 15, 16, 17, 18, 19, 20, 21, 22, 23, 24, 25, 26, 27, 28, 29, 30, 31, 32, 33, 34, 35, 36, 37, 38, 39, 40, 41, 42, 43, 44, 45, 46, 47, 48, 49, 50, 51, 52, 53, 54, 55, 56, 57, 58, 59, 60, or 61 genes from Table 1. In some embodiments, the one or more B. longum transitional clade microorganisms included in the composition is characterized by the presence of 1 to 2, 3, 4, 5, 6, 7, 8, 9, 10, 11, 12, 13, 14, 15, 16, 17, 18, 19, 20, 21, 22, 23, 24, 25, 26, 27, 28, 29, 30, 31, 32, 33, 34, 35, 36, 37, 38, 39, 40, 41, 42, 43, 44, 45, 46, 47, 48, 49, 50, 51, 52, 53, 54, 55, 56, 57, 58, 59, 60, or 61 genes from Table 1.

[0116] In some embodiments, the one or more B. longum transitional clade microorganisms included in the composition is characterized by the presence of all genes from Table 2. In some embodiments, the one or more B. longum transitional clade microorganisms included in the composition is characterized by the presence of one or more genes from Table 2. In some embodiments, the one or more B. longum transitional clade microorganisms included in the composition is characterized by the presence of 1, 2, 3, 4, 5, 6, 7, 8, 9, 10, 11, 12, 13, 14, 15, 16, 17, 18, 19, 20, 21, 22, 23, 24, 25, 26, 27, 28, 29, or 30 genes from Table 2. In some embodiments, the one or more B. longum transitional clade microorganisms included in the composition is characterized by the presence of 1 to 2, 3, 4, 5, 6, 7, 8, 9, 10, 11, 12, 13, 14, 15, 16, 17, 18, 19, 20, 21, 22, 23, 24, 25, 26, 27, 28, 29, or 30 genes from Table 2.

[0117] In some embodiments, the composition includes one or more B. longum transitional clade microorganisms having about 98.6%-100% ANI with at least one genome sequence selected from the group of SEQ ID NOs: 1-4010. In some embodiments, the composition includes one or more B. longum transitional clade microorganisms having about 98.6%, 98.7%, 98.8%, 98.9%, 99%, 99.1%, 99.2%, 99.3%, 99.4%, 99.5%, 99.6%, 99.7%, 99.8%, 99.9%, or 100% ANI with at least one genome sequence selected from the group of SEQ ID NOs: 1-4010. In some embodiments, the composition includes one or more B. longum transitional clade microorganisms having at least 98.6%, has at least 98.7%, has at least 98.8%, has at least 98.9%, has at least 99%, has at least 99.1%, has at least 99.2%, has at least 99.3%, has at least 99.4%, has at least 99.5%, has at least 99.6%, has at least 99.7%, has at least 99.8%, has at least 99.9%, ANI with at least one genome sequence selected from the group of SEQ ID NOs: 1-4010.

[0118] In some embodiments, the composition includes one or more B. longum transitional microorganisms is not of the subspecies B. longum subspecies longum or B. longum subspecies infantis.

[0119] In some embodiments, the composition includes one or more modified microorganisms having a B. longum transitional clade signature. Exemplary modified microorganisms are described in greater detail elsewhere herein.

[0120] The one or more B. longum transitional clade microorganisms and/or modified microorganisms can each be included in the composition an amount from about 10¹ to 10¹⁸ cfu (colony forming units), such as 10² to 10¹⁵, 10³ to 10¹², 10⁵ to 10¹², 10⁶ to 10¹², 10⁷ to 10¹², or 10⁸ to 10¹⁰ of each strain per g of composition or formulation on a dry weight basis or per mL of composition on a volume basis. In some embodiments, the compositions include about 10¹, 10², 10³, 10⁴, 10⁵, 10⁶, 10⁷, 10⁸, 10⁹, 10¹⁰, 10¹¹, 10¹², 10¹³, 10¹⁴, 10¹⁵, 10¹⁶, 10¹⁷, or about 10¹⁸ cfu of one or more B. longum transitional clade microorganisms and/or modified microorganisms as described in greater detail elsewhere herein per g of composition or formulation on a dry weight basis or per mL of composition on a volume basis. In some embodiments, the composition includes about 10¹, to about 10², 10³, 10⁴, 10⁵, 10⁶, 10⁷, 10⁸, 10⁹, 10¹⁰, 10¹¹, 10¹², 10¹³, 10¹⁴, 10¹⁵, 10¹⁶, 10¹⁷, or about 10¹⁸ cfu of one or more B. longum transitional clade microorganisms and/or modified microorganism as described elsewhere herein per g of composition on a dry weight basis or per mL of composition on a volume basis.

[0121] In some embodiments, one or more of the one or more B. longum transitional clade microorganisms and/or modified microorganisms are viable. In some embodiments, one or more of the one or more B. longum transitional clade microorganisms and/or modified microorganisms are non-replicating or inactivated. In some embodiments, the composition contains both viable B. longum transitional clade microorganisms and/or modified microorganisms and inactivated B. longum transitional clade microorganisms and/or modified microorganisms.

[0122] In some embodiments, the composition includes a milk or milk-derived product. The milk or milk-derived product can be a milk produced from a mammal or a component/product derived therefrom. Mammalian milks include, without limitation, human breast milk, cows' milk, human milk, sheep milk, goat milk, horse milk, camel milk, and combinations thereof. In some embodiments, the milk or milk-derived product is a plant milk or plant milk-derived product. The term “plant milk” is a term of art that includes liquid milk-like substances produced from plants (e.g., soy milk, almond milk, cashew milk, coconut milk, rice milk, and combinations thereof).

[0123] The compositions that can be formulated appropriate for infant and/or young child use. In addition of the one or more B. longum transitional clade microorganisms the compositions can include one or more other components, such as macro and micro-nutrients (e.g., fats, fiber, carbohydrates, vitamins and minerals), inert and/or other functional components such as fillers, emulsifiers, etc. Other beneficial components can be included, such as additional probiotic components. Such compositions can be formulated for use in an infant and/or young child. Such compositions and formulations are further described in greater detail elsewhere herein.

[0124] In some embodiments, the composition including one or more B. longum transitional clade microorganisms and/or modified microorganisms is a synthetic composition. The expression “synthetic composition” means a mixture obtained by chemical and/or biological methods and techniques. In some embodiments, the synthetic composition which can biologically, nutritionally, and/or chemically equivalent or identical to the mixture naturally occurring in mammalian milks or a component thereof (e.g., the fat profile or protein or amino acid profile). The term “equivalent” as used in this context refer to a composition that is not identical but provides the same function and/or provides the same nutritional profile or make up as that occurring in a reference natural mammalian milk. For example, a synthetic composition may have a different amino acid profile than that occurring in natural human milk but still provides the same protein content, fat content and carbohydrate content and provides the same minimum nutritional requirements for an e.g., infant and/or young child that reference natural human milk would. Thus, although they are not identical, they are equivalent nutritionally. This principle can be expanded by one of ordinary skill in the art to other characteristics of a synthetic solution use objective measurement techniques known in the art to determine, against a reference sample, if despite the difference in chemical make-up, they would be considered the same with respect to that characteristic or function.

[0125] In some embodiments, and as is also described elsewhere herein, the composition includes one or more milk-based ingredients. As used herein, expression “milk-based ingredient” or “milk-based ingredients” identifies carbohydrate containing ingredients derived from mammal milk for example cow, goat and/or buffalo or mixtures thereof. Non limiting examples of such ingredients comprise: fresh milk, concentrated milk, powder milk, whole milk, skimmed and/or semi-skimmed milk. As it will be apparent to the skilled person, milk-based ingredients according to the present invention may bring additional nutrients beyond carbohydrates to the complementary nutritional composition, such as for example proteins and fats.

[0126] In some embodiments, the composition is a transitional nutritional composition. Transitional nutritional compositions are described in greater detail elsewhere herein. In some embodiments, the transitional nutritional composition or other synthetic composition described herein provides to the infant and/or young child assuming it at least 10%, for example 20%, or 30%, or 40%, or 50%, or 60% or 70%, or 80%, or 90%, or 100% (i.e., the total) of the total daily caloric intake. Typically, the caloric density as well as the amounts and kinds of proteins, carbohydrates and lipids present in the composition should be carefully adjusted to the needs of the infant and are dependent on the infant and/or young child stage of development and age. Such nutritional calculation and/or balancing will be within the purview of one of ordinary skill in the art in view of the present disclosure.

### Proteins

[0127] In some embodiments the compositions and/or formulations can include one or more proteins and/or protein sources. The protein can be in an amount ranging from 1.6 to 3 g per 100 kcal. In some embodiments, the protein amount can be between 2.4 and 4 g/100 kcal or more than 3.6 g/100 kcal. Such formulations can be advantageous particularly when the infant is a premature infant. In some embodiments, the protein amount can be below 2.0 g per 100 kcal, e.g., between 1.8 to 2 g/100 kcal, or in an amount below 1.8 g per 100 kcal.

[0128] The type of protein is not believed to be critical to the present invention provided that the minimum requirements for essential amino acid content are met and satisfactory growth is ensured. Thus, protein sources based on whey, casein and mixtures thereof may be used as well as protein sources based on soy. As far as whey proteins are concerned, the protein source may be based on acid whey or sweet whey or mixtures thereof and may include alpha-lactalbumin and beta-lactoglobulin in any desired proportions.

[0129] In some advantageous embodiments the protein source is whey predominant (i.e., more than 50% of proteins are coming from whey proteins, such as 60% or 70%).

[0130] The proteins may be intact or hydrolyzed or a mixture of intact and hydrolyzed proteins. By the term “intact” is meant that the main part of the proteins is intact, i.e., the molecular structure is not altered, for example at least 80% of the proteins are not altered, such as at least 85% of the proteins are not altered, preferably at least 90% of the proteins are not altered, even more preferably at least 95% of the proteins are not altered, such as at least 98% of the proteins are not altered. In a particular embodiment, 100% of the proteins are not altered.

[0131] The term “hydrolyzed” means in the context of the present invention a protein which has been hydrolyzed or broken down into its component amino acids.

[0132] The proteins can be either fully or partially hydrolyzed. It may be desirable to supply partially hydrolyzed proteins (degree of hydrolysis between 2 and 20%), for example for infants and/or young children believed to be at risk of developing cow's milk allergy. If hydrolyzed proteins are required, the hydrolysis process may be carried out as desired and as is known in the art. For example, whey protein hydrolysates may be prepared by enzymatically hydrolyzing the whey fraction in one or more steps. If the whey fraction used as the starting material is substantially lactose free, it is found that the protein suffers much less lysine blockage during the hydrolysis process. This enables the extent of lysine blockage to be reduced from about 15% by weight of total lysine to less than about 10% by weight of lysine; for example, about 7% by weight of lysine which greatly improves the nutritional quality of the protein source.

[0133] In some embodiments, at least 70% of the proteins are hydrolyzed, preferably at least 80% of the proteins are hydrolyzed, such as at least 85% of the proteins are hydrolyzed, even more preferably at least 90% of the proteins are hydrolyzed, such as at least 95% of the proteins are hydrolyzed, particularly at least 98% of the proteins are hydrolyzed. In a particular embodiment, 100% of the proteins are hydrolyzed.

[0134] In one particular embodiment the proteins of the nutritional composition are hydrolyzed, fully hydrolyzed or partially hydrolyzed. The degree of hydrolysis (DH) of the protein can be between 8 and 40, or between 20 and 60 or between 20 and 80 or more than 10, 20, 40, 60, 80 or 90.

[0135] In a particular embodiment the nutritional composition according to the invention is a hypoallergenic composition. In another particular embodiment the composition according to the invention is a hypoallergenic nutritional composition.

### Fats and Lipids

[0136] In some embodiments the compositions and/or formulations can include one or more lipids and/or fats and/or lipid and/or fat sources. The expression “fat” or “fat source” or “lipid” or “lipid source” or “fats” in the context of the present invention indicates an edible solid or liquid fat or mixtures thereof. Not limiting categories of fats are those from animal, fish or vegetable origins. Non-limiting examples of fats which can be included in various embodiments of the compositions and formulations herein include fish oil, cocoa butter, cocoa butter equivalents (CBE), cocoa butter substitutes (CBS), vegetable oils (for example rapeseed oil, palm oil, corn oil, soy oil, coconut oil and/or sunflower oil) and butter oils amongst others.

[0137] Inclusion of a fat/lipid or source thereof in a composition or formulation described herein is particularly relevant if the composition and/or formulation is an infant formula and/or intended for infant use. In this case, the lipid/fat source may be any lipid or fat which is suitable for use in infant formulae. Some suitable fat sources include palm oil, high oleic sunflower oil and high oleic safflower oil. The essential fatty acids linoleic and α-linolenic acid may also be added, as well small amounts of oils containing high quantities of preformed arachidonic acid and docosahexaenoic acid such as fish oils or microbial oils. The fat source may have a ratio of n-6 to n-3 fatty acids of about 5:1 to about 15:1; for example, about 8:1 to about 10:1.

[0138] In some embodiments, the fat/lipid includes one or more fatty acids. In some embodiments the one or more fatty acid(s) is Docosahexaenoic acid (DHA). In some embodiments, the amount included is at least the minimum recommended amount based on daily dosage or an amount calculated to deliver at least the minimum recommended daily dosage when administered as intended.

### Carbohydrates

[0139] In some embodiments the compositions and/or formulations can include one or more carbohydrates and/or carbohydrate sources. This is particularly preferable in the case where the composition and/or formulation is an infant formula. In some embodiments, the synthetic formulation can include any carbohydrate source conventionally found in infant formulae such as lactose, sucrose, saccharose, maltodextrin, starch and mixtures thereof may be used although one of the preferred sources of carbohydrates is lactose. Carbohydrates include, sugars (simplest carbohydrates), oligosaccharides, and polysaccharides (e.g., starch and dextrin).

### Sugars/Oligosaccharides

[0140] In some embodiments the compositions and/or formulations can include one or more sugars and/or oligosaccharides and/or sugar and/or oligosaccharide sources.

### Sugars

[0141] In some embodiments, compositions and/or formulations herein include one or more sugars and/or sugar sources. As used herein the term “sugar” refers to mon- and disaccharides. Sugars can be natural or synthetic. Sugars that can be included in various embodiments of the compositions and/or formulations herein include, but are not limited to, sucrose, glucose, fructose, maltose, arabinose, fucose, galactose, mannose, ribose, dextrose, trehalose, and xylose. Sugar can come from a variety of sources (i.e., a sugar source) including, but not limited to, agave syrup, bee honey, beets, tree sap (e.g., maple or other trees (e.g., birch, palm, trees, carob pods, etc.), cane, coconut, corn, date, various fruits (e.g., grapes, apple, orange, etc.), sorghum, more complex carbohydrates (e.g., oligosaccharides and polysaccharides) etc. As used herein, the term “fruit” or “fruits” indicates ingredients derived from fruit such as for example fresh fruit, fruit paste, dried fruit, fruit extracts and/or centrifugates. Mixtures of such ingredients are also comprised within the scope of the terms above mentioned. Non-limiting examples of fruit that can be included in some embodiments of the compositions and formulations described herein are: grape, apple, apricot, banana, cherry, pear, strawberry, mango, orange, and peach.

[0142] The quantification of mono- and disaccharides in a composition described herein can be completed by weighing a 1-3±0.001 gram sample into a 100 mL volumetric flask and 60 milliliters of demineralized water were added. Mono- and disaccharides contained in the samples are extracted by placing the flasks into a 70° C. water bath for 20 min with constant agitation. Samples are cooled to room temperature and more demineralized water is added to make up the mark on each volumetric flask, stoppers placed, and closed flasks were shaken vigorously. Samples are then filtered through folded filter paper (No 597, 150 mm ø) and through a 0.2 m HPLC-filter before injection (25 mm ø, 8825-P-2 Infochroma AG). A solution containing monomeric glucose, dimeric lactose, sucrose, maltose, isomaltose, and maltooligosaccharides having a degree of polymerization ranging from 3-7 is prepared as standard for peak identification and saccharide quantification.

### Sugar Alcohols

[0143] In some embodiments, the composition and/or formulation includes one or more sugar alcohols. As used herein, “sugar alcohol” refers to organic compounds, having the general formula of HOCH₂(CHOH)ₙCH₂OH. Generally, sugar alcohols are not cyclic but can be. Sugar alcohols can be derived from sugars, but not necessarily. The sugar alcohol(s) can be natural or synthetic. Sugar alcohols include, without limitation, inositol, xylitol, allulose, erythritol, sorbitol, mannitol, maltitol, lactitol, isomalt, glycerol, and various hydrogenated starch hydrolysates.

### Oligosaccharides

[0144] In some embodiments, the compositions and/or formulations described herein include one or more oligosaccharides. The term of art “oligosaccharide” refers to a carbohydrate that has greater than 2 but relatively few monosaccharide units (typically 3, 4, 5, or 6). Exemplary oligosaccharides include, but are not limited to, fructo-oligosaccharides, galacto-oligosaccharides (raffinose, stachyose, verbascose), maltotriose, gentio-oligosaccharides, gluco-oligosaccharides, milk oligosaccharides (e.g., those present in secretions from mammary glands), isomalto-oligosaccharides, lactosucrose, mannan-oligosaccharides, melibiose-derived oligosaccharides, pectic oligosaccharides, xylo-oligosaccharides.

[0145] In some embodiments, the oligosaccharide(s) is or includes a human milk oligosaccharide (HMO). In some embodiments, the oligosaccharide(s) is or includes a bovine milk oligosaccharide (BMO). In some embodiments, the oligosaccharide(s) is or includes one or more oligosaccharides from sheep, goat, or other animal source. It will be appreciated that oligosaccharides can be included as sweeteners, energy source, and/or as fibers (digestible or indigestible). The term “HMO” or “HMOs” refers to human milk oligosaccharide(s). These carbohydrates are highly resistant to enzymatic hydrolysis, indicating that they may display essential functions not directly related to their caloric value. It has especially been illustrated that they play a vital role in the early development of infants and young children, such as the maturation of the immune system. Many different kinds of HMOs are found in the human milk. Each individual oligosaccharide is based on a combination of glucose, galactose, sialic acid (N-acetylneuraminic acid), fucose and/or N-acetylglucosamine with many and varied linkages between them, thus accounting for the enormous number of different oligosaccharides in human milk-over 130 such structures have been identified so far. Almost all of them have a lactose moiety at their reducing end while sialic acid and/or fucose (when present) occupy terminal positions at the non-reducing ends. The HMOs can be acidic (e.g., charged sialic acid containing oligosaccharide) or neutral (e.g., fucosylated oligosaccharide). In some embodiments, the HMOs are included in the composition in amounts as set forth in International Application Publication No. WO2012156273. In some embodiments, the HMOs can be present at an adaptive level of HMOs so as to form an age tailored formulation, such as those set forth in e.g., U.S. Pat. No. 10,820,616.

[0146] In some embodiments, the compositions described herein include HMOs in a total amount of from 1000 to 10000 mg/L, preferably from 1500 to 8000 mg/L, more preferably from 2000 to 5000 mg/L, even more preferably from 3000 to 4000 mg/L, even more preferably from 3590 to 3673 mg/L, and most preferably in an amount of 3632 mg/L of composition. In some embodiments, the compositions described herein include HMOs in an amount of from 1500 to 3500 mg/L, preferably from 2000 to 3000 mg/L, more preferably from 2558 to 2602 mg/L, and most preferably in an amount of 2580 mg/L of composition. In some embodiments, the compositions described herein include HMOs in an amount of from 500 to 2500 mg/L, preferably from 1500 to 2000 mg/L, more preferably from 1863 to 1902 mg/L, and most preferably in an amount of 1883 mg/L of composition.

### Fucosylated Oligosaccharides

[0147] In some embodiments the oligosaccharide(s) is or includes one or more fucosylated oligosaccharides. A “fucosylated oligosaccharide” is an oligosaccharide having a fucose residue. It has a neutral nature. Some examples are 2-FL (2′-fucosyllactose), 3-FL (3-fucosyllactose), difucosyllactose, lacto-N-fucopentaose (e.g., lacto-N-fucopentaose I, lacto-N-fucopentaose II, lacto-N-fucopentaose III, lacto-N-fucopentaose V), lacto-N-fucohexaose, lacto-N-difucohexaose I, fucosyllacto-N-hexaose, fucosyllacto-N-neohexaose, difucosyllacto-N-hexaose I, difucosyllacto-N-neohexaose II and any combination thereof.

[0148] The expressions “fucosylated oligosaccharides comprising a 2′-fucosyl-epitope” and “2-fucosylated oligosaccharides” encompass fucosylated oligosaccharides with a certain homology of form since they contain a 2′-fucosyl-epitope, therefore a certain homology of function can be expected.

[0149] In some particular embodiments the fucosylated oligosaccharide comprises a 2′-fucosyl-epitope. It can be for example selected from the list comprising 2′-fucosyllactose, difucosyllactose, lacto-N-fucopentaose, lacto-N-fucohexaose, lacto-N-difucohexaose, fucosyllacto-N-hexaose, fucosyllacto-N-neohexaose, difucosyllacto-N-hexaose difuco-lacto-N-neohexaose, difucosyllacto-N-neohexaose, fucosyl-para-Lacto-N-hexaose and any combination thereof.

[0150] In some embodiments, the synthetic formulation includes a 2′-fucosyllactose (or 2FL, or 2′FL, or 2-FL or 2′-FL). In a particular embodiment, there is no other type of fucosylated oligosaccharide than 2′-fucosyllactose, i.e., the nutritional composition of the invention comprises only 2′-fucosyllactose as fucosylated oligosaccharide.

[0151] The fucosylated oligosaccharide(s) may be isolated by chromatography or filtration technology from a natural source such as animal milks. Alternatively, it may be produced by biotechnological means using specific fucosyltransferases and/or fucosidases either through the use of enzyme-based fermentation technology (recombinant or natural enzymes) or microbial fermentation technology. In the latter case, microbes may either express their natural enzymes and substrates or may be engineered to produce respective substrates and enzymes. Single microbial cultures and/or mixed cultures may be used. Fucosylated oligosaccharide formation can be initiated by acceptor substrates starting from any degree of polymerization (DP), from DP=1 onwards. Alternatively, fucosylated oligosaccharides may be produced by chemical synthesis from lactose and free fucose. Fucosylated oligosaccharides are also available for example from Kyowa, Hakko, Kogyo of Japan.

[0152] The fucosylated oligosaccharide(s) can be present in the nutritional composition according to the present invention in a total amount of 0.2-3 g/L, for example 0.5-2 g/L or 0.75-1.65 g/L of the composition. In some embodiments, the fucosylated oligosaccharide(s) may be in a total amount of 0.8-1.5 g/L of the composition, such as 0.85-1.3 g/L or 0.9-1.25 g/L or 0.9-1.1 g/L or 1-1.25 g/L or 1.05-1.25 g/L of the composition. In a particular embodiment, the fucosylated oligosaccharide(s) is/are in a total amount of 1 g/L of the composition. In another particular embodiment, the fucosylated oligosaccharide(s) is/are in a total amount of 1.24 g/L of the composition. The fucosylated oligosaccharide(s) can be present in the nutritional composition in a total amount of 0.13-2.1 g/100 g, for example 0.34-1.4 g/100 g or 0.52-1.15 g/100 g of composition on a dry weight basis. The fucosylated oligosaccharide(s) may be in a total amount of 0.55-1.05 g/100 g of the composition, such as 0.59-0.9 g/100 g, or 0.62-0.87 g/100 g or 0.62-0.77 g/100 g or 0.69-0.87 g/100 g or 0.73-0.87 g/100 g of the composition. In a particular embodiment, the fucosylated oligosaccharide(s) is/are in a total amount of 0.69 g/100 g of the composition. In another particular embodiment, the fucosylated oligosaccharide(s) is/are in a total amount of 0.86 g/100 g of the composition.

### N-Acetylated Oligosaccharide(s)

[0153] In some embodiments the oligosaccharide(s) is or includes one or more N-acetylated oligosaccharides. The expression “N-acetylated oligosaccharide(s)” encompasses both “N-acetyl-lactosamine” and “oligosaccharide(s) containing N-acetyl-lactosamine”. They are neutral oligosaccharides having an N-acetyl-lactosamine residue. Suitable examples are LNT (lacto-N-tetraose), para-lacto-N-neohexaose (para-LNnH), LNnT (lacto-N-neotetraose) or any combination thereof. Other examples are lacto-N-hexaose, lacto-N-neohexaose, para-lacto-N-hexaose, para-lacto-N-neohexaose, lacto-N-octaose, lacto-N-neooctaose, iso-lacto-N-octaose, para-lacto-N-octaose and lacto-N-decaose.

[0154] In some specific embodiments, the synthetic formulation can include at least one the N-acetylated oligosaccharide. There can be one or several types of N-acetylated oligosaccharide. The N-acetylated oligosaccharide(s) can be for example lacto-N-tetraose (LNT), lacto-N-neotetraose (LNnT) or any combination thereof. In some particular embodiments the N-acetylated oligosaccharide is lacto-N-neotetraose (LNnT), para-lacto-N-neohexaose (para-LNnH) or any combination thereof. In some particular embodiments the N-acetylated oligosaccharide is LNnT. In some particular embodiments the N-acetylated oligosaccharide is LNT. In some other particular embodiments, the N-acetylated oligosaccharide is a mixture of LNT and LNnT. In some particular embodiments the composition comprises both LNT and LNnT in a ratio LNT:LNnT between 5:1 and 1:2, or from 2:1 to 1:1, or from 2:1.2 to 2:1.6. The N-acetylated oligosaccharide(s) may be synthesised chemically by enzymatic transfer of saccharide units from donor moieties to acceptor moieties using glycosyltransferases as described for example in U.S. Pat. No. 5,288,637 and WO 96/10086. Alternatively, LNT and LNnT may be prepared by chemical conversion of Keto-hexoses (e.g., fructose) either free or bound to an oligosaccharide (e.g., lactulose) into N-acetylhexosamine or an N-acetylhexosamine-containing oligosaccharide as described in Wrodnigg, T. M.; Stutz, A. E. (1999) Angew. Chem. Int. Ed. 38:827-828. N-acetyl-lactosamine produced in this way may then be transferred to lactose as the acceptor moiety.

[0155] The N-acetylated oligosaccharide(s) can be present in the nutritional composition according to the present invention in a total amount of 0.1-2 g/L, for example 0.3-1 g/L or 0.45-0.85 g/L of the composition.

[0156] In some embodiments, the N-acetylated oligosaccharide(s) may be in a total amount of 0.5-0.8 g/L of the composition, such as 0.5-0.75 g/L or 0.5-0.7 g/L of the composition. In a particular embodiment, the N-acetylated oligosaccharide(s) is/are in a total amount of 0.5 g/L of the composition. In another particular embodiment, the N-acetylated oligosaccharide(s) is/are in a total amount of 0.63 g/L of the composition.

[0157] The N-acetylated oligosaccharide(s) can be present in the nutritional composition in a total amount of 0.06-1.4 g/100 g, for example 0.2-0.7 g/100 g or 0.31-0.59 g/100 g of composition on a dry weight basis, The N-acetylated oligosaccharide(s) may be in a total amount of 0.35-0.56 g/100 g of composition, such as 0.35-0.52 g/100 g or 0.35-0.49 g/100 g. In a particular embodiment, the N-acetylated oligosaccharide(s) is/are in a total amount of 0.35 g/100 g of the composition. In another particular embodiment, the N-acetylated oligosaccharide(s) is/are in a total amount of 0.44 g/100 g of the composition.

[0158] In some other particular embodiments, the synthetic formulation does not comprise any N-acetylated oligosaccharides

[0159] In some embodiments, the synthetic formulation comprises both 2′-fucosyllactose (2-FL) and lacto-N-neotetraose (LNnT). In another specific embodiment, the nutritional composition of the present invention comprises an oligosaccharide mixture that consists of 2′-fucosyllactose (2-FL) and lacto-N-neotetraose (LNnT). In other words, the nutritional composition of the invention comprises only 2′-fucosyllactose (2-FL) as fucosylated oligosaccharide and only lacto-N-neotetraose (LNnT) as N-acetylated oligosaccharide.

[0160] The synthetic formulation can include fucosylated oligosaccharide(s) and N-acetylated oligosaccharide(s) in a ratio fucosylated oligosaccharide(s):the N-acetylated oligosaccharide(s) of from 2:0.065 to 2:20 such as from 2:0.3 to 2:4, for example 2:0.54 to 2:2.26, or 2:0.76-2:1.8 or 2:0.8-2:1.4. In a particularly advantageous embodiment, this ratio is 2:1 or around 2:1.

### Sialylated Oligosaccharides

[0161] In some embodiments the oligosaccharide(s) is or includes one or more sialylated oligosaccharides. A “sialylated oligosaccharide” is a charged sialic acid containing oligosaccharide, i.e., an oligosaccharide having a sialic acid residue. It has an acidic nature. Some examples are 3-SL (3′ sialyllactose) and 6-SL (6′ sialyllactose). The sialylated oligosaccharide(s) can be selected from the group comprising 3′ sialyllactose (3-SL), 6′ sialyllactose (6-SL), and any combination thereof. In some embodiments of the invention the composition comprises 3-SL and 6-SL. In some particular embodiments the ratio between 3′-sialyllactose (3-SL) and 6′-sialyllactose (6-SL) can be in the range between 5:1 and 1:10, or from 3:1 and 1:1, or from 1:1 to 1:10. In some specific embodiments the sialylated oligosaccharide of the composition is 6′ sialyllactose (6-SL).

[0162] The sialylated oligosaccharide(s) may be isolated by chromatographic or filtration technology from a natural source such as animal milks. Alternatively, they may be produced by biotechnological means using specific sialyltransferases or sialidases, neuraminidases, either by an enzyme-based fermentation technology (recombinant or natural enzymes), by chemical synthesis or by a microbial fermentation technology. In the latter case microbes may either express their natural enzymes and substrates or may be engineered to produce respective substrates and enzymes. Single microbial cultures or mixed cultures may be used. Sialyl-oligosaccharide formation can be initiated by acceptor substrates starting from any degree of polymerisation (DP), from DP=1 onwards. Alternatively, sialyllactoses may be produced by chemical synthesis from lactose and free N′-acetylneuraminic acid (sialic acid). Sialyllactoses are also commercially available for example from Kyowa Hakko Kogyo of Japan.

[0163] In particular examples, the synthetic formulation includes from 0.05 to 5 g/L of sialylated oligosaccharide(s), or from 0.1 to 4 g/L, or from 0.3 to 2 g/L, or from 0.4 to 1.5 g/L, or from 0.4 to 1 g/L, for example 0.5 or 0.9 g/L of sialylated oligosaccharide(s). In some particular embodiments, the synthetic formulation includes from 0.8 to 1.7 g/l of sialylated oligosaccharide(s).

[0164] The synthetic formulation includes can contain from 0.03 to 3.5 g of sialylated oligosaccharide(s) per 100 g of composition on a dry weight basis, e.g., from 0.1 to 2 g or from 0.2 to 1 g or from 0.3 to 0.6 g of sialylated oligosaccharide(s) per 100 g of composition on a dry weight basis.

[0165] The synthetic formulation can include sialylated oligosaccharide(s) in an amount of below 0.1 g/100 g of composition on a dry weight basis.

[0166] In some particular embodiments, the synthetic formulation does not contain any sialylated oligosaccharide(s).

[0167] In some other particular embodiments of the present invention, the nutritional composition does not contain any galacto-oligosaccharides (GOS).

### Oligosaccharide Precursors

[0168] In some embodiments, the synthetic formulation optionally also includes at least one precursor of oligosaccharide. There can be one or several precursor(s) of oligosaccharide. For example, the precursor of human milk oligosaccharide is sialic acid, fucose or a mixture thereof. In some particular embodiments the composition comprises sialic acid.

[0169] In particular examples the composition comprises from 0 to 3 g/L of precursor(s) of oligosaccharide, or from 0 to 2 g/L, or from 0 to 1 g/L, or from 0 to 0.7 g/L, or from 0 to 0.5 g/L or from 0 to 0.3 g/L, or from 0 to 0.2 g/L of precursor(s) of oligosaccharide.

[0170] The composition according to the invention can contain from 0 to 2.1 g of precursor(s) of oligosaccharide per 100 g of composition on a dry weight basis, e.g., from 0 to 1.5 g or from 0 to 0.8 g or from 0 to 0.15 g of precursor(s) of oligosaccharide per 100 g of composition on a dry weight basis.

### Fiber

[0171] In some embodiments, the compositions and/or formulations described herein can include a fiber and/or fiber source(s). It will be appreciated that some fibers are carbohydrates that are relatively indigestible by a human or animal. Such fibers are also discussed in relation to carbohydrates herein. In some embodiments, the fiber can be digested by one or microorganisms present in the composition and/or formulation and/or within one or more regions in the gastrointestinal tract within an organism, such as a human or non-human animal. As used herein, the expressions “fiber” or “fibers” or “dietary fiber” or “dietary fibers” within the context of the present invention indicate the indigestible portion, in small intestine, of food derived from plants which comprises two main components: soluble fiber, which dissolves in water and insoluble fiber. Mixtures of fibers are comprised within the scope of the terms above mentioned. Soluble fiber is readily fermented in the colon into gases and physiologically active byproducts and can be prebiotic and viscous. Insoluble fiber does not dissolve in water, is metabolically inert and provides bulking, or it can be prebiotic and metabolically ferment in the large intestine. Chemically, dietary fiber consists of non-starch polysaccharides such as arabinoxylans, cellulose, and many other plant components such as resistant starch, resistant dextrins, inulin, lignin, chitins, pectins, beta-glucans, and oligosaccharides. Non-limiting examples of dietary fibers are: prebiotic fibers such as Fructo-oligosaccharides (FOS), inulin, galacto-oligosaccharides (GOS), fruit fiber, vegetable fiber, cereal fiber, resistant starch such as high amylose corn starch. As fibers are not digestible, they do not contain available carbohydrates and on this basis, they do not contribute to the GI or GL of the composition they're part of.

[0172] As used herein, “added fiber” or “added dietary fiber” indicates an ingredient mainly or totally constituted by fiber which is added to the complementary nutritional composition and whose content in fiber contributes to the total fiber content of the composition. The total fiber content of the complementary nutritional composition is provided by the sum of amount of fiber naturally present in ingredients used in the recipe (for example from whole grain cereal flour) plus amount of added fiber.

### Prebiotics

[0173] In some embodiments, the composition can include one or more prebiotics. As used herein, “prebiotic” means non-digestible carbohydrates and/or fibers that beneficially affect the host by stimulating the growth and/or the activity of healthy bacteria such as bifidobacteria in one or more regions of the gastrointestinal tract of a subject to which the composition is administered to and/or feeding/stimulating the growth of a microorganism that is contained in the composition that contains the prebiotic, and/or facilitate the production of one or more beneficial metabolites and/or products from the microorganism(s) contained in the composition (see e.g., Gibson G R, Roberfroid M B. Dietary modulation of the human colonic microbiota: introducing the concept of prebiotics. J Nutr. 1995; 125:1401-12; Fan et al., Eur Rev Med Pharmacol Sci.2016. July; 20(15):3262-5; Gupta and Gang. Indian J Med Microbiol. 2009 July-September; 27(3):202-9. doi: 10.4103/0255-0857.53201; Bertelsen et al., Best Pract Res Clin Gastroenterol. 2016 February; 30(1):39-48. doi: 10.1016/j.bpg.2016.01.001. Epub 2016 Jan. 22; Lordan et al., Gut Microbes. 2020; 11(1):1-20. doi: 10.1080/19490976.2019.1613124. Epub 2019 May 22; Salminen et al., Nutrients. 2020 Jun. 30; 12(7):1952. doi: 10.3390/nu12071952; Vandenplas et al., Br J Nutr. 2015 May 14; 113(9):1339-44. doi: 10.1017/S0007114515000823). The prebiotic may be selected from the group consisting of oligosaccharides, optionally containing fructose, galactose, mannose; dietary fibers, in particular soluble fibers, soy fibers; inulin; or mixtures thereof. Preferred prebiotics are fructo-oligosaccharides (FOS), galacto-oligosaccharides (GOS), isomalto-oligosaccharides, xylo-oligosaccharides, oligosaccharides of soy, glycosylsucrose (GS), lactosucrose (LS), lactulose (LA), palatinose-oligosaccharides (PAO), malto-oligosaccharides, pectins and/or hydrolysates thereof

### Vitamins and Minerals

[0174] The synthetic formulation may also contain all vitamins and minerals understood to be essential in the daily diet and in nutritionally significant amounts. Minimum requirements have been established for certain vitamins and minerals. Examples of minerals, vitamins and other nutrients optionally present in the composition of the invention include vitamin A, vitamin B1, vitamin B2, vitamin B6, vitamin B12, vitamin E, vitamin K, vitamin C, vitamin D, folic acid, inositol, niacin, biotin, pantothenic acid, choline, calcium, phosphorous, iodine, iron, magnesium, copper, zinc, manganese, chlorine, potassium, sodium, selenium, chromium, molybdenum, taurine, and L-carnitine. Minerals are usually added in salt form. The presence and amounts of specific minerals and other vitamins will vary depending on the intended population. One of ordinary skill in the art will, in view of an intended population and the description herein, understand the amount of any given vitamin or mineral appropriate to include.

### Other Components

[0175] In some embodiments, the synthetic formulation includes one more suitable emulsifiers and stabilizers such as soy, lecithin, citric acid esters of mono- and diglycerides, and the like. Other suitable stabilizers and emulsifiers will be known to one of ordinary skill in the art.

[0176] In some embodiments, the synthetic formulation comprises one or more antioxidants. In some embodiments, the antioxidants are or includes a carotenoid.

[0177] In some embodiments, one or more other probiotics in addition to the B. longum microorganisms and compositions thereof of the present invention described elsewhere herein, the compositions can include one or more additional probiotics. The nutritional composition may contain probiotics. The term of art “probiotic” means microbial cell preparations or components of microbial cells with a beneficial effect on the health or well-being of the host. (Salminen S, Ouwehand A. Benno Y. et al. “Probiotics: how should they be defined” Trends Food Sci. Technol. 1999:10 107-10). The microbial cells are generally and can be bacteria or yeasts.

[0178] The probiotic microorganisms most commonly used are principally bacteria and yeasts of the following genera: Lactobacillus spp., Streptococcus spp., Enterococcus spp., Bifidobacterium spp. and Saccharomyces spp. In some particular embodiments, the probiotic is a probiotic bacterial strain. In some specific embodiments, it is particularly Bifidobacteria and/or Lactobacilli.

[0179] Suitable additional probiotic bacterial strains include Lactobacillus rhamnosus ATCC 53103 available from Valio Oy of Finland under the trademark LGG, Lactobacillus rhamnosus CGMCC 1.3724, Lactobacillus paracasei CNCM 1-2116, Lactobacillus johnsonii CNCM 1-1225, Streptococcus salivarius DSM 13084 sold by BLIS Technologies Limited of New Zealand under the designation KI2, Bifidobacterium lactis CNCM 1-3446 sold inter alia by the Christian Hansen company of Denmark under the trademark Bb 12, Bifidobacterium longum ATCC BAA-999 sold by Morinaga Milk Industry Co. Ltd. of Japan under the trademark BB536, Bifidobacterium breve sold by Danisco under the trademark Bb-03, Bifidobacterium breve sold by Morinaga under the trade mark M-16V, Bifidobacterium infantis sold by Procter & Gamble Co. under the trademark Bifantis and Bifidobacterium breve sold by Institut Rosell (Lallemand) under the trademark R0070, Lactobacillus paracasei strain NCC 2461 (see e.g., Demont et al. 2015. J Allergy Clin. Immunol. 137(4): 1264-1267. Bacillus Coagulans Gbi-30 6086, Lactobacillus reuteri Protectis (see e.g., Guiterrez-Castrellon et al. 2014. Pedatrics. March 2014, peds.2013-0652; DOI: https://doi.org/10.1542/peds.2013-0652).

[0180] The optional additional probiotics can be included in an amount from about 10³ to 10¹² cfu of probiotic strain, more preferably between 10⁷ and 10¹² cfu such as between 10⁸ and 10¹⁰ cfu of probiotic strain per g of composition on a dry weight basis. In one embodiment the optional additional probiotics are viable. In another embodiment the additional probiotics are non-replicating or inactivated. There may be both viable probiotics and inactivated additional optional probiotics in some other embodiments.

### Composition Formats

### Infant Formulas and Milk Fortifiers

[0181] The synthetic formulation can be for example an infant formula, a starter infant formula, a follow-on or follow-up formula, a baby food, an infant cereal composition, a fortifier, such as a human milk fortifier, or a supplement, a growing-up milk, or transitional (or complementary) nutritional composition. The expression “infant formula” means a foodstuff intended for particular nutritional use by infants during the first four to six months of life and satisfying by itself the nutritional requirements of this category of person (Article 1.2 of the European Commission Directive 91/321/EEC of May 14, 1991 on infant formulae and follow-on formulae and/or U.S. Food and Drug Administration Regulations as codified in Title 21 of the U.S. Code of Federal Regulations, particularly at 21 C.F.R. § 107.100—Nutrient Requirements for Infant Formulas). As used herein, “fortifier” refers to liquid, semi-solid, or solid nutritional compositions suitable for mixing with breast milk or infant formula. As used herein, “follow-on formula” or “follow-up formula” means a foodstuff intended for particular nutritional use by infants aged over four months and constituting the principal liquid element in the progressively diversified diet of this category of person. As used herein, “starter formula” refers to an infant foodstuff intended for particular nutritional use by infants during the first four months of life

[0182] The term of art, “baby food” means a foodstuff intended for particular nutritional use by infants during the first few years of life, typically about 0.5-5 years of life.

[0183] As used herein, the term “infant cereal product” relates to a cereal product that has been designed specifically for infants in order to provide the required nutritional contribution to the infant. Infant cereal products can be grouped in two main categories: complete cereal product which need to be reconstituted in water as they already contain all the necessary nutrients to be delivered with the meal; and standard cereal product which are meant to be reconstituted with milk, infant formula, follow-on formula and/or GUMs.

[0184] As used herein, the term “Growing up milk (GUM)” refers to a nutritional composition, which can be given to children from the age of 12 months, and in some instances, after stopping the infant formula. The “growing-up milks” (or GUMs) are given typically from one year onwards. GUMs are generally a milk-based beverage adapted for the specific nutritional needs of young children.

[0185] The expression “complementary nutritional composition” or “a nutritional composition for a complementary feeding period”, “transitional nutritional composition” or “a nutritional composition for a transitional feeding period”, as used interchangeably herein, means or refers to a nutritional composition described herein of the present invention, which is designed to be administered to an infant and/or young child before, during, and/or after at the time the transitional feeding period starts. In one embodiment, the transitional nutritional composition is administered during the transitional feeding period. The transitional nutritional composition can be taken/administered enterally, orally, parenterally or intravenously, and it typically includes a lipid or fat source, a protein source and a carbohydrate source. Optionally, the transitional nutritional compositions also comprise vitamins and minerals. Preferably, a transitional nutritional composition is an oral formulation. Non-limiting examples of transitional nutritional compositions are: infant cereal products, follow-on formula, GUMS, or a baby food.

[0186] In some particular embodiments, the composition of the invention is an infant formula, a fortifier, or a supplement that may be intended for the first 1, 2, 3, 4, 5, 6, 7, 8, 9, 10, 11, 12, 13, 14, 15, 16, 17, 18, 19, 20, or 24, or any range therein such as 1-6, 6-12, 12-18, 18-24, 2-6, 4-6, 2-12, 4-12, 12-16, or 16-24 months of age. In a preferred embodiment the synthetic formulation of the invention is an infant formula.

[0187] In some other embodiments, the synthetic formulation is a fortifier. The fortifier can be a breast milk fortifier (e.g., a human milk fortifier) or a formula fortifier such as an infant formula fortifier or a follow-on/follow-up formula fortifier.

[0188] When the synthetic formulation is a supplement, it can be provided in the form of unit doses.

[0189] The synthetic formulation can be in solid (e.g., powder), liquid or gelatinous form.

### Supplements

[0190] In some embodiments the synthetic formulation is in the form of a supplement. The supplement may be in the form of tablets, capsules, pastilles or a liquid for example. The supplement may further contain protective hydrocolloids (such as gums, proteins, modified starches), binders, film forming agents, encapsulating agents/materials, wall/shell materials, matrix compounds, coatings, emulsifiers, surface active agents, solubilizing agents (oils, fats, waxes, lecithins etc.), adsorbents, carriers, fillers, co-compounds, dispersing agents, wetting agents, processing aids (solvents), flowing agents, taste masking agents, weighting agents, jellifying agents and gel forming agents. The supplement may also contain conventional pharmaceutical additives and adjuvants, excipients and diluents, including, but not limited to, water, gelatin of any origin, vegetable gums, lignin-sulfonate, talc, sugars, starch, gum arabic, vegetable oils, polyalkylene glycols, flavoring agents, preservatives, stabilizers, emulsifying agents, buffers, lubricants, colorants, wetting agents, fillers, and the like.

[0191] Further, the supplement may contain an organic or inorganic carrier material suitable for oral or parenteral administration as well as vitamins, minerals trace elements and other micronutrients in accordance with the recommendations of Government bodies such as the USDA and/or FDA.

[0192] The B. longum microorganisms, compositions, and synthetic formulations can, in some embodiments be formulated as a ready to use formulation. As used herein, the phrase “ready to consume” refers to the formulation being directly ready for use, such as consumption or administration, by a subject (e.g., and infant) without any required further modifications to the formulations. It will be appreciated that while modifications, such as dilution, are not required by a ready to use formulation, such suitable modifications can be applied to a ready to use formulation prior to use.

[0193] In some embodiments, the synthetic formulations are ready to use formulations. In some embodiments, the ready to use formulation contains about 0.0001 to about 10 percent by weight or by volume of a B. longum microorganism population or synthetic composition thereof described herein. In some embodiments, the ready to use formulation contains about 0.002, 0.003, 0.004, 0.005, 0.006, 0.007, 0.008, 0.009, 0.01, 0.011, 0.012, 0.013, 0.014, 0.015, 0.016, 0.017, 0.018, 0.019, 0.02, 0.021, 0.022, 0.023, 0.024, 0.025, 0.026, 0.027, 0.028, 0.029, 0.03, 0.031, 0.032, 0.033, 0.034, 0.035, 0.036, 0.037, 0.038, 0.039, 0.04, 0.041, 0.042, 0.043, 0.044, 0.045, 0.046, 0.047, 0.048, 0.049, 0.05, 0.051, 0.052, 0.053, 0.054, 0.055, 0.056, 0.057, 0.058, 0.059, 0.06, 0.061, 0.062, 0.063, 0.064, 0.065, 0.066, 0.067, 0.068, 0.069, 0.07, 0.071, 0.072, 0.073, 0.074, 0.075, 0.076, 0.077, 0.078, 0.079, 0.08, 0.081, 0.082, 0.083, 0.084, 0.085, 0.086, 0.087, 0.088, 0.089, 0.09, 0.091, 0.092, 0.093, 0.094, 0.095, 0.096, 0.097, 0.098, to/or about 0.099 by weight or volume of a B. longum microorganism population or composition thereof described herein. In some embodiments, the ready to use formulation contains about 0.01, 0.02, 0.03, 0.04, 0.05, 0.06, 0.07, 0.08, 0.09, to/or about 0.1 percent by weight or volume of a B. longum microorganism population or composition thereof described herein.

### Exemplary Compositions

[0194] Now provided are some non-limiting exemplary formulations for infant use that can further include one or more B. longum microorganisms and/or genetically modified organisms described herein. One of ordinary skill in the art in view of this disclosure will appreciate expansions of these examples herein that can be applied to other contexts.

[0195] For example, a standard infant cereal (to be prepared with milk) according to the present invention to be to be administered to infants at the age of 4-6 months may have an energy density of 220-240 kJ/15 g, 0.8-1.2 g/15 g of a protein source, 0.1-0.3 g of a fat source and 12.3-12.7 g/15.0 g of a carbohydrate source. Such an infant cereal may contain, for example, Rice flour, Maize Maltodextrin, Vitamin C, and Iron. Another example infant cereal to be prepared with water according to the present invention to be administered to infants from the age of 4-6 months may have an energy density of 400-420 kcal/100 g, 10-16 g of a protein source, 7-17 g of a fat source and 50-75 g of a carbohydrate source. Such an infant cereal may contain, for example, Rice flour, Maize Maltodextrin, Vitamin C, and Iron.

[0196] Another example, infant cereal according to the present invention to be administered to infants at the age of 6-12 months may have an energy density of 510-525 kcal/100 g, 9-15 g of a protein source, 20-30 g of a fat source and 50-75 g of a carbohydrate source. Such an infant cereal may contain, for example, Wheat flour, Semolina from wheat, Iron, Vitamin C, Niacin, Vitamin B6, Thiamin, and Maize Maltodextrin.

[0197] Exemplary infant cereals may be prepared from one or more milled cereals, which may constitute at least 25 weight-% of the final mixture on a dry weight basis.

[0198] The infant cereals of the present invention are preferably prepared from a single grain—like rice cereal or wheat cereal—because single grain compositions are less likely to cause an allergic reaction.

[0199] Typically, infant cereals are to be mixed with water or milk before consumption. For example, 15 g of an infant cereal of the present invention may be to be mixed with 45 mL (complete infant cereal) of water or 90 ml of milk (standard infant cereal) respectively. METHODS OF USE

[0200] The B. longum subspecies microorganisms and modified microorganisms, B. longum subspecies signatures, and compositions thereof can be used for a variety of applications. B. longum subspecies microorganisms and modified microorganisms and compositions thereof can be administered to a subject in need thereof as a preventative or therapeutic. The signatures can be used to analyze a microbiome structure of a microbiome of a subject, which can be useful to provide insight as to the health, physiologic, and/or nutritional state of the subject. The signatures can also be used to identify microbiome structure modulating agents. Agents capable of modifying the microbiome can then be administered to a subject to modify a microbiome as a subject and thus provide a treatment or prevention to the subject.

Transitioning from a Milk-Based Diet to Solid Food

[0201] The compositions and formulations according to the present invention can be for use in infants and/or young children. The infants may be born term or are preterm. The compositions and formulations according to the present invention can used in an infant and/or a young child that was born by C-section or that was vaginally delivered.

[0202] The compositions and formulations according to the present invention can be for use before, during, and/or after the weaning period (e.g., transitional feeding period). The compositions and formulations according to the present invention can be for use before, during, and/or after the transition from a milk-based diet to a solid food diet.

[0203] In some embodiments, a method for, in an infant and/or a young child, promoting/assisting transition from a milk-based diet to solid food and/or promoting gut microbiota adapted to metabolize both milk derived carbohydrates and fibers, or any derivative thereof includes administering a synthetic formulation described in greater detail elsewhere herein to the infant.

[0204] In some embodiments, a method for, in an infant and/or a young child, promoting/assisting transition from a milk based diet to solid food and/or promoting gut microbiota adapted to metabolize both milk derived carbohydrates and fibers or a derivative thereof includes administering, to the infant and/or young child, one or more Bifidobacterium longum (B. longum) transitional clade microorganisms, which have at least 98.6% Average Nucleotide Identify (ANI) with at least one strain selected in the group of CNCM I-5683, CNCM I-5684, CNCM I-5685, CNCM I-5686 and CNCM I-5687. In some embodiments of the method, the one or more B. longum transitional clade microorganisms have about 98.6%-100% Average Nucleotide Identity (ANI) with at least one strain selected from the group of: NCC5000, NCC5001, NCC5002, NCC5003 and NCC5004. In some embodiments of the method, the one or more B. longum transitional clade microorganisms have about 98.6%, 98.7%, 98.8%, 98.9%, 99%, 99.1%, 99.2%, 99.3%, 99.4%, 99.5%, 99.6%, 99.7%, 99.8%, 99.9%, or 100% ANI with at least one strain selected from the group of: CNCM I-5683, CNCM I-5684, CNCM I-5685, CNCM I-5686 and CNCM I-5687. In some embodiments of the method, the one or more B. longum transitional clade microorganisms have at least 98.6%, has at least 98.7%, has at least 98.8%, has at least 98.9%, has at least 99%, has at least 99.1%, has at least 99.2%, has at least 99.3%, has at least 99.4%, has at least 99.5%, has at least 99.6%, has at least 99.7%, has at least 99.8%, has at least 99.9%, ANI with at least one strain selected from the group of: CNCM I-5683, CNCM I-5684, CNCM I-5685, CNCM I-5686 and CNCM I-5687. In some embodiments of the method, the one or more B. longum transitional clade microorganisms have at least 98.6% ANI with at least one strain selected from the group of: CNCM I-5683, CNCM I-5684, CNCM I-5685, CNCM I-5686 and CNCM I-5687.

[0205] In some embodiments of the method, the one or more B. longum transitional clade microorganisms have about 98.6%-100% ANI with at least one genome sequence selected from the group of SEQ ID NOs: 1-4010. In some embodiments of the method, the one or more B. longum transitional clade microorganisms have about 98.6%, 98.7%, 98.8%, 98.9%, 99%, 99.1%, 99.2%, 99.3%, 99.4%, 99.5%, 99.6%, 99.7%, 99.8%, 99.9%, or 100% ANI with at least one genome sequence selected from the group of SEQ ID NOs: 1-4010. In some embodiments of the method, the one or more B. longum transitional clade microorganisms have at least 98.6%, has at least 98.7%, has at least 98.8%, has at least 98.9%, has at least 99%, has at least 99.1%, has at least 99.2%, has at least 99.3%, has at least 99.4%, has at least 99.5%, has at least 99.6%, has at least 99.7%, has at least 99.8%, has at least 99.9%, ANI with at least one genome sequence selected from the group of SEQ ID NOs: 1-4010.

[0206] In some embodiments of the method, the one or more B. longum transitional clade microorganisms are characterized by the presence of all genes from Table 1. In some embodiments, the one or mores B. longum transitional clade microorganism are characterized by the presence of one or more genes from Table 1. In some embodiments of the method, the one or more B. longum transitional clade microorganisms are characterized by the presence of 1, 2, 3, 4, 5, 6, 7, 8, 9, 10, 11, 12, 13, 14, 15, 16, 17, 18, 19, 20, 21, 22, 23, 24, 25, 26, 27, 28, 29, 30, 31, 32, 33, 34, 35, 36, 37, 38, 39, 40, 41, 42, 43, 44, 45, 46, 47, 48, 49, 50, 51, 52, 53, 54, 55, 56, 57, 58, 59, 60, or 61 genes from Table 1. In some embodiments of the method, the one or more B. longum transitional clade microorganisms are characterized by the presence of 1 to 2, 3, 4, 5, 6, 7, 8, 9, 10, 11, 12, 13, 14, 15, 16, 17, 18, 19, 20, 21, 22, 23, 24, 25, 26, 27, 28, 29, 30, 31, 32, 33, 34, 35, 36, 37, 38, 39, 40, 41, 42, 43, 44, 45, 46, 47, 48, 49, 50, 51, 52, 53, 54, 55, 56, 57, 58, 59, 60, or 61 genes from Table 1.

[0207] In some embodiments of the method, the one or more B. longum transitional clade microorganisms are characterized by the presence of all genes from Table 2. In some embodiments of the method, the one or more B. longum transitional clade microorganisms are characterized by the presence of one or more genes from Table 2. In some embodiments of the method, the one or more B. longum transitional clade microorganisms are characterized by the presence of 1, 2, 3, 4, 5, 6, 7, 8, 9, 10, 11, 12, 13, 14, 15, 16, 17, 18, 19, 20, 21, 22, 23, 24, 25, 26, 27, 28, 29, or 30 genes from Table 2. In some embodiments of the method, the one or more B. longum transitional clade microorganisms are characterized by the presence of 1 to 2, 3, 4, 5, 6, 7, 8, 9, 10, 11, 12, 13, 14, 15, 16, 17, 18, 19, 20, 21, 22, 23, 24, 25, 26, 27, 28, 29, or 30 genes from Table 2.

[0208] In some embodiments of the method, the one or more B. longum microorganisms is not of the subspecies B. longum subspecies longum or B. longum subspecies infantis.

[0209] In some embodiments of the method, the one or more B. longum microorganisms are isolated from a human.

[0210] In some embodiments, a method for, in an infant or a young child, promoting/assisting transition from a milk-based diet to solid food and/or promoting gut microbiota adapted to metabolize both milk derived carbohydrates and fibers, or a derivative thereof includes administering, to the infant, one or more genetically modified microorganisms as described in greater detail elsewhere herein. In some embodiments of the method, the genetically modified microorganism is not of a B. longum transitional clade and is modified to have a B. longum transitional clade signature. In some embodiments of the method, the genetically modified microorganism is not of a B. longum transitional clade and is modified to have modified expression of one or more genes from Tables 1 and/or 2. In some embodiments of the method, the genetically modified microorganism is not of a B. longum transitional clade and is modified to have modified expression of all genes from Tables 1 and/or 2.

[0211] The compositions and formulations according to the present invention can be used for treatment and/or prevention purposes.

[0212] In some embodiments, the compositions and formulations according to the present invention are administered immediately after birth of an infant. The composition of the invention can also be given during the first week of life of the infant, or during the first 2 weeks of life, or during the first 3 weeks of life, or during the first month of life, or during the first 2 months of life, or during the first 3 months of life, or during the first 4 months of life, or during the first 6 months of life, or during the first 8 months of life, or during the first 10 months of life, or during the first year of life, or during the first two years of life or even more. In some particularly advantageous embodiments of the invention, the nutritional composition is given (or administered) to an infant within the first 4 or 6 months of birth of said infant.

[0213] In some other embodiments, the compositions and formulations according to the present inventions is given few days (e.g., 1, 2, 3, 5, 10, 15, 20, or more), or few weeks (e.g., 1, 2, 3, 4, 5, 6, 7, 8, 9, 10, or more), or few months (e.g., 1, 2, 3, 4, 5, 6, 7, 8, 9, 10, 11, 12, 13, 14, 15, 16, 17, 18, 19, 20, 21, 22, 23, 24, or more) after birth.

[0214] In one embodiment, the compositions and formulas of the invention is given to the infant and/or young child as a supplementary composition to the mother's milk. As used herein, “mother's milk” should be understood as the breast milk or colostrum of the mother. In some embodiments the infant or young child receives the mother's milk during at least the first 2 weeks, first 1, 2, 4, or 6 months. In one embodiment the nutritional composition of the invention is given to the infant or young child after such period of mother's nutrition is given together with such period of mother's milk nutrition. In some embodiments, the composition is given to the infant or young child as the sole or primary nutritional composition during at least one period of time, e.g., after the 1st, 2nd or 4^{th} month of life, during at least 1, 2, 4, 5, 6, 7, 8, 9, 10, 11, 12, 13, 14, 15, 16, 17, 18, 19, 20, 21, 22, 23, or at least 24 months after birth. In some embodiments, the composition is given to the infant or young child as the supplementary or secondary nutritional composition (e.g., secondary to a mother's milk or solid food) during at least one period of time, e.g., after the 1st, 2nd or 4^{th} month of life, during at least 1, 2, 4, 5, 6, 7, 8, 9, 10, 11, 12, 13, 14, 15, 16, 17, 18, 19, 20, 21, 22, 23, or at least 24 months after birth.

[0215] In some embodiments, the compositions and formulations described herein is formulated as a complete nutritional composition (fulfilling all or most of the nutritional needs of the subject). In another embodiment the nutrition composition is a supplement, or a fortifier intended for example to supplement human milk or to supplement an infant formula or a follow-on formula.

[0216] In some embodiments, the transitional composition for use according to the invention is administered to an infant and/or young child of an age of between about 4 to about 12, 24, 36, 48 60 months and administration should last for at least 1-7 days, 1 week, 2 weeks, 3 weeks, 4 weeks, 1 month, 2 months, 3 months, or 4 months or more, for example 5, 6, 9, or 12 months or more.

[0217] In the above-mentioned period, administration may be for example intermittent, or for example on average once daily over said the period, or for example once every other day over said period, or for example at least once daily during said period.

[0218] In some embodiments, the administration of the composition is for a shorter duration of time falling within the time period mentioned above, for example on average once daily for a duration of at least six weeks in said time period, such as for example on average once daily for 3, 6, 8, 9, or 12 months during said time period.

[0219] In some embodiments, the administration may be for example on average once every other day for a period of at least six weeks in the period from 4 months to 60 months, such as for example on average once every other day for a period of 3, 6, 8, 9, or 12 months during said time period.

[0220] In some embodiments, the transitional nutritional composition is administered once daily. In some embodiments, the once daily administration occurs for 1, 2, 3, 4, 5, 6, 7, 8, 9, 10, 11, 12, 13, 14, 15, 16, 17, or 18 or more days, weeks, or months.

### Identifying Microbiome Structure and Microbiome Modulating Agents

[0221] The B. longum transitional clade and signatures can be used in an assay to analyze a microbiome structure to determine the abundance (relative or absolute) of B. longum transitional clade microorganisms in the microbiome, such as in a gastrointestinal microbiome. Further, the B. longum transitional clade genes and signatures can be used in an assay to identify one or more candidate or test agents capable of modulating a microbiome, such as a gastrointestinal microbiome, such that the microbiome has increased and/or decreased abundance of one or more B. longum transitional clade microorganisms. As used herein, “microbiome structure” refers to the profile of different microorganisms or microorganism diversity within a microbiome.

### Identifying Microbiome Structure

[0222] In some embodiments, a method of determining the abundance of one or more B. longum transitional clade microorganisms in a sample from a subject includes determining, using one or more suitable methods or techniques, a microbiome structure of a gastrointestinal tract of the subject by at least determining the relative abundance of one or more Bifidobacterium longum (B. longum) microorganisms characterized by at least 98.6% Average Nucleotide identity (ANI) with at least one strain selected in the group consisting of: CNCM I-5683, CNCM I-5684, CNCM I-5685, CNCM I-5686 and CNCM I-5687. Suitable methods or techniques for measuring the abundance (relative or absolute) include any gene and/or expression analysis techniques, such as any of those discussed elsewhere herein in relation to genes and signatures and others that will be appreciated by those of ordinary skill in the art.

[0223] In some embodiments, a method of determining the abundance of one or more B. longum transitional clade microorganisms in a sample from a subject includes determining, using one or more suitable methods or techniques, a microbiome structure of a gastrointestinal tract of the subject by at least determining the relative abundance of one or more Bifidobacterium longum (B. longum) microorganisms characterized by having about 98.6%, 98.7%, 98.8%, 98.9%, 99%, 99.1%, 99.2%, 99.3%, 99.4%, 99.5%, 99.6%, 99.7%, 99.8%, 99.9%, or 100% ANI with at least one strain selected from the group of: NCC5000, NCC5001, NCC5002, NCC5003 and NCC5004.

[0224] In some embodiments, a method of determining the abundance of one or more B. longum transitional clade microorganisms in a sample from a subject includes determining, using one or more suitable methods or techniques, a microbiome structure of a gastrointestinal tract of the subject by at least determining the relative abundance of one or more Bifidobacterium longum (B. longum) microorganisms characterized by having at least 98.6%, has at least 98.7%, has at least 98.8%, has at least 98.9%, has at least 99%, has at least 99.1%, has at least 99.2%, has at least 99.3%, has at least 99.4%, has at least 99.5%, has at least 99.6%, has at least 99.7%, has at least 99.8%, has at least 99.9%, ANI with at least one strain selected from the group of: CNCM I-5683, CNCM I-5684, CNCM I-5685, CNCM I-5686 and CNCM I-5687.

[0225] In some embodiments, a method of determining the abundance of one or more B. longum transitional clade microorganisms in a sample from a subject includes determining, using one or more suitable methods or techniques, a microbiome structure of a gastrointestinal tract of the subject by at least determining the relative abundance of one or more Bifidobacterium longum (B. longum) microorganisms characterized by having about 98.6%-100% ANI with at least one genome sequence selected from the group of SEQ ID NOs: 1-4010.

[0226] In some embodiments, a method of determining the abundance of one or more B. longum transitional clade microorganisms in a sample from a subject includes determining, using one or more suitable methods or techniques, a microbiome structure of a gastrointestinal tract of the subject by at least determining the relative abundance of one or more Bifidobacterium longum (B. longum) microorganisms characterized by having about 98.6%, 98.7%, 98.8%, 98.9%, 99%, 99.1%, 99.2%, 99.3%, 99.4%, 99.5%, 99.6%, 99.7%, 99.8%, 99.9%, or 100% ANI with at least one genome sequence selected from the group of SEQ ID NOs: 1-4010.

[0227] In some embodiments, a method of determining the abundance of one or more B. longum transitional clade microorganisms in a sample from a subject includes determining, using one or more suitable methods or techniques, a microbiome structure of a gastrointestinal tract of the subject by at least determining the relative abundance of one or more Bifidobacterium longum (B. longum) microorganisms characterized by having at least 98.6%, has at least 98.7%, has at least 98.8%, has at least 98.9%, has at least 99%, has at least 99.1%, has at least 99.2%, has at least 99.3%, has at least 99.4%, has at least 99.5%, has at least 99.6%, has at least 99.7%, has at least 99.8%, has at least 99.9%, ANI with at least one genome sequence selected from the group of SEQ ID NOs: 1-4010.

[0228] In some embodiments, a method of determining the abundance of one or more B. longum transitional clade microorganisms in a sample from a subject includes determining, using one or more suitable methods or techniques, a microbiome structure of a gastrointestinal tract of the subject by at least determining the relative abundance of one or more B. longum transitional clade microorganisms that are characterized by the presence of all genes from Table 1.

[0229] In some embodiments, a method of determining the abundance of one or more B. longum transitional clade microorganisms in a sample from a subject can include determining, using one or more suitable methods or techniques, a microbiome structure of a gastrointestinal tract of the subject by at least determining the relative abundance of one or more B. longum transitional clade microorganisms that are characterized by the presence of one or more genes from Table 1.

[0230] In some embodiments, a method of determining the abundance of one or more B. longum transitional clade microorganisms in a sample from a subject includes determining, using one or more suitable methods or techniques, a microbiome structure of a gastrointestinal tract of the subject by at least determining the relative abundance of one or more B. longum transitional clade microorganisms that are characterized by the presence of 1, 2, 3, 4, 5, 6, 7, 8, 9, 10, 11, 12, 13, 14, 15, 16, 17, 18, 19, 20, 21, 22, 23, 24, 25, 26, 27, 28, 29, 30, 31, 32, 33, 34, 35, 36, 37, 38, 39, 40, 41, 42, 43, 44, 45, 46, 47, 48, 49, 50, 51, 52, 53, 54, 55, 56, 57, 58, 59, 60, or 61 genes from Table 1.

[0231] In some embodiments, a method of determining the abundance of one or more B. longum transitional clade microorganisms in a sample from a subject includes determining, using one or more suitable methods or techniques, a microbiome structure of a gastrointestinal tract of the subject by at least determining the relative abundance of one or more B. longum transitional clade microorganisms that are characterized by the presence of 1 to 2, 3, 4, 5, 6, 7, 8, 9, 10, 11, 12, 13, 14, 15, 16, 17, 18, 19, 20, 21, 22, 23, 24, 25, 26, 27, 28, 29, 30, 31, 32, 33, 34, 35, 36, 37, 38, 39, 40, 41, 42, 43, 44, 45, 46, 47, 48, 49, 50, 51, 52, 53, 54, 55, 56, 57, 58, 59, 60, or 61 genes from Table 1.

[0232] In some embodiments, a method of determining the abundance of one or more B. longum transitional clade microorganisms in a sample from a subject includes determining, using one or more suitable methods or techniques, a microbiome structure of a gastrointestinal tract of the subject by at least determining the relative abundance of one or more B. longum transitional clade microorganisms that are characterized by the presence of all genes from Table 2.

[0233] In some embodiments, a method of determining the abundance of one or more B. longum transitional clade microorganisms in a sample from a subject can include determining, using one or more suitable methods or techniques, a microbiome structure of a gastrointestinal tract of the subject by at least determining the relative abundance of one or more B. longum transitional clade microorganisms that are characterized by the presence of one or more genes from Table 2.

[0234] In some embodiments, a method of determining the abundance of one or more B. longum transitional clade microorganisms in a sample from a subject includes determining, using one or more suitable methods or techniques, a microbiome structure of a gastrointestinal tract of the subject by at least determining the relative abundance of one or more B. longum transitional clade microorganisms that are characterized by the presence of 1, 2, 3, 4, 5, 6, 7, 8, 9, 10, 11, 12, 13, 14, 15, 16, 17, 18, 19, 20, 21, 22, 23, 24, 25, 26, 27, 28, 29, or 30 genes from Table 2.

[0235] In some embodiments, a method of determining the abundance of one or more B. longum transitional clade microorganisms in a sample from a subject includes determining, using one or more suitable methods or techniques, a microbiome structure of a gastrointestinal tract of the subject by at least determining the relative abundance of one or more B. longum transitional clade microorganisms that are characterized by the presence of 1 to 2, 3, 4, 5, 6, 7, 8, 9, 10, 11, 12, 13, 14, 15, 16, 17, 18, 19, 20, 21, 22, 23, 24, 25, 26, 27, 28, 29, 30 genes from Table 2.

[0236] In certain example embodiments of a method, the one or more B. longum microorganisms is not of the subspecies B. longum subspecies longum or B. longum subspecies infantis.

[0237] In certain example embodiments of a method, the one or more B. longum microorganisms are isolated from a human.

[0238] In some embodiments of a method, the sample is a biological sample. In some embodiments, the sample is a biological sample containing contents from one or more regions from a gastrointestinal tract (e.g., mouth, esophagus, stomach, small intestine (duodenum, jejunum, and/or ileum), appendix (when present), large intestine, cecum (when present), or any combination thereof. In some embodiments, the sample is a stool sample. In some embodiments of the method, the subject is a mammal. In some embodiments of a method, the subject is a non-human mammal. In some embodiments of the method, the subject is a human. In some embodiments of the method, the subject is an infant and/or young child.

### Identifying Microbiome Modulating Agents

[0239] The B. longum transitional clade signatures can be used in assays to identify microbiome modulating agents. Generally, identifying an agent capable of modulating a microbiome structure includes a) applying a candidate agent to a cell or cell population from a microbiome of a subject or a sample including the cell or cell population; b) detecting modulation of one or more phenotypic aspects of the cell or cell population by the candidate agent, thereby identifying the agent. The phenotypic aspects of the cell or cell population that is modulated may be a gene signature or biological program specific to a cell type or cell phenotype or phenotype specific to a population of cells (e.g., a B. longum transitional clade gene signature). In certain embodiments, steps can include administering candidate modulating agents to cells or sample containing cells, detecting identified cell (sub)populations for changes in signatures, or identifying relative changes in cell (sub) populations which may comprise detecting relative abundance of particular gene signatures, particular a B. longum transitional clade gene signature.

[0240] The term “modulate” broadly denotes a qualitative and/or quantitative alteration, change or variation in that which is being modulated. Where modulation can be assessed quantitatively—for example, where modulation comprises or consists of a change in a quantifiable variable such as a quantifiable property of a cell or where a quantifiable variable provides a suitable surrogate for the modulation—modulation specifically encompasses both increase (e.g., activation) or decrease (e.g., inhibition) in the measured variable. The term encompasses any extent of such modulation, e.g., any extent of such increase or decrease, and may more particularly refer to statistically significant increase or decrease in the measured variable. By means of example, modulation may encompass an increase in the value of the measured variable by at least about 10%, e.g., by at least about 20%, preferably by at least about 30%, e.g., by at least about 40%, more preferably by at least about 50%, e.g., by at least about 75%, even more preferably by at least about 100%, e.g., by at least about 150%, 200%, 250%, 300%, 400% or by at least about 500%, compared to a reference situation without said modulation; or modulation may encompass a decrease or reduction in the value of the measured variable by at least about 10%, e.g., by at least about 20%, by at least about 30%, e.g., by at least about 40%, by at least about 50%, e.g., by at least about 60%, by at least about 70%, e.g., by at least about 80%, by at least about 90%, e.g., by at least about 95%, such as by at least about 96%, 97%, 98%, 99% or even by 100%, compared to a reference situation without said modulation. Preferably, modulation may be specific or selective, hence, one or more desired phenotypic aspects of an immune cell or immune cell population may be modulated without substantially altering other (unintended, undesired) phenotypic aspect(s).

[0241] The term “agent” broadly encompasses any condition, substance or agent capable of modulating one or more phenotypic aspects of a cell or cell population as disclosed herein. Such conditions, substances or agents may be of physical, chemical, biochemical and/or biological nature. The term “candidate agent” refers to any condition, substance or agent that is being examined for the ability to modulate one or more phenotypic aspects of a cell or cell population as disclosed herein in a method comprising applying the candidate agent to the cell or cell population (e.g., exposing the cell or cell population to the candidate agent or contacting the cell or cell population with the candidate agent) and observing whether the desired modulation takes place.

[0242] Agents may include any potential class of biologically active conditions, substances or agents, such as for instance antibodies, proteins, peptides, nucleic acids, oligonucleotides, small molecules, or combinations thereof, as described herein.

[0243] Test or candidate agents include chemical and/or biologic agents as well as environmental factors or stressors. Environmental factors or stressors include, without limitation heat shock, osmolarity, hypoxia, cold, oxidative stress, radiation, starvation. Chemical and/or biologic agents include, without limitation, small molecule organic or inorganic compounds, proteins, peptides, amino acids, nucleic acids, polynucleotides, and combinations thereof.

[0244] In some embodiments, screening of test agents involves testing a combinatorial library containing a large number of potential modulator compounds. A combinatorial chemical library may be a collection of diverse chemical compounds generated by either chemical synthesis or biological synthesis, by combining a number of chemical “building blocks” such as reagents. For example, a linear combinatorial chemical library, such as a polypeptide library, is formed by combining a set of chemical building blocks (amino acids) in every possible way for a given compound length (for example the number of amino acids in a polypeptide compound). Millions of chemical compounds can be synthesized through such combinatorial mixing of chemical building blocks.

[0245] The methods of phenotypic analysis can be utilized for evaluating environmental stress and/or state, for screening of chemical libraries, and to screen or identify structural, syntenic, genomic, and/or organism and species variations. For example, a culture of cells, can be exposed to an environmental stress, such as but not limited to heat shock, osmolarity, hypoxia, cold, oxidative stress, radiation, starvation, a chemical (for example a therapeutic agent or potential therapeutic agent) and the like. After the stress is applied, a representative sample can be subjected to analysis, for example at various time points, and compared to a control, such as a sample from an organism or cell, for example a cell from an organism, or a standard value. By exposing cells, or fractions thereof, tissues, or even whole animals, to different members of the chemical libraries, and performing the methods described herein, different members of a chemical library can be screened for their effect on immune phenotypes thereof simultaneously in a relatively short amount of time, for example using a high throughput method.

[0246] In some embodiments, a method of determining the abundance of one or more B. longum transitional clade microorganisms in a sample from a subject includes determining, using one or more suitable methods or techniques, a microbiome structure of a gastrointestinal tract of the subject by at least determining the relative abundance of one or more B. longum transitional clade microorganisms that are characterized by the presence of a B. longum transitional signature. B. longum transitional clade signatures are described in greater detail elsewhere herein.

[0247] In certain example embodiments, a method of identifying a gastrointestinal microbiome modulating agent includes administering an amount of a test agent to a subject or to a sample therefrom; and determining a microbiome structure of a gastrointestinal tract of the subject by at least determining the relative abundance of one or more Bifidobacterium longum (B. longum) microorganisms characterized by at least 98.6% Average Nucleotide identity (ANI) with at least one strain selected in the group of: CNCM I-5683, CNCM I-5684, CNCM I-5685, CNCM I-5686 and CNCM I-5687, wherein the gastrointestinal microbiome modulating agent is effective to increase or decrease the relative abundance of one or more of the one or more B longum microorganism characterized by the presence of the B longum transitional clade genes. Suitable methods or techniques for measuring the abundance (relative or absolute) include any gene and/or expression analysis techniques, such as any of those discussed elsewhere herein in relation to genes and signatures and others that will be appreciated by those of ordinary skill in the art.

[0248] In certain example embodiments, a method of identifying a gastrointestinal microbiome modulating agent includes administering an amount of a test agent to a subject or to a sample therefrom; and determining a microbiome structure of a gastrointestinal tract of the subject by at least determining the relative abundance of one or more Bifidobacterium longum (B. longum) microorganisms characterized by having at least 98.6%, by having at least 98.7%, by having at least 98.8%, by having at least 98.9%, by having at least 99%, by having at least 99.1%, by having at least 99.2%, by having at least 99.3%, by having at least 99.4%, by having at least 99.5%, by having at least 99.6%, by having at least 99.7%, by having at least 99.8%, by having at least 99.9%, ANI with at least one strain selected from the group of: CNCM I-5683, CNCM I-5684, CNCM I-5685, CNCM I-5686 and CNCM I-5687, wherein the gastrointestinal microbiome modulating agent is effective to increase or decrease the relative abundance of one or more of the one or more B longum microorganism characterized by the presence of the B longum transitional clade genes.

[0249] In certain example embodiments, a method of identifying a gastrointestinal microbiome modulating agent includes administering an amount of a test agent to a subject or to a sample therefrom; and determining a microbiome structure of a gastrointestinal tract of the subject by at least determining the relative abundance of one or more Bifidobacterium longum (B. longum) microorganisms characterized by having about 98.6%-100% ANI with at least one genome sequence selected from the group of SEQ ID NOs: 1-4010, wherein the gastrointestinal microbiome modulating agent is effective to increase or decrease the relative abundance of one or more of the one or more B longum microorganism characterized by the presence of the B longum transitional clade genes.

[0250] In certain example embodiments, a method of identifying a gastrointestinal microbiome modulating agent includes administering an amount of a test agent to a subject or to a sample therefrom; and determining a microbiome structure of a gastrointestinal tract of the subject by at least determining the relative abundance of one or more Bifidobacterium longum (B. longum) microorganisms characterized by having about 98.6%, 98.7%, 98.8%, 98.9%, 99%, 99.1%, 99.2%, 99.3%, 99.4%, 99.5%, 99.6%, 99.7%, 99.8%, 99.9%, or 100% ANI with at least one genome sequence selected from the group of SEQ ID NOs: 1-4010, wherein the gastrointestinal microbiome modulating agent is effective to increase or decrease the relative abundance of one or more of the one or more B longum microorganism characterized by the presence of the B longum transitional clade genes.

[0251] In certain example embodiments, a method of identifying a gastrointestinal microbiome modulating agent includes administering an amount of a test agent to a subject or to a sample therefrom; and determining a microbiome structure of a gastrointestinal tract of the subject by at least determining the relative abundance of one or more Bifidobacterium longum (B. longum) microorganisms characterized by having at least 98.6%, by having at least 98.7%, by having at least 98.8%, by having at least 98.9%, by having at least 99%, by having at least 99.1%, by having at least 99.2%, by having at least 99.3%, by having at least 99.4%, by having at least 99.5%, by having at least 99.6%, by having at least 99.7%, by having at least 99.8%, by having at least 99.9%, ANI with at least one genome sequence selected from the group of SEQ ID NOs: 1-4010, wherein the gastrointestinal microbiome modulating agent is effective to increase or decrease the relative abundance of one or more of the one or more B longum microorganism characterized by the presence of the B longum transitional clade genes.

[0252] In certain example embodiments, a method of identifying a gastrointestinal microbiome modulating agent includes administering an amount of a test agent to a subject or to a sample therefrom; and determining a microbiome structure of a gastrointestinal tract of the subject by at least determining the relative abundance of one or more Bifidobacterium longum (B. longum) microorganisms characterized by having one or more B. longum transitional clade microorganisms that are characterized by the presence of all genes from Table 1, wherein the gastrointestinal microbiome modulating agent is effective to increase or decrease the relative abundance of one or more of the one or more B longum microorganism characterized by the presence of the B. longum transitional clade genes.

[0253] In certain example embodiments, a method of identifying a gastrointestinal microbiome modulating agent includes administering an amount of a test agent to a subject or to a sample therefrom; and determining a microbiome structure of a gastrointestinal tract of the subject by at least determining the relative abundance of one or more Bifidobacterium longum (B. longum) microorganisms characterized by having one or more B. longum transitional clade microorganisms that are characterized by the presence of one or more genes from Table 1, wherein the gastrointestinal microbiome modulating agent is effective to increase or decrease the relative abundance of one or more of the one or more B longum microorganism characterized by the presence of the B. longum transitional clade genes.

[0254] In certain example embodiments, a method of identifying a gastrointestinal microbiome modulating agent includes administering an amount of a test agent to a subject or to a sample therefrom; and determining a microbiome structure of a gastrointestinal tract of the subject by at least determining the relative abundance of one or more Bifidobacterium longum (B. longum) microorganisms characterized by having one or more B. longum transitional clade microorganisms that are characterized by the presence of 1, 2, 3, 4, 5, 6, 7, 8, 9, 10, 11, 12, 13, 14, 15, 16, 17, 18, 19, 20, 21, 22, 23, 24, 25, 26, 27, 28, 29, 30, 31, 32, 33, 34, 35, 36, 37, 38, 39, 40, 41, 42, 43, 44, 45, 46, 47, 48, 49, 50, 51, 52, 53, 54, 55, 56, 57, 58, 59, 60, or 61 genes from Table 1, wherein the gastrointestinal microbiome modulating agent is effective to increase or decrease the relative abundance of one or more of the one or more B longum microorganism characterized by the presence of the B. longum transitional clade genes.

[0255] In certain example embodiments, a method of identifying a gastrointestinal microbiome modulating agent includes administering an amount of a test agent to a subject or to a sample therefrom; and determining a microbiome structure of a gastrointestinal tract of the subject by at least determining the relative abundance of one or more Bifidobacterium longum (B. longum) microorganisms characterized by having one or more B. longum transitional clade microorganisms that are characterized by the presence of 1 to 2, 3, 4, 5, 6, 7, 8, 9, 10, 11, 12, 13, 14, 15, 16, 17, 18, 19, 20, 21, 22, 23, 24, 25, 26, 27, 28, 29, 30, 31, 32, 33, 34, 35, 36, 37, 38, 39, 40, 41, 42, 43, 44, 45, 46, 47, 48, 49, 50, 51, 52, 53, 54, 55, 56, 57, 58, 59, 60, or 61 genes from Table 1, wherein the gastrointestinal microbiome modulating agent is effective to increase or decrease the relative abundance of one or more of the one or more B longum microorganism characterized by the presence of the B. longum transitional clade genes.

[0256] In certain example embodiments, a method of identifying a gastrointestinal microbiome modulating agent includes administering an amount of a test agent to a subject or to a sample therefrom; and determining a microbiome structure of a gastrointestinal tract of the subject by at least determining the relative abundance of one or more Bifidobacterium longum (B. longum) microorganisms characterized by having one or more B. longum transitional clade microorganisms that are characterized by the presence of all genes from Table 2, wherein the gastrointestinal microbiome modulating agent is effective to increase or decrease the relative abundance of one or more of the one or more B longum microorganism characterized by the presence of the B. longum transitional clade genes.

[0257] In certain example embodiments, a method of identifying a gastrointestinal microbiome modulating agent includes administering an amount of a test agent to a subject or to a sample therefrom; and determining a microbiome structure of a gastrointestinal tract of the subject by at least determining the relative abundance of one or more Bifidobacterium longum (B. longum) microorganisms characterized by having one or more B. longum transitional clade microorganisms that are characterized by the presence of one or more genes from Table 2, wherein the gastrointestinal microbiome modulating agent is effective to increase or decrease the relative abundance of one or more of the one or more B longum microorganism characterized by the presence of the B. longum transitional clade genes.

[0258] In certain example embodiments, a method of identifying a gastrointestinal microbiome modulating agent includes administering an amount of a test agent to a subject or to a sample therefrom; and determining a microbiome structure of a gastrointestinal tract of the subject by at least determining the relative abundance of one or more Bifidobacterium longum (B. longum) microorganisms characterized by having one or more B. longum transitional clade microorganisms that are characterized by the presence of 1, 2, 3, 4, 5, 6, 7, 8, 9, 10, 11, 12, 13, 14, 15, 16, 17, 18, 19, 20, 21, 22, 23, 24, 25, 26, 27, 28, 29, or 30 genes from Table 2, wherein the gastrointestinal microbiome modulating agent is effective to increase or decrease the relative abundance of one or more of the one or more B longum microorganism characterized by the presence of the B. longum transitional clade genes.

[0259] In certain example embodiments, a method of identifying a gastrointestinal microbiome modulating agent includes administering an amount of a test agent to a subject or to a sample therefrom; and determining a microbiome structure of a gastrointestinal tract of the subject by at least determining the relative abundance of one or more of the one or more Bifidobacterium longum (B. longum) microorganisms characterized by having one or more B. longum transitional clade microorganisms that are characterized by the presence of 1 to 2, 3, 4, 5, 6, 7, 8, 9, 10, 11, 12, 13, 14, 15, 16, 17, 18, 19, 20, 21, 22, 23, 24, 25, 26, 27, 28, 29, or 30 genes from Table 2, wherein the gastrointestinal microbiome modulating agent is effective to increase or decrease the relative abundance of one or more of the one or more B longum microorganism characterized by the presence of the B. longum transitional clade genes.

[0260] In certain embodiments of a method, the test agent is provided in a formulation.

[0261] Suitable methods or techniques for measuring the abundance (relative or absolute) of a microorganism include any gene and/or expression analysis techniques, such as any of those discussed elsewhere herein in relation to genes and signatures and others that will be appreciated by those of ordinary skill in the art. Exemplary detection methods include immunofluorescence, immunohistochemistry (IHC), fluorescence activated cell sorting (FACS), mass spectrometry (MS), mass cytometry (CyTOF), RNA-seq, single cell RNA-seq (described further herein), quantitative RT-PCR, single cell qPCR, FISH, RNA-FISH, MERFISH (multiplex (in situ) RNA FISH) and/or by in situ hybridization. Other methods including absorbance assays and colorimetric assays are known in the art and may be used herein. detection may comprise primers and/or probes or fluorescently bar-coded oligonucleotide probes for hybridization to RNA (see e.g., Geiss G K, et al., Direct multiplexed measurement of gene expression with color-coded probe pairs. Nat Biotechnol. 2008 March; 26(3):317-25).

[0262] In certain embodiments, the present invention provides for gene signature screening. The concept of signature screening was introduced by Stegmaier et al. (Gene expression-based high-throughput screening (GE-HTS) and application to leukemia differentiation. Nature Genet. 36, 257-263 (2004)), who realized that if a gene-expression signature was the proxy for a phenotype of interest, it could be used to find small molecules that effect that phenotype without knowledge of a validated drug target. The signatures or biological programs of the present invention may be used to screen for drugs that reduce the signature or biological program in cells as described herein. The signature or biological program may be used for GE-HTS. In certain embodiments, pharmacological screens may be used to identify drugs that are selectively toxic to cells having a signature.

[0263] The Connectivity Map (cmap) is a collection of genome-wide transcriptional expression data from cultured human cells treated with bioactive small molecules and simple pattern-matching algorithms that together enable the discovery of functional connections between drugs, genes and diseases through the transitory feature of common gene-expression changes (see, Lamb et al., The Connectivity Map: Using Gene-Expression Signatures to Connect Small Molecules, Genes, and Disease. Science 29 Sep. 2006: Vol. 313, Issue 5795, pp. 1929-1935, DOI: 10.1126/science.1132939; and Lamb, J., The Connectivity Map: a new tool for biomedical research. Nature Reviews Cancer January 2007: Vol. 7, pp. 54-60). In certain embodiments, Cmap can be used to screen for small molecules capable of modulating a signature or biological program of the present invention in silico.

[0264] In some embodiments a metagenome analysis can be performed as described elsewhere herein to analyze the microbiome structure and changes therein in response to a candidate agent within the methods described herein.

[0265] In certain example embodiments of a method, the one or more B. longum microorganisms is not of the subspecies B. longum subspecies longum or B. longum subspecies infantis.

[0266] In certain example embodiments of a method, the one or more B. longum microorganisms are isolated from a human.

[0267] In some embodiments of a method, the sample is a biological sample. In some embodiments, the sample is a biological sample containing contents from one or more regions from a gastrointestinal tract (e.g., mouth, esophagus, stomach, small intestine (duodenum, jejunum, and/or ileum), appendix (when present), large intestine, cecum (when present), or any combination thereof. In some embodiments, the sample is a stool sample. In some embodiments of the method, the subject is a mammal. In some embodiments of a method, the subject is a non-human mammal. In some embodiments of the method, the subject is a human. In some embodiments of the method, the subject is an infant or young child.

[0268] Test agents identified as microbiome modulating agents as previously described can be administered to a subject in need thereof to modify the structure of a microbiome so as to have increased or decreased amounts of a B. longum transitional clade microorganism. In some embodiments, one or more modulating agents are included in a formulation, such as a synthetic composition described herein, or other composition formulated for administration to a subject in need thereof.

[0269] Further embodiments are illustrated in the following Examples which are given for illustrative purposes only and are not intended to limit the scope of the invention.

### EXAMPLES

### Example 1—Initial Metagenome Analysis of Infant Stool Samples Reveals a B. longum Transitional Clade

[0270] This example discusses a metagenome analysis of the gut microbiome in infants in Dhaka Bangladesh (as determined by evaluating stool samples) over a time period from birth to about 2 years in both health and possible disease states (as indicated by a diarrhea event) (see e.g., FIG. 14). Initially, 1, 377 samples were sequenced for metagenome analysis. On average about 26.4 M sequencing reads were obtained per sample, with an interquartile range of 15.4M-34.8M reads and a standard deviation of 16M reads. 66 samples had less than 5M sequencing reads and were filtered out of this analysis and were resequenced. Of the filtered samples, most were either DIA samples (those obtained during a diarrhea event) or early samples but were not samples collected at birth. Specifically, there were 19 DIA samples filtered, 15 2-month old samples filtered, 10 6-month old samples filtered, 9 10-month old samples filtered, 7 15-month old samples filtered, 3 24-month old samples filtered, 2 18-month old samples filtered, and 1 birth sample filtered.

[0271] B. longum subspecies infantis was quantified in the samples on hand. Initially it was sought to compare HMO gene cluster genes (those used to detect B. longum subspecies infantis in the DIABIVIMUNE and TEDDY data sets) to core genes of the metagenomic set to determine relative abundance of wrt. B. longum. (HUMAnN2 B. longum-stratified CPM). Then core genes (HUMAnN2 CPM) with the greatest Pearson correlation with B. longum relative abundance (MetaPhAn) was identified. Results of these analyses are shown in FIGS. 1-5.

[0272] Overall, microbial complexity increased with age (see e.g., FIG. 1). FIG. 2 shows a comparison of HMO cluster genes (used to detect B. longum subspecies infantis in DIABIMMUNE and TEDDY) abundance to core genes to determine the relative abundance wrt. B. longum (HUMAnN2 B. longum-stratified CPM). FIG. 3 shows a discrepancy between B. longum relative abundance (MetaPhlAn) and median core genome coverage (StrainPhlAn). FIGS. 4-5 show that there are more polymorphisms in B. longum during the transition from breast feeding to solid foods.

[0273] From the analysis of B. longum subspecies infantis, seven new B. longum genomes were included in the strain phylogeny analysis. These were B. longum subspecies infantis strain BIC 1206122787, B. longum subspecies infantis strain BT1, B. longum subspecies infantis EK3, B. longum subspecies infantis strain 1888B, B. longum subspecies suis strain LMG 21814, B. longum subspecies longum (Asian) strain CMCC P0001 and B. longum subspecies longum (Asian) strain BXY01. The strain analysis results and phylogenies are shown in FIGS. 6A-6C and 7A-7D.

[0274] Further analysis revealed a longitudinal B. longum subspecies infantis to Clade 2 (see e.g., FIG. 7C) to Clade 3 transition (see e.g., FIG. 7D) with the introduction of solid foods and weaning (FIG. 8). B. longum subspecies infantis is present in most samples from the Dhaka babies in the cohort. (FIG. 9). 99.6% percent of babies (all but one) had B. longum subspecies infantis in at least one stool sample. Samples had 14 or more B. longum subspecies infantis HMO cluster genes. B. longum subspecies infantis was less common in non-breast-fed babies (FIG. 10) and was more abundant than other B. longum subspecies longum strains (FIG. 11). Further, abundance of B. longum subspecies infantis and other B. longum subspecies longum strains differed during breastfeeding (FIG. 12). It was observed that B. longum subspecies longum was ubiquitous with longitudinal strain shifts, including a change in B. longum subspecies infantis (FIG. 13).

### Example 2—MAG Assembly and Analyses

[0275] Further metagenomic analysis was performed. 222 babies were followed in Dhaka, Bangladesh. Metagenomic sequencing and analysis was performed on 1,353 stool samples. The MetaBAT2 wdl workflow was used for binning MAGs, which included MegaHIT assembly, MetaBAT2 binning (using dynamic parameter optimization), checkM to obtain MAG quality (completeness, contamination, etc.) and GTDB-Tk to assign taxonomy. FIG. 14 shows the sampling timeline.

[0276] FIG. 15 shows the number of assembled Bifidobacterium genomes per species as a function of genome completeness. The number of genomes with completeness >90 is shown for each species. Only species with more than 50 genomes are shown. FIG. 16 shows the average number of high quality (HQ) genomes per sample and timepoint. FIG. 17 show the number of B. longum subspecies infantis and B. longum subspecies longum genomes (completeness >90) over time. FIG. 18 shows that there were no multiple HQ genomes (completeness >90) B. longum genomes. N=8 samples with second genome with completeness >50.

[0277] Overall, 234 HQ MAGs were labeled as B. longum subspecies longum or B. longum subspecies infantis. A pangenome was built together with 25 B. longum subspecies longum/B. longum subspecies infantis reference genomes. 259 “unique” genomes in total. Genomes harbored 484,213 genes in total (sum of genes on all genomes). Genes with >95% identity were considered non-redundant genes. The pangenome harbored 13,834 non-redundant genes. (FIG. 19). Three clades were clearly separated on reference genomes (FIGS. 20A-20E). Further, B. longum MAGs are clearly divided between B. longum subspecies longum and a B. longum transitional clade. MAGs from the B. longum transitional clade look more like B. longum subspecies suis than other reference genomes (FIG. 21).

### Example 3—Tracking Marker Genes in the MAGs

[0278] Mapping from marker genes to the B. longum pangenome/UniRef90 gene family IDs in ChocoPhlAn was completed. The quality of the marker genes was assessed by covariance, prevalence, and co-clustering analyses. The most prevalent marker genes per clade were used to estimate clade abundance (within B. longum). Abundance of the clade=c=m_{c}/sum[m_{c}]_{c=1.3}, where me is the median of the clade specific marker gene CPM values (from HUMAnN2 gene family table). FIG. 22 shows a phylogeny and heat map generated using the most prevalent marker genes to estimate and show clade abundance. Points on the phylogeny show the dominant strain by marker gene abundance. The heatmap shows clade abundance within B. longum. FIG. 23 shows a ternary/simplex graph showing the succession from B. subspecies infantis to B. longum “transitional” clade to B. longum subspecies longum. B. longum subspecies infantis and B. longum “transitional” clade coexist while B. longum subspecies infantis and B. longum subspecies longum do not.

[0279] The sequencing reads, contigs and MAGs can be used in a comprehensive, taxonomy-aware functional annotation of the assemblies as shown in FIG. 24. As can be gleaned from FIG. 23, FIG. 25 illustrates the distinct longitudinal trends in B. longum subspecies as revealed by the metagenomic analyses herein.

### Example 4—B. longum Pangenome

[0280] A B. longum pangenome was assembled from reference, isolate, and metagenome assembled genomes (MAGs). 234 high quality MAGs were labeled as B. longum subspecies longum or B. longum subspecies infantis by GTDB-Tk. 16 additional B. longum isolate genomes were included (“NCC” isolates). n=5 novel clade, n=10 B. longum subspecies infantis, n=6 by PacBio sequencing, rest Illumina, n=1 bifidum “control” sequence. 25 reference genomes were also included. The pangenome was built by cd-hit gene clustering (>95% identity). 276 “unique” genomes/MAGs in total were included. Genomes harbored 521, 102 genes in total (sum of all genes on all genomes). 484,213 genes in total before the addition of the isolate genomes to the analysis. The pangenome harbored 15,532 non-redundant genes. The pangenome harbored 13,834 non-redundant genes before the inclusion of the isolate genomes to the analysis. Results are shown in—26A-26B. Three clades clearly separated on reference genomes. MAGs from B. longum transitional clade appeared more like B. longum subspecies suis than the other reference genomes (FIG. 26A).

[0281] FIG. 27 shows a comparison of abundance estimates between previous MAG analysis data (see e.g., FIGS. 20A-20E, Example 2). Previous marker gene analysis done using MAGs and reference genomes. Most marker genes were shared between the two methods but obtaining new isolate genomes pruned off some “noisy”, unreliable markers. Of the new reduced set of markers, most were concordant between the two methods. 90% of B. longum subspecies longum, 80% of B. longum transitional clade, and 73% of B. longum subspecies infantis marker genes (after obtaining the additional isolates noted in Example 4) were concordant between the two methods. See also FIG. 27. As before (Example 3), marker genes were tracked in the metagenomes using the approach as before (see Example 3). FIG. 28 shows the resulting phylogeny and heat map. The same clear longitudinal distinction between the clades was observed (see e.g., FIGS. 23 and 25). FIGS. 29A-29C show the relative abundance of B. longum subspecies infantis (FIG. 29A), B. longum transitional clade (FIG. 29B), and B. longum subspecies longum (FIG. 29C), which can be compared to results shown in Example 3.

[0282] A gene function analysis was done. FIG. 30 shows a heatmap of selected clade-specific gene functions among isolate genomes (or B. longum subspecies longum references). FIG. 31 shows a neighborhood of beta-lactamase gene on a B. longum transitional clade isolate. FIG. 32 shows a nucleotide alignment of B. longum isolates. The overlapping region in the end of the genes (top is B. longum transitional clade beta-lactamase genes, bottom is B. longum subspecies infantis beta-lactamase genes) on nucleotide level (indicates match). The average nucleotide identity was 52% between the clades. FIG. 33 shows an amino acid alignment of B. longum isolates. Overlapping region on grayscale by amino acid seq. Amino acid sequences are distinct per subspecies clades. The average amino acid identity was 34% between the clades.

[0283] FIG. 34 shows a heatmap showing significant rank-correlations between B. longum transitional clade and other species. FIG. 35 shows the relative abundances of Bifidobacterium longum

[0284] FIG. 36 shows UPGMA tree built from ANI distances computed with OrthoANIu software showing separation of the Bifidobacterium subspecies.

### Example 5—B. longum Transitional Clade Marker Genes

[0285] A marker gene analysis as previously described was performed using 4 reference genomes (B. longum subspecies suis strain LMG21814 (considered an “outlier” by gene content), 3 Asian strains (B. longum strain BXY01, B. longum subspecies longum CMCC P0001, and B. longum subspecies longum JDM301), 5 NCC isolates (NCC5000, NCC5001, NCC5002, NCC5003, and NCC5004, corresponding to CNCM I-5683, CNCM I-5684, CNCM I-5685, CNCM I-5686 and CNCM I-5687, respectively). For the previous examples herein, the definition of a marker gene was “a gene present on at least 3 out of 4 genomes, which resulted in 262 B. longum transitional clade maker genes, n=55 marker genes if B. longum subspecies suis was included). In this example, the marker gene definition was “a gene present on at least 5 of the 9 reference genomes” (which are noted above). Those maker genes are shown in Table 1. A subgroup of marker genes specific to the NCC isolates was generated. The marker gene definition for this specific group is a gene that is present on all NCC reference isolate (e.g., NCC5000, NCC5001, NCC5002, NCC5003, and NCC5004, corresponding to CNCM I-5683, CNCM I-5684, CNCM I-5685, CNCM I-5686 and CNCM I-5687, respectively) genomes. This subgroup is of genes in presented in Table 2.

[0286] Tables 1 and 2 shows B. longum transitional clade marker gene groups. Table 1 shows genes that are present on at least 5 of 9 reference genomes. Table 2 shows genes that are present in all 5 NCC isolate genomes (NCC5000, NCC5001, NCC5002, NCC5003, and NCC5004, corresponding to CNCM I-5683, CNCM I-5684, CNCM I-5685, CNCM I-5686 and CNCM I-5687, respectively). A gene is considered present if it is has a coverage of 90% and has at least 95% shared sequence identity.

TABLE 1
B. longum transitional clade specific genes

| | | | | Presence in n |
|---|---|---|---|---|
| | | | Presence in n | genome from |
| Gene Cluster | Genome | Locus Tag | NCC genome | any clade |
| Cluster 10535 | NCC5001, | 1_1027, 1_983, 1_1011, 1_1056, 1_1038 | 5 | 8 |
| | NCC5000, | | | |
| | NCC5002, | | | |
| | NCC5004, | | | |
| | NCC5003 | | | |
| Cluster 10742 | NCC5003, | 1_1460, 1_628, 1_1449, 1_623, 1_1439 | 5 | 5 |
| | NCC5001, | | | |
| | NCC5002, | | | |
| | NCC5004, | | | |
| | NCC5000 | | | |
| Cluster 10783 | NCC5002, | 1_1489, 1_1495, 1_588, 1_1479 | 4 | 7 |
| | NCC5003, | | | |
| | NCC5004, | | | |
| | NCC5000 | | | |
| Cluster 10912 | NCC5001, | 1_956, 1_1086, 1_1049, 1_981, 1_1113 | 5 | 5 |
| | NCC5002, | | | |
| | NCC5000, | | | |
| | NCC5004, | | | |
| | NCC5003 | | | |
| Cluster 10987 | NCC5002, | 1_281, 1_324 | 2 | 5 |
| | NCC5000 | | | |
| Cluster 12024 | NCC5003, | 1_1172, 1_1106, 1_1145 | 3 | 6 |
| | NCC5000, | | | |
| | NCC5002 | | | |
| Cluster 12123 | NCC5004, | 1_1096, 1_998, 1_1067, 1_971, 1_942 | 5 | 5 |
| | NCC5003, | | | |
| | NCC5001, | | | |
| | NCC5002, | | | |
| | NCC5000 | | | |
| Cluster 12245 | NCC5002, | 1_1087, 1_955, 1_980, 1_1114, 1_1050 | 5 | 5 |
| | NCC5001, | | | |
| | NCC5004, | | | |
| | NCC5003, | | | |
| | NCC5000 | | | |
| Cluster 12381 | NCC5002, | 1_568, 1_1520, 1_650, 1_1438, 1_571 | 5 | 5 |
| | NCC5001, | | | |
| | NCC5003, | | | |
| | NCC5004, | | | |
| | NCC5000 | | | |
| Cluster 1274 | NCC5004, | 1_501, 1_1575, 1_1583, 1_532, 1_1561 | 5 | 5 |
| | NCC5002, | | | |
| | NCC5003, | | | |
| | NCC5001, | | | |
| | NCC5000 | | | |
| Cluster 1378 | NCC5001, | 1_535, 1_1558, 1_1572, 1_504, 1_1580 | 5 | 5 |
| | NCC5000, | | | |
| | NCC5002, | | | |
| | NCC5004, | | | |
| | NCC5003 | | | |
| Cluster 13922 | NCC5003, | 1_997, 1_1068, 1_941, 1_970, 1_1097 | 5 | 5 |
| | NCC5001, | | | |
| | NCC5000, | | | |
| | NCC5002, | | | |
| | NCC5004 | | | |
| Cluster 13960 | NCC5002, | 1_1055, 1_1012, 1_1018, 1_987, 1_1082 | 5 | 8 |
| | NCC5004, | | | |
| | NCC5000, | | | |
| | NCC5001, | | | |
| | NCC5003 | | | |
| Cluster 14054 | NCC5001, | 1_1835, 1_307, 1_1760, 1_277, 1_238 | 5 | 5 |
| | NCC5003, | | | |
| | NCC5004, | | | |
| | NCC5000, | | | |
| | NCC5002 | | | |
| Cluster 143 | NCC5003, | 1_542, 1_464, 1_1545 | 3 | 6 |
| | NCC5002, | | | |
| | NCC5004 | | | |
| Cluster 14471 | NCC5001, | 1_1066, 1_1095, 1_943, 1_999, 1_972 | 5 | 5 |
| | NCC5004, | | | |
| | NCC5000, | | | |
| | NCC5003, | | | |
| | NCC5002 | | | |
| Cluster 1456 | NCC5002, | 1_447, 1_1562, 1_521 | 3 | 5 |
| | NCC5004, | | | |
| | NCC5003 | | | |
| Cluster 14959 | NCC5004, | 1_1126, 1_942, 1_967, 1_892, 1_1098 | 5 | 8 |
| | NCC5002, | | | |
| | NCC5003, | | | |
| | NCC5000, | | | |
| | NCC5001 | | | |
| Cluster 1704 | NCC5001, | 1_1519, 1_1437, 1_651, 1_572, 1_569 | 5 | 5 |
| | NCC5004, | | | |
| | NCC5003, | | | |
| | NCC5000, | | | |
| | NCC5002 | | | |
| Cluster 2040 | NCC5000, | 1_1559, 1_534, 1_503, 1_1581, 1_1573 | 5 | 5 |
| | NCC5001, | | | |
| | NCC5004, | | | |
| | NCC5003, | | | |
| | NCC5002 | | | |
| Cluster 250 | NCC5000, | 1_1298, 1_1284, 1_1311, 1_789 | 4 | 7 |
| | NCC5002, | | | |
| | NCC5003, | | | |
| | NCC5004 | | | |
| Cluster 2546 | NCC5003, | 1_360, 1_325, 1_1708, 1_282 | 4 | 7 |
| | NCC5000, | | | |
| | NCC5004, | | | |
| | NCC5002 | | | |
| Cluster 2563 | NCC5000, | 1_1829, 1_1821, 1_235, 1_257, 1_1852 | 5 | 8 |
| | NCC5003, | | | |
| | NCC5001, | | | |
| | NCC5004, | | | |
| | NCC5002 | | | |
| Cluster 2765 | NCC5000, | 1_320, 1_355, 1_1713, 1_277 | 4 | 7 |
| | NCC5003, | | | |
| | NCC5004, | | | |
| | NCC5002 | | | |
| Cluster 2801 | NCC5001, | 1_1506, 1_582 | 2 | 5 |
| | NCC5000 | | | |
| Cluster 2839 | NCC5002, | 1_453, 1_531, 1_1556 | 3 | 6 |
| | NCC5003, | | | |
| | NCC5004 | | | |
| Cluster 3126 | NCC5004, | 1_616, 1_1467, 1_1461, 1_1447 | 4 | 7 |
| | NCC5003, | | | |
| | NCC5002, | | | |
| | NCC5000 | | | |
| Cluster 320 | NCC5004, | 1_226, 1_1850, 1_206, 1_1882, 1_1879 | 5 | 8 |
| | NCC5003, | | | |
| | NCC5001, | | | |
| | NCC5002, | | | |
| | NCC5000 | | | |
| Cluster 3358 | NCC5001, | 1_199, 1_1857, 1_1886, 1_219, 1_1889 | 5 | 8 |
| | NCC5003, | | | |
| | NCC5000, | | | |
| | NCC5004, | | | |
| | NCC5002 | | | |
| Cluster 3512 | NCC5001, | 1_201, 1_1855, 1_221, 1_1884, 1_1887 | 5 | 8 |
| | NCC5003, | | | |
| | NCC5004, | | | |
| | NCC5000, | | | |
| | NCC5002 | | | |
| Cluster 3753 | NCC5003, | 1_525, 1_446, 1_1563 | 3 | 5 |
| | NCC5002, | | | |
| | NCC5004 | | | |
| Cluster 4705 | NCC5004, | 1_615, 1_1448, 1_1462, 1_1468 | 4 | 7 |
| | NCC5000, | | | |
| | NCC5002, | | | |
| | NCC5003 | | | |
| Cluster 5109 | NCC5004, | 1_1435, 1_571, 1_653, 1_574, 1_1517 | 5 | 8 |
| | NCC5002, | | | |
| | NCC5003, | | | |
| | NCC5000, | | | |
| | NCC5001 | | | |
| Cluster 5197 | NCC5004, | 1_218, 1_1887, 1_1890, 1_1858 | 4 | 7 |
| | NCC5000, | | | |
| | NCC5002, | | | |
| | NCC5003 | | | |
| Cluster 5301 | NCC5003, | 1_1000, 1_1094, 1_973, 1_1065, 1_944 | 5 | 5 |
| | NCC5004, | | | |
| | NCC5002, | | | |
| | NCC5001, | | | |
| | NCC5000 | | | |
| Cluster 5401 | NCC5001, | 1_51, 1_2023, 1_1365, 1_1338 | 4 | 6 |
| | NCC5000, | | | |
| | NCC5003, | | | |
| | NCC5002 | | | |
| Cluster 5664 | NCC5002, | 1_276, 1_1714, 1_354, 1_319 | 4 | 7 |
| | NCC5004, | | | |
| | NCC5003, | | | |
| | NCC5000 | | | |
| Cluster 5716 | NCC5004, | 1_1488, 1_1574, 1_518, 1_599, 1_521_{—} | 5 | 8 |
| | NCC5001, | | | |
| | NCC5002, | | | |
| | NCC5003, | | | |
| | NCC5000 | | | |
| Cluster 5827 | NCC5002, | 1_1460, 1_617, 1_1446, 1_1466 | 4 | 7 |
| | NCC5004, | | | |
| | NCC5000, | | | |
| | NCC5003 | | | |
| Cluster 6058 | NCC5003, | 1_223, 1_217, 1_1847 | 3 | 6 |
| | NCC5000, | | | |
| | NCC5004 | | | |
| Cluster 6120 | NCC5003, | 1_529, 1_1559, 1_450 | 3 | 6 |
| | NCC5004, | | | |
| | NCC5002 | | | |
| Cluster 6142 | NCC5004, | 1_1558, 1_451 | 2 | 5 |
| | NCC5002 | | | |
| Cluster 6148 | NCC5004, | 1_2050, 1_14, 1_15, 1_2096, 1_14 | 5 | 7 |
| | NCC5000, | | | |
| | NCC5003, | | | |
| | NCC5001, | | | |
| | NCC5002 | | | |
| Cluster 6168 | NCC5003, | 1_600, 1_519, 1_1573, 1_522, 1_1487 | 5 | 8 |
| | NCC5002, | | | |
| | NCC5001, | | | |
| | NCC5000, | | | |
| | NCC5004 | | | |
| Cluster 6333 | NCC5003, | 1_1465, 1_618, 1_1459, 1_1445 | 4 | 7 |
| | NCC5004, | | | |
| | NCC5002, | | | |
| | NCC5000 | | | |
| Cluster 6443 | NCC5003, | 1_1853, 1_203, 1_1882, 1_223, 1_1885 | 5 | 8 |
| | NCC5001, | | | |
| | NCC5000, | | | |
| | NCC5004, | | | |
| | NCC5002 | | | |
| Cluster 6500 | NCC5004, | 1_63, 1_2050, 1_2011 | 3 | 5 |
| | NCC5002, | | | |
| | NCC5003 | | | |
| Cluster 6584 | NCC5000, | 1_318, 1_353, 1_275, 1_1715 | 4 | 7 |
| | NCC5003, | | | |
| | NCC5002, | | | |
| | NCC5004 | | | |
| Cluster 7251 | NCC5001, | 1_1500, 1_587 | 2 | 5 |
| | NCC5000 | | | |
| Cluster 7435 | NCC5002, | 1_1888, 1_220, 1_200, 1_1856, 1_1885 | 5 | 8 |
| | NCC5004, | | | |
| | NCC5001, | | | |
| | NCC5003, | | | |
| | NCC5000 | | | |
| Cluster 7556 | NCC5003, | 1_813, 1_1279, 1_737 | 3 | 6 |
| | NCC5004, | | | |
| | NCC5000 | | | |
| Cluster 7961 | NCC5004, | 1_1102, 1_968, 1_932, 1_1070, 1_992 | 5 | 5 |
| | NCC5002, | | | |
| | NCC5000, | | | |
| | NCC5001, | | | |
| | NCC5003 | | | |
| Cluster 8187 | NCC5001, | 1_2095, 1_15, 1_2049, 1_16, 1_15 | 5 | 8 |
| | NCC5002, | | | |
| | NCC5004, | | | |
| | NCC5003, | | | |
| | NCC5000 | | | |
| Cluster 8251 | NCC5002, | 1_21, 1_2087, 1_51, 1_2013, 1_49 | 5 | 5 |
| | NCC5001, | | | |
| | NCC5003, | | | |
| | NCC5004, | | | |
| | NCC5000 | | | |
| Cluster 8370 | NCC5000, | 1_581, 1_1507 | 2 | 5 |
| | NCC5001 | | | |
| Cluster 8376 | NCC5000, | 1_619, 1_1389, 1_618, 1_1449, 1_699 | 5 | 8 |
| | NCC5004, | | | |
| | NCC5002, | | | |
| | NCC5001, | | | |
| | NCC5003 | | | |
| Cluster 889 | NCC5000, | 1_1563, 1_1585, 1_499, 1_1577 | 4 | 7 |
| | NCC5003, | | | |
| | NCC5004, | | | |
| | NCC5002 | | | |
| Cluster 9183 | NCC5001, | 1_1505, 1_583 | 2 | 5 |
| | NCC5000 | | | |
| Cluster 9218 | NCC5004, | 1_1553, 1_456 | 2 | 5 |
| | NCC5002 | | | |
| Cluster 9634 | NCC5001, | 1_1615, 1_474, 1_553, 1_1534 | 4 | 7 |
| | NCC5002, | | | |
| | NCC5003, | | | |
| | NCC5004 | | | |
| Cluster 980 | NCC5000, | 1_1444, 1_619, 1_1458, 1_1464 | 4 | 7 |
| | NCC5004, | | | |
| | NCC5002, | | | |
| | NCC5003 | | | |

| | Predicted_pro- | | | |
|---|---|---|---|---|
| Gene Cluster | tein_name | Gene_Ontology_terms | EC_number | KEGG_ko |
| Cluster 10535 | | | | |
| Cluster 10742 | | | | |
| Cluster 10783 | | | | ko: K17713 |
| Cluster 10912 | mepA_6 | | | |
| Cluster 10987 | fucU | GO: 0003674, GO: 0003824, GO: 0005488, GO: 0005575, GO: 0005622, | 5.1.3.29 | ko: K02431 |
| | | GO: 0005623, GO: 0005737, GO: 0016853, GO: 0016854, GO: 0016857, | | |
| | | GO: 0030246, GO: 0036094, GO: 0042806, GO: 0044424, GO: 0044464, | | |
| | | GO: 0048029 | | |
| Cluster 12024 | | | 2.7.11.1 | ko: K07154 |
| Cluster 12123 | | | | |
| Cluster 12245 | | | | |
| Cluster 12381 | | | 3.2.1.23 | ko: K01190 |
| Cluster 1274 | | | | |
| Cluster 1378 | cotH | | | ko: K06330 |
| Cluster 13922 | | | 2.1.1.72, | ko: K01153, |
| | | | 3.1.21.3, | ko: K01155, |
| | | | 3.1.21.4 | ko: K03427, |
| | | | | ko: K09384 |
| Cluster 13960 | | | | |
| Cluster 14054 | atpE | GO: 0003674, GO: 0003824, GO: 0005215, GO: 0005575, GO: 0005622, | | ko: K02110 |
| | | GO: 0005623, GO: 0006139, GO: 0006163, GO: 0006164, GO: 0006725, | | |
| | | GO: 0006753, GO: 0006754, GO: 0006793, GO: 0006796, GO: 0006807, | | |
| | | GO: 0006810, GO: 0006811, GO: 0006812, GO: 0008150, GO: 0008152, | | |
| | | GO: 0008324, GO: 0009058, GO: 0009117, GO: 0009123, GO: 0009124, | | |
| | | GO: 0009126, GO: 0009127, GO: 0009141, GO: 0009142, GO: 0009144, | | |
| | | GO: 0009145, GO: 0009150, GO: 0009152, GO: 0009156, GO: 0009161, | | |
| | | GO: 0009165, GO: 0009167, GO: 0009168, GO: 0009199, GO: 0009201, | | |
| | | GO: 0009205, GO: 0009206, GO: 0009259, GO: 0009260, GO: 0009987, | | |
| | | GO: 0015075, GO: 0015077, GO: 0015078, GO: 0015318, GO: 0015399, | | |
| | | GO: 0015405, GO: 0015672, GO: 0015985, GO: 0015986, GO: 0016020, | | |
| | | GO: 0016462, GO: 0016469, GO: 0016787, GO: 0016817, GO: 0016818, | | |
| | | GO: 0016887, GO: 0017111, GO: 0017144, GO: 0018130, GO: 0019438, | | |
| | | GO: 0019637, GO: 0019693, GO: 0019829, GO: 0022804, GO: 0022853, | | |
| | | GO: 0022857, GO: 0022890, GO: 0032991, GO: 0033177, GO: 0034220, | | |
| | | GO: 0034641, GO: 0034654, GO: 0042623, GO: 0042625, GO: 0042626, | | |
| | | GO: 0043492, GO: 0044237, GO: 0044238, GO: 0044249, GO: 0044271, | | |
| | | GO: 0044281, GO: 0044424, GO: 0044425, GO: 0044464, GO: 0044769, | | |
| | | GO: 0045259, GO: 0045263, GO: 0046034, GO: 0046390, GO: 0046483, | | |
| | | GO: 0046933, GO: 0051179, GO: 0051234, GO: 0055085, GO: 0055086, | | |
| | | GO: 0071704, GO: 0072521, GO: 0072522, GO: 0090407, GO: 0090662, | | |
| | | GO: 0098655, GO: 0098660, GO: 0098662, GO: 0098796, GO: 0099131, | | |
| | | GO: 0099132, GO: 1901135, GO: 1901137, GO: 1901293, GO: 1901360, | | |
| | | GO: 1901362, GO: 1901564, GO: 1901566, GO: 1901576, GO: 1902600 | | |
| Cluster 143 | uvrD | | 3.6.4.12 | ko: K03657 |
| Cluster 14471 | | | | |
| Cluster 1456 | | | | |
| Cluster 14959 | mepA | | | ko: K18908 |
| Cluster 1704 | aldH | | 1.2.1.3, | ko: K00128, |
| | | | 1.2.1.5 | ko: K00129 |
| Cluster 2040 | pelG | | | ko: K21012 |
| Cluster 250 | | | | |
| Cluster 2546 | fucA | | 3.2.1.51 | ko: K01206 |
| Cluster 2563 | | | | |
| Cluster 2765 | | | | ko: K02027 |
| Cluster 2801 | | | | ko: K03315 |
| Cluster 2839 | | | | ko: K07133 |
| Cluster 3126 | | | | ko: K02027, |
| | | | | ko: K17329 |
| Cluster 320 | rne | GO: 0006139, GO: 0006364, GO: 0006396, GO: 0006397, GO: 0006725, | 3.1.26.12 | ko: K08300, |
| | | GO: 0006807, GO: 0008150, GO: 0008152, GO: 0009987, GO: 0010467, | | ko: K08301 |
| | | GO: 0016070, GO: 0016071, GO: 0016072, GO: 0022613, GO: 0034470, | | |
| | | GO: 0034641, GO: 0034660, GO: 0042254, GO: 0043170, GO: 0044085, | | |
| | | GO: 0044237, GO: 0044238, GO: 0046483, GO: 0071704, GO: 0071840, | | |
| | | GO: 0090304, GO: 1901360 | | |
| Cluster 3358 | | | 4.2.1.68 | ko: K18334 |
| Cluster 3512 | fucP | | | ko: K02429 |
| Cluster 3753 | | | | |
| Cluster 4705 | | | | |
| Cluster 5109 | purM | GO: 0003674, GO: 0003824, GO: 0004641, GO: 0005575, GO: 0005622, | 6.3.3.1, | ko: K01933, |
| | | GO: 0005623, GO: 0005737, GO: 0005829, GO: 0006139, GO: 0006163, | 6.3.4.13 | ko: K11788 |
| | | GO: 0006164, GO: 0006725, GO: 0006753, GO: 0006793, GO: 0006796, | | |
| | | GO: 0006807, GO: 0008150, GO: 0008152, GO: 0009058, GO: 0009117, | | |
| | | GO: 0009150, GO: 0009152, GO: 0009165, GO: 0009259, GO: 0009260, | | |
| | | GO: 0009987, GO: 0016874, GO: 0016879, GO: 0016882, GO: 0018130, | | |
| | | GO: 0019438, GO: 0019637, GO: 0019693, GO: 0034641, GO: 0034654, | | |
| | | GO: 0044237, GO: 0044238, GO: 0044249, GO: 0044271, GO: 0044281, | | |
| | | GO: 0044424, GO: 0044444, GO: 0044464, GO: 0046390, GO: 0046483, | | |
| | | GO: 0055086, GO: 0071704, GO: 0072521, GO: 0072522, GO: 0090407, | | |
| | | GO: 1901135, GO: 1901137, GO: 1901293, GO: 1901360, GO: 1901362, | | |
| | | GO: 1901564, GO: 1901566, GO: 1901576 | | |
| Cluster 5197 | | | | ko: K02529, |
| | | | | ko: K17640 |
| Cluster 5301 | | | | |
| Cluster 5401 | | | | |
| Cluster 5664 | | | | ko: K02026 |
| Cluster 5716 | | | | ko: K02034, |
| | | | | ko: K15582 |
| Cluster 5827 | | | | ko: K02025, |
| | | | | ko: K10118, |
| | | | | ko: K15771, |
| | | | | ko: K17330 |
| Cluster 6058 | icaR | | | |
| Cluster 6120 | | | | |
| Cluster 6142 | | | | |
| Cluster 6148 | | | | |
| Cluster 6168 | oppD | | | ko: K02031 |
| Cluster 6333 | | | | ko: K02026, |
| | | | | ko: K17331 |
| Cluster 6443 | dapA | | 4.1.2.28, | ko: K01714, |
| | | | 4.3.3.7 | ko: K22397 |
| Cluster 6500 | | | | |
| Cluster 6584 | | | | ko: K02025, |
| | | | | ko: K10118, |
| | | | | ko: K15771 |
| Cluster 7251 | | | | |
| Cluster 7435 | | | | |
| Cluster 7556 | | | | |
| Cluster 7961 | | | 3.4.17.13 | ko: K01297 |
| Cluster 8187 | | | | |
| Cluster 8251 | | | | |
| Cluster 8370 | | GO: 0001775, GO: 0002252, GO: 0002263, GO: 0002274, GO: 0002275, | | |
| | | GO: 0002283, GO: 0002366, GO: 0002376, GO: 0002443, GO: 0002444, | | |
| | | GO: 0002446, GO: 0003674, GO: 0003824, GO: 0004033, GO: 0005575, | | |
| | | GO: 0005622, GO: 0005623, GO: 0005737, GO: 0005829, GO: 0005886, | | |
| | | GO: 0005887, GO: 0006139, GO: 0006725, GO: 0006732, GO: 0006733, | | |
| | | GO: 0006739, GO: 0006753, GO: 0006793, GO: 0006796, GO: 0006807, | | |
| | | GO: 0006810, GO: 0006887, GO: 0006955, GO: 0008076, GO: 0008150, | | |
| | | GO: 0008152, GO: 0009117, GO: 0009898, GO: 0009987, GO: 0010959, | | |
| | | GO: 0012505, GO: 0012506, GO: 0015459, GO: 0016020, GO: 0016021, | | |
| | | GO: 0016192, GO: 0016247, GO: 0016491, GO: 0016614, GO: 0016616, | | |
| | | GO: 0019362, GO: 0019637, GO: 0019897, GO: 0019898, GO: 0030141, | | |
| | | GO: 0030424, GO: 0030659, GO: 0030667, GO: 0031090, GO: 0031224, | | |
| | | GO: 0031226, GO: 0031234, GO: 0031410, GO: 0031982, GO: 0032879, | | |
| | | GO: 0032880, GO: 0032940, GO: 0032991, GO: 0033267, GO: 0034641, | | |
| | | GO: 0034702, GO: 0034703, GO: 0034705, GO: 0034762, GO: 0034765, | | |
| | | GO: 0035579, GO: 0036230, GO: 0042119, GO: 0042581, GO: 0042995, | | |
| | | GO: 0043005, GO: 0043226, GO: 0043227, GO: 0043229, GO: 0043266, | | |
| | | GO: 0043269, GO: 0043299, GO: 0043312, GO: 0044224, GO: 0044237, | | |
| | | GO: 0044238, GO: 0044281, GO: 0044304, GO: 0044422, GO: 0044424, | | |
| | | GO: 0044425, GO: 0044433, GO: 0044444, GO: 0044446, GO: 0044459, | | |
| | | GO: 0044463, GO: 0044464, GO: 0045055, GO: 0045321, GO: 0046483, | | |
| | | GO: 0046496, GO: 0046903, GO: 0050789, GO: 0050794, GO: 0050896, | | |
| | | GO: 0051049, GO: 0051179, GO: 0051186, GO: 0051234, GO: 0055086, | | |
| | | GO: 0055114, GO: 0060341, GO: 0065007, GO: 0065009, GO: 0070820, | | |
| | | GO: 0070821, GO: 0070995, GO: 0071704, GO: 0071944, GO: 0072524, | | |
| | | GO: 0097458, GO: 0097708, GO: 0098552, GO: 0098562, GO: 0098588, | | |
| | | GO: 0098772, GO: 0098796, GO: 0098797, GO: 0098805, GO: 0099106, | | |
| | | GO: 0099503, GO: 0120025, GO: 0120038, GO: 1901360, GO: 1901379, | | |
| | | GO: 1901564, GO: 1902495, GO: 1903827, GO: 1904062, GO: 1990031, | | |
| | | GO: 1990351, GO: 2000008 | | |
| Cluster 8376 | magIII | | | ko: K07457 |
| Cluster 889 | | | 5.1.3.2 | ko: K01784 |
| Cluster 9183 | mug | | 3.2.2.28 | ko: K03575, |
| | | | | ko: K03649 |
| Cluster 9218 | | | | |
| Cluster 9634 | | | | |
| Cluster 980 | | | | |

| Gene Cluster | KEGG_Pathway | KEGG_Module | KEGG_Reaction | KEGG_rclass |
|---|---|---|---|---|
| Cluster 10535 | | | | |
| Cluster 10742 | | | | |
| Cluster 10783 | | | | |
| Cluster 10912 | | | | |
| Cluster 10987 | | | R10764 | RC00563 |
| Cluster 12024 | | | | |
| Cluster 12123 | | | | |
| Cluster 12245 | | | | |
| Cluster 12381 | ko00052, ko00511, | | R01105, R01678, | RC00049, RC00452 |
| | ko00600, ko01100, | | R03355, R04783, | |
| | map00052, map00511, | | R06114 | |
| | map00600, map01100 | | | |
| Cluster 1274 | | | | |
| Cluster 1378 | | | | |
| Cluster 13922 | | | | |
| Cluster 13960 | | | | |
| Cluster 14054 | ko00190, ko00195, | M00157 | | |
| | ko01100, map00190, | | | |
| | map00195, map01100 | | | |
| Cluster 143 | ko03420, ko03430, | | | |
| | map03420, map03430 | | | |
| Cluster 14471 | | | | |
| Cluster 1456 | | | | |
| Cluster 14959 | | M00705 | | |
| Cluster 1704 | ko00010, ko00053, | M00135 | R00264, R00631, | RC00047, RC00071, |
| | ko00071, ko00280, | | R00710, R00711, | RC00080, RC00186, |
| | k000310, ko00330, | | R00904, R01752, | RC00218, RC00242, |
| | ko00340, ko00350, | | R01986, R02536, | RC00816, RC01500, |
| | ko00360, ko00380, | | R02537, R02549, | RC01735 |
| | ko00410, ko00561, | | R02678, R02695, | |
| | ko00620, ko00625, | | R02697, R02940, | |
| | ko00903, k000980, | | R02957, R03283, | |
| | ko00981, ko00982, | | R03300, R03302, | |
| | ko01100, ko01110, | | R03869, R04065, | |
| | ko01120, ko01130, | | R04506, R04882, | |
| | ko05204, map00010, | | R04883, R04888, | |
| | map00053, map00071, | | R04889, R04891, | |
| | map00280, map00310, | | R04892, R04903, | |
| | map00330, map00340, | | R04996, R05050, | |
| | map00350, map00360, | | R05237, R05238, | |
| | map00380, map00410, | | R05286, R06366, | |
| | map00561, map00620, | | R07104, R08146, | |
| | map00625, map00903, | | R08282, R08283, | |
| | map00980, map00981, | | R08307 | |
| | map00982, map01100, | | | |
| | map01110, map01120, | | | |
| | map01130, map05204 | | | |
| Cluster 2040 | ko02025, map02025 | | | |
| Cluster 250 | | | | |
| Cluster 2546 | ko00511, map00511 | | | |
| Cluster 2563 | | | | |
| Cluster 2765 | | M00207 | | |
| Cluster 2801 | | | | |
| Cluster 2839 | | | | |
| Cluster 3126 | ko02010, map02010 | M00207, M00606 | | |
| Cluster 320 | ko03018, map03018 | M00394 | | |
| Cluster 3358 | ko00051, ko01120, | | R03688 | RC00543 |
| | map00051, map01120 | | | |
| Cluster 3512 | | | | |
| Cluster 3753 | | | | |
| Cluster 4705 | | | | |
| Cluster 5109 | ko00230, ko01100, | M00048 | R04144, R04208 | RC00090, RC00166, |
| | ko01110, ko01130, | | | RC01100 |
| | map00230, map01100, | | | |
| | map01110, map01130 | | | |
| Cluster 5197 | | | | |
| Cluster 5301 | | | | |
| Cluster 5401 | | | | |
| Cluster 5664 | | M00207 | | |
| Cluster 5716 | ko01501, ko02010, | M00239, M00439 | | |
| | ko02024, map01501, | | | |
| | map02010, map02024 | | | |
| Cluster 5827 | ko02010, map02010 | M00196, M00207, M00491, M00606 | | |
| Cluster 6058 | | | | |
| Cluster 6120 | | | | |
| Cluster 6142 | | | | |
| Cluster 6148 | | | | |
| Cluster 6168 | ko02024, map02024 | M00239 | | |
| Cluster 6333 | ko02010, map02010 | M00207, M00606 | | |
| Cluster 6443 | ko00040, ko00261, | M00016, M00525, M00526, M00527 | R01782, R10147 | RC00307, RC00572, |
| | ko00300, ko01100, | | | RC03062, RC03063 |
| | k001110, ko01120, | | | |
| | ko01130, ko01230, | | | |
| | map00040, map00261, | | | |
| | map00300, map01100, | | | |
| | map01110, map01120, | | | |
| | map01130, map01230 | | | |
| Cluster 6500 | | | | |
| Cluster 6584 | ko02010, map02010 | M00196, M00207, M00491 | | |
| Cluster 7251 | | | | |
| Cluster 7435 | | | | |
| Cluster 7556 | | | | |
| Cluster 7961 | | | | |
| Cluster 8187 | | | | |
| Cluster 8251 | | | | |
| Cluster 8370 | | | | |
| Cluster 8376 | | | | |
| Cluster 889 | ko00052, ko00520, | M00361, M00362, M00632 | R00291, R02984 | RC00289 |
| | ko01100, map00052, | | | |
| | map00520, map01100 | | | |
| Cluster 9183 | ko03410, map03410 | | | |
| Cluster 9218 | | | | |
| Cluster 9634 | | | | |
| Cluster 980 | | | | |

| Gene Cluster | BRITE | KEGG_TC | CAZy | BiGG_Reaction |
|---|---|---|---|---|
| Cluster 10535 | | | | |
| Cluster 10742 | | | | |
| Cluster 10783 | ko00000, ko02000 | 1.B.33.1 | | |
| Cluster 10912 | | | | |
| Cluster 10987 | ko00000, ko01000 | | | |
| Cluster 12024 | ko00000, ko01000, | | | |
| | ko01001, ko02048 | | | |
| Cluster 12123 | | | | |
| Cluster 12245 | | | | |
| Cluster 12381 | ko00000, ko00001, | | | |
| | ko01000 | | | |
| Cluster 1274 | | | | |
| Cluster 1378 | ko00000 | | | |
| Cluster 13922 | ko00000, ko01000, | | | |
| | ko02048 | | | |
| Cluster 13960 | | | | |
| Cluster 14054 | ko00000, ko00001, | 3.A.2.1 | | |
| | ko00002, ko00194 | | | |
| Cluster 143 | ko00000, ko00001, | | | |
| | ko01000, ko03400 | | | |
| Cluster 14471 | | | | |
| Cluster 1456 | | | | |
| Cluster 14959 | ko00000, ko00002, | 2.A.66.1.13 | | |
| | ko01504, ko02000 | | | |
| Cluster 1704 | ko00000, ko00001, | | | |
| | ko00002, ko01000 | | | |
| Cluster 2040 | ko00000, ko00001 | | | |
| Cluster 250 | | | | |
| Cluster 2546 | ko00000, ko00001, | | GH29 | |
| | ko01000, ko04147 | | | |
| Cluster 2563 | | | | |
| Cluster 2765 | ko00000, ko00002, | 3.A.1.1 | | |
| | ko02000 | | | |
| Cluster 2801 | ko00000, ko02000 | 2.A.35 | | |
| Cluster 2839 | ko00000 | | | |
| Cluster 3126 | ko00000, ko00001, | 3.A.1.1, 3.A.1.1.33 | | |
| | ko00002, | | | |
| | ko02000 | | | |
| Cluster 320 | ko00000, ko00001, | | | |
| | ko00002, ko01000, | | | |
| | k003009, ko03019 | | | |
| Cluster 3358 | ko00000, ko00001, | | | |
| | ko01000 | | | |
| Cluster 3512 | ko00000, ko02000 | 2.A.1.7 | | |
| Cluster 3753 | | | | |
| Cluster 4705 | | | | |
| Cluster 5109 | ko00000, ko00001, | | | iAF987.Gmet_1844, |
| | ko00002, ko01000 | | | iECSF_1327.ECSF_2340 |
| Cluster 5197 | ko00000, ko03000 | | | |
| Cluster 5301 | | | | |
| Cluster 5401 | | | | |
| Cluster 5664 | ko00000, ko00002, | 3.A.1.1 | | |
| | ko02000 | | | |
| Cluster 5716 | ko00000, ko00001, | 3.A.1.5, 3.A.1.5.1, 3.A.1.5.18, 3.A.1.5.19, | | |
| | ko00002, ko02000 | 3.A.1.5.25 | | |
| Cluster 5827 | ko00000, ko00001, | 3.A.1.1, 3.A.1.1.16, 3.A.1.1.2, 3.A.1.1.28, | | |
| | ko00002, ko02000 | 3.A.1.1.33 | | |
| Cluster 6058 | | | | |
| Cluster 6120 | | | | |
| Cluster 6142 | | | | |
| Cluster 6148 | | | | |
| Cluster 6168 | ko00000, ko00001, | 3.A.1.5 | | |
| | ko00002, ko02000 | | | |
| Cluster 6333 | ko00000, ko00001, | 3.A.1.1, 3.A.1.1.33 | | |
| | ko00002, ko02000 | | | |
| Cluster 6443 | ko00000, ko00001, | | | |
| | ko00002, ko01000 | | | |
| Cluster 6500 | | | | |
| Cluster 6584 | ko00000, ko00001, | 3.A.1.1, 3.A.1.1.16, 3.A.1.1.2, 3.A.1.1.28 | | |
| | ko00002, ko02000 | | | |
| Cluster 7251 | | | | |
| Cluster 7435 | | | | |
| Cluster 7556 | | | | |
| Cluster 7961 | ko00000, ko01000, | | | |
| | ko01002, ko01011 | | | |
| Cluster 8187 | | | | |
| Cluster 8251 | | | | |
| Cluster 8370 | | | | |
| Cluster 8376 | ko00000 | | | |
| Cluster 889 | ko00000, ko00001, | | | |
| | ko00002, ko01000 | | | |
| Cluster 9183 | ko00000, ko00001, | | | |
| | ko01000, ko03400 | | | |
| Cluster 9218 | | | | |
| Cluster 9634 | | | | |
| Cluster 980 | | | | |

| Gene Cluster | tax_scope | COG_Functional_Category | eggNOG_free_text_description |
|---|---|---|---|
| Cluster 10535 | Bacteria | | |
| Cluster 10742 | Bacteria | K | Bacterial regulatory proteins, |
| | | | tetR family |
| Cluster 10783 | Bacteria | T | Pfam Adenylate and Guanylate |
| | | | cyclase catalytic domain |
| Cluster 10912 | Bacteria | V | MatE |
| Cluster 10987 | Bacteria | G | RbsD/FucU transport protein |
| | | | family |
| Cluster 12024 | Bacteria | S | HipA-like C-terminal domain |
| Cluster 12123 | Bacteria | | |
| Cluster 12245 | | | |
| Cluster 12381 | Bacteria | G | Domain of unknown function |
| | | | (DUF4982) |
| Cluster 1274 | Bacteria | S | Uncharacterised protein |
| | | | conserved in bacteria |
| | | | (DUF2194) |
| Cluster 1378 | Bacteria | M | CotH kinase protein |
| Cluster 13922 | Bacteria | L | N-6 DNA methylase |
| Cluster 13960 | Bacteria | | |
| Cluster 14054 | Bacteria | C | F(1)F(0) ATP synthase |
| | | | produces ATP from |
| | | | ADP in the presence of |
| | | | a proton or sodium gradient. |
| | | | F-type ATPases consist of |
| | | | two structural domains, |
| | | | F(1) containing the |
| | | | extramembraneous catalytic |
| | | | core and F(0) containing |
| | | | the membrane proton |
| | | | channel, linked together by |
| | | | a central stalk and a |
| | | | peripheral stalk. During |
| | | | catalysis, ATP synthesis |
| | | | in the catalytic domain of |
| | | | F(1) is coupled via a |
| | | | rotary mechanism of the |
| | | | central stalk subunits to |
| | | | proton translocation |
| Cluster 143 | Bacteria | L | PD-(D/E)XK nuclease |
| | | | superfamily |
| Cluster 14471 | | | |
| Cluster 1456 | Bacteria | | |
| Cluster 14959 | Bacteria | V | MatE |
| Cluster 1704 | Bacteria | C | Aldehyde dehydrogenase |
| | | | family |
| Cluster 2040 | Bacteria | S | Putative exopolysaccharide |
| | | | Exporter (EPS-E) |
| Cluster 250 | Bacteria | G | Glycosyl hydrolase family 85 |
| Cluster 2546 | Bacteria | G | Alpha-L-fucosidase |
| Cluster 2563 | Bacteria | T | Forkhead associated domain |
| Cluster 2765 | Bacteria | G | Bacterial extracellular |
| | | | solute-binding protein |
| Cluster 2801 | Bacteria | C | Na H antiporter family |
| | | | protein |
| Cluster 2839 | Bacteria | S | AAA domain |
| Cluster 3126 | Bacteria | G | Bacterial extracellular |
| | | | solute-binding protein |
| Cluster 320 | Bacteria | J | Ribonuclease E/G family |
| Cluster 3358 | Bacteria | M | Enolase C-terminal domain- |
| | | | like |
| Cluster 3512 | Bacteria | G | Major Facilitator Superfamily |
| Cluster 3753 | | | |
| Cluster 4705 | Bacteria | K | Periplasmic binding protein |
| | | | domain |
| Cluster 5109 | Bacteria | F | Phosphoribosylformyl- |
| | | | glycinamidine cyclo-ligase |
| Cluster 5197 | Bacteria | K | Bacterial regulatory proteins, |
| | | | lacI family |
| Cluster 5301 | Bacteria | | |
| Cluster 5401 | | | |
| Cluster 5664 | Bacteria | P | Binding-protein-dependent |
| | | | transport system inner |
| | | | membrane component |
| Cluster 5716 | Bacteria | EP | Binding-protein-dependent |
| | | | transport system inner |
| | | | membrane component |
| Cluster 5827 | Bacteria | U | Binding-protein-dependent |
| | | | transport system inner |
| | | | membrane component |
| Cluster 6058 | Bacteria | K | Bacterial regulatory |
| | | | proteins, tetR family |
| Cluster 6120 | Bacteria | | |
| Cluster 6142 | Bacteria | | |
| Cluster 6148 | | | |
| Cluster 6168 | Bacteria | EP | oligopeptide transport |
| | | | protein of the ABC |
| | | | superfamily, ATP- |
| | | | binding component |
| Cluster 6333 | Bacteria | U | Binding-protein- |
| | | | dependent transport |
| | | | system inner membrane |
| | | | component |
| Cluster 6443 | Bacteria | EM | Dihydrodipicolinate |
| | | | synthetase family |
| Cluster 6500 | Bacteria | | |
| Cluster 6584 | Bacteria | P | Binding-protein- |
| | | | dependent transport |
| | | | system inner membrane |
| | | | component |
| Cluster 7251 | Bacteria | | |
| Cluster 7435 | Bacteria | IQ | KR domain |
| Cluster 7556 | Bacteria | K | TipAS antibiotic- |
| | | | recognition domain |
| Cluster 7961 | Bacteria | E | Rard protein |
| Cluster 8187 | | | |
| Cluster 8251 | Bacteria | S | AAA ATPase domain |
| Cluster 8370 | Bacteria | C | Aldo/keto reductase family |
| Cluster 8376 | Bacteria | L | endonuclease III |
| Cluster 889 | Bacteria | GM | ADP-glyceromanno-heptose |
| | | | 6-epimerase activity |
| Cluster 9183 | Bacteria | L | Uracil DNA glycosylase |
| | | | superfamily |
| Cluster 9218 | Bacteria | T | Forkhead associated domain |
| Cluster 9634 | | | |
| Cluster 980 | Bacteria | G | Glycosyl hydrolase |
| | | | family 20, domain 2 |

TABLE 2
B. longum transitional clade - NCC specific genes

| | | | Presence | Presence in n |
|---|---|---|---|---|
| | | | in n NCC | genomes from |
| gene_cluster | genome | locus_tag | genomes | any clade |
| Cluster 10535 | NCC5001, NCC5000, | 1_1027, 1_983, 1_1011, 1_1056, 1_1038 | 5 | 8 |
| | NCC5002, NCC5004, | | | |
| | NCC5003 | | | |
| Cluster 10742 | NCC5003, NCC5001, | 1_1460, 1_628, 1_1449, 1_623, 1_1439 | 5 | 5 |
| | NCC5002, NCC5004, | | | |
| | NCC5000 | | | |
| Cluster 10912 | NCC5001, NCC5002, | 1_956, 1_1086, 1_1049, 1_981, 1_1113 | 5 | 5 |
| | NCC5000, NCC5004, | | | |
| | NCC5003 | | | |
| Cluster 12123 | NCC5004, NCC5003, | 1_1096, 1_998, 1_1067, 1_971, 1_942 | 5 | 5 |
| | NCC5001, NCC5002, | | | |
| | NCC5000 | | | |
| Cluster 12245 | NCC5002, NCC5001, | 1_1087, 1_955, 1_980, 1_1114, 1_1050 | 5 | 5 |
| | NCC5004, NCC5003, | | | |
| | NCC5000 | | | |
| Cluster 12381 | NCC5002, NCC5001, | 1_568, 1_1520, 1_650, 1_1438, 1_571 | 5 | 5 |
| | NCC5003, NCC5004, | | | |
| | NCC5000 | | | |
| Cluster 1274 | NCC5004, NCC5002, | 1_501, 1_1575, 1 1583, 1_532, 1_1561 | 5 | 5 |
| | NCC5003, NCC5001, | | | |
| | NCC5000 | | | |
| Cluster 1378 | NCC5001, NCC5000, | 1_535, 1_1558, 1_1572, 1_504, 1_1580 | 5 | 5 |
| | NCC5002, NCC5004, | | | |
| | NCC5003 | | | |
| Cluster 13922 | NCC5003, NCC5001, | 1_997, 1_1068, 1_941, 1_970, 1_1097 | 5 | 5 |
| | NCC5000, NCC5002, | | | |
| | NCC5004 | | | |
| Cluster 13960 | NCC5002, NCC5004, | 1_1055, 1_1012, 1_1018, 1_987, 1_1082 | 5 | 8 |
| | NCC5000, NCC5001, | | | |
| | NCC5003 | | | |
| Cluster 14054 | NCC5001, NCC5003, | 1_1835, 1_307, 1_1760, 1_277, 1_238 | 5 | 5 |
| | NCC5004, NCC5000, | | | |
| | NCC5002 | | | |
| Cluster 14471 | NCC5001, NCC5004, | 1_1066, 1_1095, 1_943, 1_999, 1_972 | 5 | 5 |
| | NCC5000, NCC5003, | | | |
| | NCC5002 | | | |
| Cluster 14959 | NCC5004, NCC5002, | 1_1126, 1_942, 1_967, 1_892, 1_1098 | 5 | 8 |
| | NCC5003, NCC5000, | | | |
| | NCC5001 | | | |
| Cluster 1704 | NCC5001, NCC5004, | 1_1519, 1_1437, 1_651, 1_572, 1_569 | 5 | 5 |
| | NCC5003, NCC5000, | | | |
| | NCC5002 | | | |
| Cluster 2040 | NCC5000, NCC5001, | 1_1559, 1_534, 1_503, 1_1581, 1_1573 | 5 | 5 |
| | NCC5004, NCC5003, | | | |
| | NCC5002 | | | |
| Cluster 2563 | NCC5000, NCC5003, | 1_1829, 1_1821, 1_235, 1_257, 1_1852 | 5 | 8 |
| | NCC5001, NCC5004, | | | |
| | NCC5002 | | | |
| Cluster 320 | NCC5004, NCC5003, | 1_226, 1_1850, 1_206, 1_1882, 1_1879 | 5 | 8 |
| | NCC5001, NCC5002, | | | |
| | NCC5000 | | | |
| Cluster 3358 | NCC5001, NCC5003, | 1_199, 1_1857, 1_1886, 1_219, 1_1889 | 5 | 8 |
| | NCC5000, NCC5004, | | | |
| | NCC5002 | | | |
| Cluster 3512 | NCC5001, NCC5003, | 1_201, 1_1855, 1_221, 1_1884, 1_1887 | 5 | 8 |
| | NCC5004, NCC5000, | | | |
| | NCC5002 | | | |
| Cluster 5109 | NCC5004, NCC5002, | 1_1435, 1_571, 1_653, 1_574, 1_1517 | 5 | 8 |
| | NCC5003, NCC5000, | | | |
| | NCC5001 | | | |
| Cluster 5301 | NCC5003, NCC5004, | 1_1000, 1_1094, 1_973, 1_1065, 1_944 | 5 | 5 |
| | NCC5002, NCC5001, | | | |
| | NCC5000 | | | |
| Cluster 5716 | NCC5004, NCC5001, | 1_1488, 1_1574, 1_518, 1_599, 1_521 | 5 | 8 |
| | NCC5002, NCC5003, | | | |
| | NCC5000 | | | |
| Cluster 6148 | NCC5004, NCC5000, | 1_2050, 1_14, 1_15, 1_2096, 1_14 | 5 | 7 |
| | NCC5003, NCC5001, | | | |
| | NCC5002 | | | |
| Cluster 6168 | NCC5003, NCC5002, | 1_600, 1_519, 1_1573, 1_522, 1_1487 | 5 | 8 |
| | NCC5001, NCC5000, | | | |
| | NCC5004 | | | |
| Cluster 6443 | NCC5003, NCC5001, | 1_1853, 1_203, 1_1882, 1_223, 1_1885 | 5 | 8 |
| | NCC5000, NCC5004, | | | |
| | NCC5002 | | | |
| Cluster 7435 | NCC5002, NCC5004, | 1_1888, 1_220, 1_200, 1_1856, 1_1885 | 5 | 8 |
| | NCC5001, NCC5003, | | | |
| | NCC5000 | | | |
| Cluster 7961 | NCC5004, NCC5002, | 1_1102, 1_968, 1_932, 1_1070, 1_992 | 5 | 5 |
| | NCC5000, NCC5001, | | | |
| | NCC5003 | | | |
| Cluster 8187 | NCC5001, NCC5002, | 1_2095, 1_15, 1_2049, 1_16, 1_15 | 5 | 8 |
| | NCC5004, NCC5003, | | | |
| | NCC5000 | | | |
| Cluster 8251 | NCC5002, NCC5001, | 1_21, 1_2087, 1_51, 1_2013, 1_49 | 5 | 5 |
| | NCC5003, NCC5004, | | | |
| | NCC5000 | | | |
| Cluster 8376 | NCC5000, NCC5004, | 1_619, 1_1389, 1_618, 1_1449, 1_699 | 5 | 8 |
| | NCC5002, NCC5001, | | | |
| | NCC5003 | | | |

| | Predicted | | | |
|---|---|---|---|---|
| | protein | | | |
| gene cluster | name | Gene Ontology terms | EC number | KEGG ko |
| Cluster 10535 | | | | |
| Cluster 10742 | | | | |
| Cluster 10912 | mepA_6 | | | |
| Cluster 12123 | | | | |
| Cluster 12245 | | | | |
| Cluster 12381 | | | 3.2.1.23 | ko: K01190 |
| Cluster 1274 | | | | |
| Cluster 1378 | cotH | | | ko: K06330 |
| Cluster 13922 | | | 2.1.1.72, 3.1.21.3, | ko: K01153, ko: |
| | | | 3.1.21.4 | K01155, ko: K03427, |
| | | | | ko: K09384 |
| Cluster 13960 | | | | |
| Cluster 14054 | atpE | GO: 0003674, GO: 0003824, GO: 0005215, GO: 0005575, | | ko: K02110 |
| | | GO: 0005622, GO: 0005623, GO: 0006139, GO: 0006163, | | |
| | | GO: 0006164, GO: 0006725, GO: 0006753, GO: 0006754, | | |
| | | GO: 0006793, GO: 0006796, GO: 0006807, GO: 0006810, | | |
| | | GO: 0006811, GO: 0006812, GO: 0008150, GO: 0008152, | | |
| | | GO: 0008324, GO: 0009058, GO: 0009117, GO: 0009123, | | |
| | | GO: 0009124, GO: 0009126, GO: 0009127, GO: 0009141, | | |
| | | GO: 0009142, GO: 0009144, GO: 0009145, GO: 0009150, | | |
| | | GO: 0009152, GO: 0009156, GO: 0009161, GO: 0009165, | | |
| | | GO: 0009167, GO: 0009168, GO: 0009199, GO: 0009201, | | |
| | | GO: 0009205, GO: 0009206, GO: 0009259, GO: 0009260, | | |
| | | GO: 0009987, GO: 0015075, GO: 0015077, GO: 0015078, | | |
| | | GO: 0015318, GO: 0015399, GO: 0015405, GO: 0015672, | | |
| | | GO: 0015985, GO: 0015986, GO: 0016020, GO: 0016462, | | |
| | | GO: 0016469, GO: 0016787, GO: 0016817, GO: 0016818, | | |
| | | GO: 0016887, GO: 0017111, GO: 0017144, GO: 0018130, | | |
| | | GO: 0019438, GO: 0019637, GO: 0019693, GO: 0019829, | | |
| | | GO: 0022804, GO: 0022853, GO: 0022857, GO: 0022890, | | |
| | | GO: 0032991, GO: 0033177, GO: 0034220, GO: 0034641, | | |
| | | GO: 0034654, GO: 0042623, GO: 0042625, GO: 0042626, | | |
| | | GO: 0043492, GO: 0044237, GO: 0044238, GO: 0044249, | | |
| | | GO: 0044271, GO: 0044281, GO: 0044424, GO: 0044425, | | |
| | | GO: 0044464, GO: 0044769, GO: 0045259, GO: 0045263, | | |
| | | GO: 0046034, GO: 0046390, GO: 0046483, GO: 0046933, | | |
| | | GO: 0051179, GO: 0051234, GO: 0055085, GO: 0055086, | | |
| | | GO: 0071704, GO: 0072521, GO: 0072522, GO: 0090407, | | |
| | | GO: 0090662, GO: 0098655, GO: 0098660, GO: 0098662, | | |
| | | GO: 0098796, GO: 0099131, GO: 0099132, GO: 1901135, | | |
| | | GO: 1901137, GO: 1901293, GO: 1901360, GO: 1901362, | | |
| | | GO: 1901564, GO: 1901566, GO: 1901576, GO: 1902600 | | |
| Cluster 14471 | | | | |
| Cluster 14959 | mepA | | | ko: K18908 |
| Cluster 1704 | aldH | | 1.2.1.3, 1.2.1.5 | ko: K00128, ko: |
| | | | | K00129 |
| Cluster 2040 | pelG | | | ko: K21012 |
| Cluster 2563 | | | | |
| Cluster 320 | rne | GO: 0006139, GO: 0006364, GO: 0006396, GO: 0006397, | 3.1.26.12 | ko: K08300, ko: |
| | | GO: 0006725, GO: 0006807, GO: 0008150, GO: 0008152, | | K08301 |
| | | GO: 0009987, GO: 0010467, GO: 0016070, GO: 0016071, | | |
| | | GO: 0016072, GO: 0022613, GO: 0034470, GO: 0034641, | | |
| | | GO: 0034660, GO: 0042254, GO: 0043170, GO: 0044085, | | |
| | | GO: 0044237, GO: 0044238, GO: 0046483, GO: 0071704, | | |
| | | GO: 0071840, GO: 0090304, GO: 1901360 | | |
| Cluster 3358 | | | 4.2.1.68 | ko: K18334 |
| Cluster 3512 | fucP | | | ko: K02429 |
| Cluster 5109 | purM | GO: 0003674, GO: 0003824, GO: 0004641, GO: 0005575, | 6.3.3.1, 6.3.4.13 | ko: K01933, ko: |
| | | GO: 0005622, GO: 0005623, GO: 0005737, GO: 0005829, | | K11788 |
| | | GO: 0006139, GO: 0006163, GO: 0006164, GO: 0006725, | | |
| | | GO: 0006753, GO: 0006793, GO: 0006796, GO: 0006807, | | |
| | | GO: 0008150, GO: 0008152, GO: 0009058, GO: 0009117, | | |
| | | GO: 0009150, GO: 0009152, GO: 0009165, GO: 0009259, | | |
| | | GO: 0009260, GO: 0009987, GO: 0016874, GO: 0016879, | | |
| | | GO: 0016882, GO: 0018130, GO: 0019438, GO: 0019637, | | |
| | | GO: 0019693, GO: 0034641, GO: 0034654, GO: 0044237, | | |
| | | GO: 0044238, GO: 0044249, GO: 0044271, GO: 0044281, | | |
| | | GO: 0044424, GO: 0044444, GO: 0044464, GO: 0046390, | | |
| | | GO: 0046483, GO: 0055086, GO: 0071704, GO: 0072521, | | |
| | | GO: 0072522, GO: 0090407, GO: 1901135, GO: 1901137, | | |
| | | GO: 1901293, GO: 1901360, GO: 1901362, GO: 1901564, | | |
| | | GO: 1901566, GO: 1901576 | | |
| Cluster 5301 | | | | |
| Cluster 5716 | | | | ko: K02034, ko: |
| | | | | K15582 |
| Cluster 6148 | | | | |
| Cluster 6168 | oppD | | | ko: K02031 |
| Cluster 6443 | dapA | | 4.1.2.28, 4.3.3.7 | ko: K01714, ko: |
| | | | | K22397 |
| Cluster 7435 | | | | |
| Cluster 7961 | | | 3.4.17.13 | ko: K01297 |
| Cluster 8187 | | | | |
| Cluster 8251 | | | | |
| Cluster 8376 | magIII | | | ko: K07457 |

| gene_cluster | KEGG_Pathway | KEGG_Module | KEGG_Reaction | KEGG_rclass |
|---|---|---|---|---|
| Cluster 10535 | | | | |
| Cluster 10742 | | | | |
| Cluster 10912 | | | | |
| Cluster 12123 | | | | |
| Cluster 12245 | | | | |
| Cluster 12381 | ko00052, ko00511, ko00600, | | R01105, R01678, R03355, | RC00049, RC00452 |
| | ko01100, map00052, map00511, | | R04783, R06114 | |
| | map00600, map01100 | | | |
| Cluster 1274 | | | | |
| Cluster 1378 | | | | |
| Cluster 13922 | | | | |
| Cluster 13960 | | | | |
| Cluster 14054 | ko00190, ko00195, ko01100, | M00157 | | |
| | map00190, map00195, | | | |
| | map01100 | | | |
| Cluster 14471 | | | | |
| Cluster 14959 | | M00705 | | |
| Cluster 1704 | ko00010, ko00053, ko00071, | M00135 | R00264, R00631, R00710, | RC00047, RC00071, |
| | ko00280, ko00310, ko00330, | | R00711, R00904, R01752, | RC00080, RC00186, |
| | ko00340, ko00350, k000360, | | R01986, R02536, R02537, | RC00218, RC00242, |
| | ko00380, ko00410, ko00561, | | R02549, R02678, R02695, | RC00816, RC01500, |
| | ko00620, ko00625, ko00903, | | R02697, R02940, R02957, | RC01735 |
| | ko00980, ko00981, ko00982, | | R03283, R03300, R03302, | |
| | ko01100, ko01110, ko01120, | | R03869, R04065, R04506, | |
| | ko01130, ko05204, map00010, | | R04882, R04883, R04888, | |
| | map00053, map00071, map00280, | | R04889, R04891, R04892, | |
| | map00310, map00330, map00340, | | R04903, R04996, R05050, | |
| | map00350, map00360, map00380, | | R05237, R05238, R05286, | |
| | map00410, map00561, map00620, | | R06366, R07104, R08146, | |
| | map00625, map00903, map00980, | | R08282, R08283, R08307 | |
| | map00981, map00982, map01100, | | | |
| | map01110, map01120, map01130, | | | |
| | map05204 | | | |
| Cluster 2040 | ko02025, map02025 | | | |
| Cluster 2563 | | | | |
| Cluster 320 | ko03018, map03018 | M00394 | | |
| Cluster 3358 | ko00051, ko01120, map00051, | | R03688 | RC00543 |
| | map01120 | | | |
| Cluster 3512 | | | | |
| Cluster 5109 | ko00230, ko01100, ko01110, | M00048 | R04144, R04208 | RC00090, RC00166, |
| | ko01130, map00230, map01100, | | | RC01100 |
| | map01110, map01130 | | | |
| Cluster 5301 | | | | |
| Cluster 5716 | ko01501, ko02010, ko02024, | M00239, M00439 | | |
| | map01501, map02010, map02024 | | | |
| Cluster 6148 | | | | |
| Cluster 6168 | ko02024, map02024 | M00239 | | |
| Cluster 6443 | ko00040, ko00261, ko00300, | M00016, M00525, M00526, M00527 | R01782, R10147 | RC00307, RC00572, |
| | ko01100, ko01110, ko01120, | | | RC03062, RC03063 |
| | ko01130, ko01230, map00040, | | | |
| | map00261, map00300, map01100, | | | |
| | map01110, map01120, map01130, | | | |
| | map01230 | | | |
| Cluster 7435 | | | | |
| Cluster 7961 | | | | |
| Cluster 8187 | | | | |
| Cluster 8251 | | | | |
| Cluster 8376 | | | | |

| gene cluster | BRITE | KEGG TC | CAZy | BiGG Reaction |
|---|---|---|---|---|
| Cluster 10535 | | | | |
| Cluster 10742 | | | | |
| Cluster 10912 | | | | |
| Cluster 12123 | | | | |
| Cluster 12245 | | | | |
| Cluster 12381 | ko00000, ko00001, ko01000 | | | |
| Cluster 1274 | | | | |
| Cluster 1378 | ko00000 | | | |
| Cluster 13922 | ko00000, ko01000, ko02048 | | | |
| Cluster 13960 | | | | |
| Cluster 14054 | ko00000, ko00001, ko00002, | 3.A.2.1 | | |
| | ko00194 | | | |
| Cluster 14471 | | | | |
| Cluster 14959 | ko00000, ko00002, ko01504, | 2.A.66.1.13 | | |
| | ko02000 | | | |
| Cluster 1704 | ko00000, ko00001, ko00002, | | | |
| | ko01000 | | | |
| Cluster 2040 | ko00000, ko00001 | | | |
| Cluster 2563 | | | | |
| Cluster 320 | ko00000, ko00001, ko00002, | | | |
| | ko01000, ko03009, ko03019 | | | |
| Cluster 3358 | ko00000, ko00001, ko01000 | | | |
| Cluster 3512 | ko00000, ko02000 | 2.A.1.7 | | |
| Cluster 5109 | ko00000, ko00001, ko00002, | | | iAF987.Gmet_1844, |
| | ko01000 | | | iECSF_1327.ECSF |
| | | | | 2340 |
| Cluster 5301 | | | | |
| Cluster 5716 | ko00000, ko00001, ko00002, | 3.A.1.5, 3.A.1.5.1, 3.A.1.5.18, | | |
| | ko02000 | 3.A.1.5.19, 3.A.1.5.25 | | |
| Cluster 6148 | | | | |
| Cluster 6168 | ko00000, ko00001, ko00002, | 3.A.1.5 | | |
| | ko02000 | | | |
| Cluster 6443 | ko00000, ko00001, ko00002, | | | |
| | ko01000 | | | |
| Cluster 7435 | | | | |
| Cluster 7961 | ko00000, ko01000, ko01002, | | | |
| | ko01011 | | | |
| Cluster 8187 | | | | |
| Cluster 8251 | | | | |
| Cluster 8376 | ko00000 | | | |

| gene_cluster | tax_scope | COG_Functional_Category | eggNOG_free_text_description |
|---|---|---|---|
| Cluster 10535 | Bacteria | | |
| Cluster 10742 | Bacteria | K | Bacterial regulatory |
| | | | proteins, tetR family |
| Cluster 10912 | Bacteria | V | MatE |
| Cluster 12123 | Bacteria | | |
| Cluster 12245 | | | |
| Cluster 12381 | Bacteria | G | Domain of unknown |
| | | | function (DUF4982) |
| Cluster 1274 | Bacteria | S | Uncharacterised |
| | | | protein conserved in |
| | | | bacteria (DUF2194) |
| Cluster 1378 | Bacteria | M | CotH kinase protein |
| Cluster 13922 | Bacteria | L | N-6 DNA methylase |
| Cluster 13960 | Bacteria | | |
| Cluster 14054 | Bacteria | C | F(1)F(0) ATP |
| | | | synthase produces |
| | | | ATP from ADP in the |
| | | | presence of a proton |
| | | | or sodium gradient. F- |
| | | | type ATPases consist |
| | | | of two structural |
| | | | domains, F(1) |
| | | | containing the |
| | | | extramembraneous |
| | | | catalytic core and F(0) |
| | | | containing the |
| | | | membrane proton |
| | | | channel, linked |
| | | | together by a central |
| | | | stalk and a peripheral |
| | | | stalk. During |
| | | | catalysis, ATP |
| | | | synthesis in the |
| | | | catalytic domain of |
| | | | F(1) is coupled via a |
| | | | rotary mechanism of |
| | | | the central stalk |
| | | | subunits to proton |
| | | | translocation |
| Cluster 14471 | | | |
| Cluster 14959 | Bacteria | V | MatE |
| Cluster 1704 | Bacteria | C | Aldehyde |
| | | | dehydrogenase family |
| Cluster 2040 | Bacteria | S | Putative |
| | | | exopolysaccharide |
| | | | Exporter (EPS-E) |
| Cluster 2563 | Bacteria | T | Forkhead associated |
| | | | domain |
| Cluster 320 | Bacteria | J | Ribonuclease E/G |
| | | | family |
| Cluster 3358 | Bacteria | M | Enolase C-terminal |
| | | | domain-like |
| Cluster 3512 | Bacteria | G | Major Facilitator |
| | | | Superfamily |
| Cluster 5109 | Bacteria | F | Phosphoribosylformyl |
| | | | glycinamidine cyclo- |
| | | | ligase |
| Cluster 5301 | Bacteria | | |
| Cluster 5716 | Bacteria | EP | Binding-protein- |
| | | | dependent transport |
| | | | system inner |
| | | | membrane component |
| Cluster 6148 | | | |
| Cluster 6168 | Bacteria | EP | oligopeptide transport |
| | | | protein of the ABC |
| | | | superfamily, ATP- |
| | | | binding component |
| Cluster 6443 | Bacteria | EM | Dihydrodipicolinate |
| | | | synthetase family |
| Cluster 7435 | Bacteria | IQ | KR domain |
| Cluster 7961 | Bacteria | E | Rard protein |
| Cluster 8187 | | | |
| Cluster 8251 | Bacteria | S | AAA ATPase domain |
| Cluster 8376 | Bacteria | L | endonuclease III |

### Example 6—B. longum Transitional Clade MAGs

[0287] SEQ ID NOs 1-4010 set forth B. longum transitional clade MAGs from stool samples from various subject at various times from the Dhaka cohort and used in the Examples herein. Table 3 below summarizes the sequences provided in SEQ ID NOs. 1-4010.

[0288] Multiple MAGs were obtained for each MAG ID. The corresponding sequences of the multiple MAGs for each MAG TD is provided in Table 3. Further, each unique MAG is identified in the sequence listing, which is incorporated by reference, by a unique and arbitrary identifier, “MAG No.” This information is provided in the description of each sequence within the sequence listing. For example, SEQ TD NO: 1 has the description of “MAG 02-MAG No. k141_188”.

TABLE 3
Sequence Listing Information

| MAG ID or | SEQ ID | Species | |
|---|---|---|---|
| Deposit ID | NOs | Description | Subspecies or clade |
| R30_18m | 1-55 | B. Longum | Transitional clade |
| R206_24m | 56-165 | B. Longum | Transitional clade |
| R101_18m | 166-311 | B. Longum | Transitional clade |
| R42_10m | 312-393 | B. Longum | Transitional clade |
| R14_15m | 394-587 | B. Longum | Transitional clade |
| R14_18m | 588-746 | B. Longum | Transitional clade |
| R48_24m | 747-897 | B. Longum | Transitional clade |
| R117_24m | 898-1037 | B. Longum | Transitional clade |
| R13_10m | 1038-1106 | B. Longum | Transitional clade |
| R81_24m | 1107-1259 | B. Longum | Transitional clade |
| R157_18m | 1260-1374 | B. Longum | Transitional clade |
| R257_15m | 1375-1535 | B. Longum | Transitional clade |
| R221_24m | 1536-1682 | B. Longum | Transitional clade |
| R125_18m | 1683-1908 | B. Longum | Transitional clade |
| R17_18m | 1909-2082 | B. Longum | Transitional clade |
| R51_24m | 2083-2257 | B. Longum | Transitional clade |
| R119_18m | 2258-2345 | B. Longum | Transitional clade |
| R50_10m | 2346-2576 | B. Longum | Transitional clade |
| R222_15m | 2577-2627 | B. Longum | Transitional clade |
| R36_18m | 2628-2904 | B. Longum | Transitional clade |
| R19_24m | 2905-3089 | B. Longum | Transitional clade |
| R215_18m | 3090-3147 | B. Longum | Transitional clade |
| R53_2m | 3148-3282 | B. Longum | Transitional clade |
| R151_18m | 3283-3459 | B. Longum | Transitional clade |
| R85_18m | 3460-3677 | B. Longum | Transitional clade |
| R150_10m | 3678-3752 | B. Longum | Transitional clade |
| R35_2m | 3753-3865 | B. Longum | Transitional clade |
| R22_24m | 3866-4010 | B. Longum | Transitional clade |

### Example 7—B. longum Transitional Cade Strains

[0289] Newly described B. longum strains were isolated from the feces of breast-fed infants using Eugon Tomato Agar (ETA). Obtained isolates were sequenced using PacBio to obtain a fully closed assembled genome for each of the strain. Each strain was deposited in the internal Nestle Culture Collection (NCC, Lausanne, Switzerland) and at the Collection Nationale de Microorganisms (CNCM) at the Pasteur Institute (Paris, France) on May 11, 2021 together with their genome sequence data. The genome of the strains was compared by Average Nucleotide Identity (ANI) using OrthoAni (https://www.ezbiocloud.net/tools/orthoani) to other publicly available genomes representing the overall diversity of the B. longum species (Table 4), and to the Metagenomic Assembled Genomes (MAG) obtained from metagenomic sequences issued from infant feces of the same cohort.

[0290] The analysis demonstrates that the newly described strains group together with the MAGs obtained from the same cohort, defining a well delineated clade belonging to the B. longum species. Two previously isolated strains BSM11-5 and 3_mod are found to be grouped within this newly described clade. The clade is genetically different from B. longum subspecies longum (96.40% ANI) subspecies. The clade is related, while still clearly distinct, to B. longum subspecies. suis suillum (98.207%), and to the group of strains (JDM301, CMCC_P0001 and BXY01) previously suggested to be a new B. longum subspecies (O'Callaghan et al. 2015), sharing an identity of 98.260% to this group of strains.

[0291] FIG. 38 shows Average Nucleotide Identity (ANI) UPGMA based phylogenetic tree. The scale represents the percentage (%) of identity at each branch point.

TABLE 4
List of genomes used for Average Nucleotide Identity (ANI) analysis
and their publicly available references. (T) stands for typestrain.

| | Strain number | Nestlé Culture | |
|---|---|---|---|
| | (CNCM | Collection | |
| | Accession/Registration | internal | Genome |
| Taxonomy | Number) | number | reference |
| B. longum | CNCM I-5683 | NCC 5000 | Available at the |
| | | | CNCM |
| B. longum | CNCM I-5684 | NCC 5001 | Available at the |
| | | | CNCM |
| B. longum | CNCM I-5685 | NCC 5002 | Available at the |
| | | | CNCM |
| B. longum | CNCM I-5686 | NCC 5003 | Available at the |
| | | | CNCM |
| B. longum | CNCM I-5687 | NCC 5004 | Available at the |
| | | | CNCM |
| B. longum subsp. suis | BSM11-5 | NA | GCF_001870705.1 |
| B. longum subsp. infantis | 3_mod | NA | GCF_902167615.1 |
| B. longum subsp. longum | JDM301 | NA | CP002010 |
| B. longum | BXY01 | NA | GCF_000730205.1 |
| B. longum subsp. longum | CMCC_P0001 | NA | GCF_000410595.1 |
| B. longum subsp suillum | SU-851 | NA | GCF_016882605.1 |
| B. longum subsp suillum | JCM19995 (T) | NCC 3079 | GCF_017132755 |
| B. longum subsp. suis | 2074B | NA | GCF_016759645.1 |
| B. longum subsp. suis | Su859 (T) | NA | GCF_900103055.1 |
| B. longum subsp. suis | DSM-20211 (T) | NA | GCF_000771285.1 |
| B. longum subsp. suis | LMG_21814 (T) | NA | GCF_000741625.1 |
| B. longum subsp. suis | 209B | NA | GCF_016759725.1 |
| B. longum subsp. suis | UMA026 | NA | PHUM01000001 |
| B. longum subsp. suis | AGR2137 | NA | GCF_000421385.1 |
| B. longum subsp. longum | NCC 2075 | NCC 2705 | GCF_000007525.1 |
| B. longum subsp. longum | DJO10A | NA | GCF_000008945.1 |
| B. longum subsp. longum | 157F | NA | GCF_000196575.1 |
| B. longum subsp. longum | DSM_20219 (T) | NA | GCF_900104835.1 |
| B. longum subsp. longum | JCM_1217 | NA | GCF_000196555.1 |
| B. longum subsp infantis | ATCC_15697 (T) | NA | JDTT01000001 |
| B. longum subsp infantis | Bi-26 | NA | GCF_004919065.2 |
| B. longum subsp infantis | JCM_11347 | NA | CP062951 |

[0292] All strains retrieved from the Nestle Culture Collection (Table 5) were reactivated from a freeze-dried stock, using two successive culturing steps (16 h, 37° C., anaerobiosis) in MRS supplemented with 0.05% cysteine (MRSc). Reactivated cultures were then centrifuged, washed, and resuspended in 1 volume of PBS. Washed cells were used to inoculate MRS based medium without a carbon source (MRSc-C) (10 g 1-1 of bacto proteose peptone n° 3, 5 g 1-1 bacto yeast extract, 1 g 1-1 Tween 80, 2 g 1-1 di-ammonium hydrogen citrate, 5 g 1-1 sodium acetate, 0.1 g 1-1 magnesium sulphate, 0.05 g 1-1 manganese sulfate, 2 g 1-1 di-sodium phosphate, 0.5 g 1-1 cysteine) in which different carbohydrates were added (0.3% for FIG. 37 and 0.5% for FIG. 38). Growth was then performed in a 96 well microplate, with a volume of 200 μl per well. Incubation was performed in anaerobiosis for 48 h, and optical density was measured in a spectrophotometer at 600 nm.

TABLE 5
List of the strains (and corresponding
numbers) used for the growth studies

| | Internationally | Nestlé Culture |
|---|---|---|
| | recognized | Collection |
| Taxonomy | deposit number | internal number |
| Bifidobacterium longum | ATCC 27533 (T) | NCC 295 |
| subsp. suis | | |
| Bifidobacterium longum | LMG 30662 (T) | NCC 3079 |
| subsp. suillum | | |
| Bifidobacterium longum | CNCM I-5683 | NCC 5000 |
| Bifidobacterium longum | CNCM I-5684 | NCC 5001 |
| Bifidobacterium longum | CNCM I-5685 | NCC 5002 |
| Bifidobacterium longum | CNCM I-5686 | NCC 5003 |
| Bifidobacterium longum | CNCM I-5687 | NCC 5004 |

[0293] Genome sequences for B. longum transitional strains NCC 5000 (CNCM I-5683), NCC 5001 (CNCM I-5684), NCC 5002 (CNCM I-5685), NCC 5003 (CNCM I-5686) and NCC 5004 (CNCM I-5687) are also available via Joint Genome Project (JGI) Study number: Gs0156595 (https://genome.jgi.doe.gov/portal/). Analysis project numbers for each genome are as in Table 6.

TABLE 6
JGI Study ID Nos. for B. longum strains

| | |
|---|---|
| B. longum NCC 5000 (CNCM I-5683) | Ga0527908 |
| B. longum NCC 5001 (CNCM I-5684) | Ga0529016 |
| B. longum NCC 5002 (CNCM I-5685) | Ga0529017 |
| B. longum NCC 5003 (CNCM I-5686) | Ga0529018 |
| B. longum NCC 5004 (CNCM I-5687) | Ga0529019 |

[0294] In FIG. 37, strains were grown in a mixture of HMO representing a median of the concentration found in human breast milk between 3 weeks and 6 months after birth (Table 7) (Lefebvre et al 2020; Austin et al. 2016). As control, strains were grown in MRSc-C without any sugar addition (blank) and in 0.3% of glucose. While all tested strains produced a cell density close to 1 in glucose, it was different regarding growth on human milk derived carbohydrates. Results show that the newly described B. longum strains could all grew on the carbohydrates derived from human milk, while strain belonging to the closest genetic relative subspecies (B. longum subspecies suis & B. longum subspecies suillum) did not.

TABLE 7
HMO mixture representing the median concentrations found
in human breast milk between 3 weeks and 6 months after
birth (Lefebvre et al 2020; Austin et al. 2016)

| Human Milk | | |
|---|---|---|
| Oligosaccharides | Abbreviation | Concentration mg/L |
| 2′-O-Fucosyllactose | 2′FL | 1624 |
| Difucosyllactose | DFL | 235 |
| Lacto-N-Tetraose | LNT | 508 |
| 6′-Sialyllactose | 6′SL | 160 |
| 3′-Sialyllactose | 3′SL | 113 |
| 3-Fucosyllactose | 3-FL | 782 |
| Lacto-N-neotetraose | LNnT | 93 |

[0295] In FIG. 38 strains were grown in commercially available fructo-oligosaccharide (FOS) fibers (NutraFlora FOS [Ingredion Korea Inc, Gyunggi-do, Korea]; Orafti P95 [BENEO GmbH, Mannheim, Germany]), at a final concentration of 0.5%. As control, strains were grown in MRSc-C without any sugar addition and in 0.5% of glucose. All tested strains grew in glucose, producing a final optical density of 1 and above. All the newly described B. longum strains could grow well on the two commercial FOS. Out of the two strains belonging to the closest genetic relative subspecies, B. longum subspecies suis ATCC 27533 (T) grew relatively well on both FOS substrates, while B. longum subspecies suillum LMG 30662 (T) did not, especially on the NutraFlora fiber (FIG. 38). It is interesting to observe that all newly described B. longum strains were growing on FOS at a ratio close to that of glucose, while the B. longum subspecies suillum LMG 30662 (T) did show a preference for glucose (FIG. 39).

[0296] Various modifications and variations of the described methods, pharmaceutical compositions, and kits of the invention will be apparent to those skilled in the art without departing from the scope and spirit of the invention. Although the invention has been described in connection with specific embodiments, it will be understood that it is capable of further modifications and that the invention as claimed should not be unduly limited to such specific embodiments. Indeed, various modifications of the described modes for carrying out the invention that are obvious to those skilled in the art are intended to be within the scope of the invention. This application is intended to cover any variations, uses, or adaptations of the invention following, in general, the principles of the invention and including such departures from the present disclosure come within known customary practice within the art to which the invention pertains and may be applied to the essential features herein before set forth.

What is claimed is:

1. A synthetic formulation comprising:
one or more Bifidobacterium longum (B. longum) transitional clade microorganisms which has at least 98.6% Average Nucleotide Identity (ANI) with at least one strain selected in the group consisting of: CNCM I-5683, CNCM I-5684, CNCM I-5685, CNCM I-5686 and CNCM I-5687.

2. A synthetic formulation of claim 1 comprising one or more Bifidobacterium longum (B. longum) transitional clade microorganisms characterized by the presence of all genes from Table 1.

3. A synthetic formulation comprising one or more Bifidobacterium longum (B. longum) transitional clade microorganisms characterized by the presence of all genes from Table 2.

4. The synthetic formulation of any one of claims 1-3, wherein the one or more B. longum transitional clade microorganisms is not of the subspecies B. longum subspecies longum or B. longum subspecies infantis.

5. The synthetic formulation of any one of claims 1-4, wherein the one or more B. longum transitional clade microorganisms are isolated from a human.

6. The synthetic formulation of any one of claims 1-5, further comprising a fat source, a protein source, a carbohydrate source, a dietary fiber source, or a combination thereof.

7. The synthetic formulation of claim 7, wherein the fat source is a milk derived fat source or equivalent thereof, wherein the protein source is a milk derived protein source or equivalent thereof, and/or wherein the carbohydrate source is a milk derived carbohydrate source or equivalent thereof.

8. The synthetic formulation of any one of claims 6-7, wherein the dietary fiber is a prebiotic fiber.

9. The synthetic formulation of claim 8, wherein the one or more B. longum microorganisms are associated with the prebiotic fiber.

10. The synthetic formulation of any one of claims 6-9, wherein the synthetic formulation is a milk fortifier or milk replacement.

11. The synthetic formulation of any one of claims 6-10, wherein the synthetic formulation is adapted for infant and/or young child use.

12. A genetically modified microorganism or population thereof, wherein the genetically modified microorganism is not of a Bifidobacterium longum transitional clade and is genetically modified to comprise modified expression of one or more genes from Table 1.

13. A synthetic formulation comprising the genetically modified microorganism or population thereof of claim 12.

14. A method for, in an infant, promoting/assisting transition from a milk-based diet to solid food and/or promoting gut microbiota adapted to metabolize both milk derived carbohydrates and fibers or any derivative thereof comprising:
administering a synthetic formulation of any one of claims 1-11 or 13 to the infant and/or young child.

15. A method for promoting/assisting transition from a milk-based diet to solid food and/or promoting gut microbiota adapted to metabolize both milk derived carbohydrates and fibers or a derivative thereof in an infant and/or young child comprising:
administering, to the infant and/or young child, one or more Bifidobacterium longum (B. longum) transitional clade microorganism which has at least 98.6 Average Nucleotide Identify (ANI) with at least one strain selected in the group consisting of: CNCM I-5683, CNCM I-5684, CNCM I-5685, CNCM I-5686 and CNCM I-5687.

16. The method of claim 15, wherein the one or more Bifidobacterium longum (B. longum) microorganisms characterized by the presence of all genes from Table 1.

17. The method of any one of claims 15-16, wherein the one or more B. longum microorganisms is not of the subspecies B. longum subsp. longum or B. longum subsp. Infantis.

18. The method of any one of claims 15-17, wherein the one or more B. longum microorganisms are isolated from a human.

19. A method of identifying a gastrointestinal microbiome modulating agent comprising:
administering an amount of a test agent to a subject; and
determining a microbiome structure of a gastrointestinal tract of the subject by at least determining the relative abundance of one or more one or more Bifidobacterium longum (B. longum) microorganisms characterized by at least 98.6% Average Nucleotide identity (ANI) with at least one strain selected in the group consisting of: CNCM I-5683, CNCM I-5684, CNCM I-5685, CNCM I-5686 and CNCM I-5687,
wherein the gastrointestinal microbiome modulating agent is effective to increase or decrease the relative abundance of one or more of the one or more B. longum microorganism characterized by the presence of the B. longum transitional clade genes.

20. The method of claim 19, wherein the one or more B. longum microorganisms is characterized by the presence of all genes from Table 1.

21. The method of any one of claims 19-20, wherein the one or more B. longum microorganisms is not of the subspecies B. longum subspecies longum or B. longum subspecies infantis.

22. The method of any one of claims 19-21, wherein the one or more B. longum microorganisms are isolated from a human.

23. The method of any one of claims 19-22, wherein the test agent is provided in a formulation.

24. A Bifidobacterium longum (B. longum) microorganism characterized by at least 98.6% Average Nucleotide identity (ANI) with at least one strain selected in the group consisting of: CNCM I-5683, CNCM I-5684, CNCM I-5685, CNCM I-5686 and CNCM I-5687, and combinations thereof.

25. A Bifidobacterium longum (B. longum) microorganism as in claim 25, wherein the B. longum microorganism is characterized by the presence of all genes from Table 1.

26. A Bifidobacterium longum (B. longum) microorganism of claims 24-25, wherein the B. longum microorganism is not of the subspecies B. longum subspecies longum or B. longum subspecies infantis.

27. A Bifidobacterium longum (B. longum) microorganism of any one of claims 24-26, which is isolated from human.

28. A combination of one or more microorganisms as described in any one of claims 24-27, milk derived carbohydrates, and dietary fibers.

29. A synthetic composition comprising a microorganism as described in any one of claims 24-27 or a combination according to claim 28.

30. A synthetic composition according to claim 29 for use in promoting/assisting transition from a milk-based diet to solid food in infants (as of the age of 4 months) and/or in a young child and/or promoting in infants (as of the age of 4 months) and/or in a young child a gut microbiota adapted to metabolize both milk derived carbohydrates and fibers or any derivative thereof.

31. Use of a microorganism as described in any one of claims 24-28 or a combination of claim 29 for promoting/assisting transition from a milk-based diet to solid food in infants (as of the age of 4 months) and/or in a young child and/or in promoting in infants (as of the age of 4 months) and/or in a young child a gut microbiota adapted to metabolize both milk derived carbohydrates and fibers or any derivative thereof.

32. A method for promoting/assisting transition from a milk based diet to solid food in infants (as of the age of 4 months) and/or in a young child and/or in promoting in infants (as of the age of 4 months) and/or in a young child a gut microbiota adapted to metabolize both milk derived carbohydrates and fibers or any derivative thereof by administering a microorganism as described in any one of claims 24-28 or a combination of claim 29 to such infant and/or young child.

The application's sequence listing, which the Patent Office published only in electronic form, follows.

SEQUENCE LISTING (4010 sequences)

SEQ ID NO: 1 - DNA, 165079 bp, Unknown
  R30_18m  MAG No. k141_188
ggcatagtcctgaagaaaaacgccgtcgtcatagcagtagttgcaataatctccgcttcgcgttccatccggttcggtgccatggtcttccgggcgatagaacggcatggcgcaactttggcaaaaaccgttgtccggcatttccataagcctcgccatcggcacctcaaaacgggtgctgataagccgaatcatgtcgatgctcggatctgccgttcccttctcccagcgggaaagcgcctgttgggtgacaaacagctcgtgcgcgaactgcgactgcgtaagacctcgctcctcgcgcacgactttgataacctgaccgatcgacatgactacctcccgacatcggaaaacgattcgagcgcctcgctgtgcgcttgctgattccagtctaagggcatggcccgttcgccaagcgcgggtacaacaaaccgttgttcgcacttgcatcccggaggaagaaacggctcggtcgaacctatttcctctccgcacccttcaattctcccggttcctctgactcctttgcgagcgccgcggatgggatgagcacgcttacgtatggggttgcgccagacaggacgtcgtcgtagaagcgctgtttggcgtcgatgaagtcgatggaatcctggatttccgcgagctgctcgaccagccgcgcccgcttgccggcgagcatctacttgcgttcggggatgctcggctcgtggaggagcgtaaggggctcgagtaggggttcgcggctttgctgcggtctctccctcacccggctataccgggagctccctcgtcagagggagcttaaattcggtctggttataggcccatgggcttcttgggctttttgtcgctcatgagcatgaggaagctgcgggactgggcggtgatcatgaagcccgcctcatagctcagttccggcccatccgggttgtgcgtatccacgaccagctgccatttgcggccgtatcgctcatccggcagggtgaacataatcggctcgtaatgcgcgttgaagatcaggatgaagtcattgtcgaccatccggttgccgtaccagtctacctccggaatatccgaaccgttcagatagatcatcatggagaacgcatgcgtgttctgccagtcgtccatatccatgatcgaaccggtgtggtcgaaccattcgacctgcggaatcatgttcgaatcgtcgccgggctcacggccggtgaagaagcgacggcggtgcaacaccggatgatccaaacgcagatgaatgagtttggaaacgaaggcgagcagttccttgcgtcccttgtcaagatgccagttggtccaggaaatctcgttgtcctgacagtaggcgttgttgttgccctgctgggtgcgggccacttcgtcgccaccgcaaatcatcgggataccctggctgaacagcaacgtggcgaacatgttgcgcatctgacgctgacgcaagtcgttgacgtccggaatattggtcgggccttcaacgccgcaattccaagagcgattgttgctctcgccgtcgcgattgccctcgccattggcttcgttgtgcttttcgttgtagctgaccaggtcgttcatcgtgaaaccgtcatgcgcggtgatgaagttcacggacgccaccggtcgacggccgttgacctgatacagatcggagctgcccatgaggcgtgatgcgaattcgggcaacgtggagggctgcgagcgccagaaatcgcgcaccgtgtcgcggtagcggccattccattcggaccagctggacgggaagccacccacctgatagccgccggagcccagatcccacggttcggcaatcagcttcacgcgcgagatgatcgggtcctgctccacgatgtcgaagaacgcggacagcttgtcgacctcctggaactggcgtgccagcgtggcggccagatcgaagcggaagccgtcgacgtgcatttcggtaacccagtagcgcagcgaatcggtaatcaactgcagcgcgtgcggcgagcgcataagcagcgagttgccggtaccggtggtgtcgaagtagtgctgctggtcgccttccaccagtcggtagtaggaggcgttgtcgatgcccttgaagctcagggtggggcccatatggttgccttcggcggtgtggttgtacaccacgtcgaggatgacctccatgccggcgtgatggtaggccttgaccatggacttgaattcgttgacctgctcgccgcgctctccggaggaggagtaggcgttgtgcggcgcgaagaagccgatggtgttgtagccccagtagttcgacaggcccttctcctgcaggaaggagtcgttgacgaactggtggatcggcatgagttcgatggcggtgacgccgagcttcttcaggtattcgatgacgctcggataggccaggccggcgtaggtgccgcggatgtccggcggcacgtccatgttgaggttggtcatgccgcgcacatgcgcctcgtagatcaccgaatcgtggtacgagatgtaggggtgctggtcgttgccccagtcgaaatacggattgatgacggccgacttcatggtgtgggcggccgagtcaaggtcgttcatcgccgaggtgtcgtccgggcttttgaaccagtaggagaacaggctttcatcgccgtcgatgttgccttcgatggccttggcatacgggtcgagcagcagtttgttggggttgcatctgaggccgtgcatcgggtcatagggaccgtagacgcggtagccgtagcgttggccgggctggaggccggggatgtagttatgccatacgtatgagttctgttcggtcatttcgatgcgcgtttccgcatcgtgctcgtcgaacaggcatagctcgactttctgcgcaacctgtgagtacagcgcgaagttcacaccggcgccgtcatagctggcgcccagcggatacattgatccaggtctgatctgcatagttttcagtatcccactttcttgtgtcactgatgtgccggggagttgaacgtcaggagaacagcgacggcttgtctttgtcggagttcctggcgatgagtctgcgtaacgcctcatgctggatggcgatcatcgaattggatgaggtgatgcgcgtggcggcaaggtcgctccacggaatccacgcggattccacgtgctcgtccgcgtcgaaatggcgctgctcccgtctgaacgggcccaaatgcaacaccatgatgtgggccagttcgtcggtcatgccttcggacgagtagaaatcgcccacgaagtcaacacccatggtgtcacggtccggcaccacgccggtttcctcggccagttccctcagggccgcatccatgatgtcctcgccctcgtccatgagaccggcgggaagcccgtaggcgaacatgtccgatccggcacggtattcgcgttcgatgaggtaacggtcggtggacatgtcgtgcacgagcatgaccacacagggggcgtgacgcagcacctggcggccgatctcgtgttccttgccctgcttgtcggtcagagcgatgcgcatgtcgtccacgtggaagatgcgcccggtataaacggtttcgctactgatcactttggcgggcacgtccatgtcgatgccgtccgaggaggcgttcagcttatggtcgagccgatgctccagttgttcctgcttgcttcccccaaacatgtcatctcctcggaaaaaacgttttcgccacgtcactatagcgccttaatcccgatgcgcggtaatggacagcgtccatggatcggtcgtgtcgtggaaccactcgacttcaggccttgctccggtcgcttgttcgatggcggccggcacgtcatcgatcgcgtagttgaaccacatggattcgatggcggcatgaggggtgttgatgaagcagggacgcacatggctctcccccgccattccatggccgagcatgatgccttgggccctcatacgggcttcataccgggcttgttcgatggcgtcggtcaccgggtggtgacgcaaatcgctggttacgtacacgtccgcaccggtggcacgcacctcgttgaacagggagtcaccggagccaggcagaatggccacatactgaacaaaagtgtccgaatcgccgcatacctggatgccgagcgcggtggtcatgccatgatcggacacttcgtcgaatacacgctgagcgaaatccttcagggcaacaggcttcggcaaacgacccacacgccccaagccgaccggatgagaggcgtttgcatcgtcaatcggcacgagtggtttctggtcgatgagtccgaagtagtcggccgcagcctgccccacgccgcgatacgcagcgtcggcattggtgtgccctacccacagcccgcagccttgctggtagagcctgcggacgatgtcgccccggaaaccgagtccgctcgtctcgtgtacggaacggaaggacaacgggtgatgggtgatgagcaggtccgcgccggtggcgatggccttgtcaatgatggcggaggtcgggtcggcggcgaacacgatgcggtgcacgtcgtggctcagatcgccgacgatgagacccggctcatcccattcctcggcgtagcgcaatgggtacagggtctcgagaacgtcgatgacttgcttgagattcggcatatgtcccattgtagtgggctattgcggcaagggactcattctgcagttgcggacaagccatgctcgtgctcttcattgctcgactatcggctcgccttcgcctacaaacaatccactggactgtttgctcaacggctcagcctcctcacccgaggggagctagaaattgtcagtgtgcggcgagctgccagtcggaaccgatgccgcacgatacgtccagcggcacggcaaggtcgacggcgtgttccatggcgttgcgcaccagttcggtgacctggtcgccttctcccggcgcgatttccactaccagttcatcgtgaatctgcagaatgatacggctcttgacgtgggcctctgccaaggtctgctcggcgcgaatcatcgcgatcttcatgatgtcggcggcagatccctgaatcggtgcgttgagtgccgcacgttcggcggcctcacgcgcaacacgattggtcgaatgcagggccgggaagtagcgacgccgtccgaaaatggtttccgtataccccttctctcgggcattggccaccagcgattcaaggtaatcgtgcaccttgccgaaggtatcgaaataccggtttttcaacgcttccgcttcacgtggcgcgatcttgagctgctgggcgagaccatacgtgctcagaccataggccaatccgtagctcatggcttttacgtggctgcgctggtcgccggtgatctggtcgaccggcagcttgtagaccatcgaggccacgtatttgtggaagtcggctccggagcggaacgcttcgatcagcgcctcatcaccggacagatcggccatgatgcgcagctcgacctgtgagtaatcgcagctcatcagggcctcgtacccctcccccggcacgaacacgccgcgaatctcacggccggcggcgttccgattggggatgttctgcaggttcgggtccacggagctcaatcggccggtggccgcgacggtttgctcgaaagtggtgtggatgcgctcatctgatgtattggtggcatcgatcagcgtttggacgatctgcttgagcttgttgatctctcggtggcgcagcaacgccccgaggaaaccgttggcccgctcattgtccactgatttgacatacagatcctgcaatgcggccgcattcgtggtgtatgagccggacttggtgcgtttggtgggcttcaaacccatatcttcgaacagcaccttctgcaactgcttgggactttgcaggttgatttcggtgccggcatactcccaagccatttcctgcgcctgacgagcctcggcggcaaactggtcacgcatggaaacgagtcgaacgctatcgactttggctcctgtgtgctccatgccgtgcagcacgcgggaaacaggaagttcaatcgcgcgcatcagccagcattgttcacgctcgtcgataatcggcccgagcgtgacggcgaggctgcggataatggccaaatcgcgcagacgatgttcgttcggatcttcttcgacctgatcgtcatcgaagtccaacgtgccttgcgaaggctgttcggtttcggtgaagtggatgtcgaggaagtgctcggccgcctgcttgaggctatcggcgtggaaatccggttgggtcagatacccggcaagcttggtgtcgaacatcggcaggtccatgtcaagatctaccgcgcccagaagatgcagcaattctttatacccatgcacgatggtgcgggagtgttcgcttttcaggaaccgcgcaagctgtgctcgcagggtatcggtgattggaaggggcactatggccgctgatgttgccgtggcaacggcaatggcttgtgccgtggcacgacccggcctttcgtcgccccatgcggccacggtccaagcgtggccgaccgcgtcgccgcagacggtatgccgctgcgatccatcgccatagtcggaaaccgtgaaatcggcgatttcaccgggaactttgacctcggcgcgatgggccttgacccattcgtcgaactgctccgaagaggtgatgctcgtgggttccggcaggttcagatcgagactgttatcctgctcgtcctgttcattattcgtagactcgccggctccgtatgtgttggaaaccttggcaccggtattgaaggttttcagtacacgactcctggtacgcggtccgaattcaagctccttgaacagggcgtcgatttgtgccacgtccacggtgccgaatgtcagatcctcaatatcgacgccaagatcgacgtctcgtaccagtgcgttgactttgcgattgagcttgacctggtcgatattggccctcagcgattcgccttttttgccgccgatttcatcggcgtgctcgcaaatgccgtcgagggaaccgaattggttgatccacttggccgcaaagccatcgcctacaccgggcacaccgggaatattgtcggcggtttcgccgcggagcgccgccagatccggatattgtgcgggagtgactttgtatttgtcgacgatggactgcggcgtcatatgcttcaggtctttgaagtgatggcccgggtacaacacggtgacgttgtcatccaccagctggaaggcgtctcggtctccggacaataccagtgtgtggtagccggccttgtctcccatggtggcgagggtggcgatcacatcgtcgccttcgaatcccagcttctcgatgtaggtgacgccgagggccgtgagcatgcgttgaatcaatggcagctgggtgagcagctcttcgggagccgcctcacgggtgcctttgtattgcggaagcatctcattgcggaatgtgccgcccttcacatcgaaggcgacgcccagatggtcggggttctccgcatcgatcacctgcgcgagcatggtggcaaaaccccagacggcgttggtggcctggccgctggaagtactgaagttgtcgaccggcagggcgaaaaatgcacggaaggccagcgagtggccgtccaccaccagcaatgtttcattggtgggtacggtcacgctggcctctcccatagtgtgtttgtgttgctttacgactcagcacggtgatgccgataatcagcgttcgcccgaatcagaaggcttcggatcgccgtacttggcgatgatggcctgagccaggcgcttcttggggatgcgctggtccatggaggtcttctgaatccaacggaaggcaccctgctcggagaagtcagccttgtccatcagcagacccttggcgcggtcgacgagcttgcgctcctcaagcgtgtcttcggccttcttgagcttctcttcggtttccttgagctggtcggtggtttccttgagcttgcgttcgctgcgctccacgttgtccagcagatcgttgatctcggcgaaacggcccatggccacctcgagggtcggcagcaacttggattcctcgtacggcttggtgacgtatgccatggcgccggcaccggtggccttcttcaccagatcggtctgggagaatgcggtgagcatgacgacaggggcgatgttctcatcgcagataatgccggcagcggcgatgccgtccatacgcggcatcttgacatccatgcacaccacatcagggcgatacttgcgggtcagttccacggcttcctcgccgttggcggcctgaccaacgacctcataaccgttgtcttccagcatggcgaccagatccatgcggttcacggcttcatcctcggccacgacgacggtacgcggaccatcctcggccacggccttgcgctcagcaggttcgctttcatcggctacggccttgagttcttcgtcggtcagcacctcatcgacgttgatactcggttcttcggacttcttccttgcagccatgccaacctctttcttgaattacccaacaatggggttcgtaataatttcagcgaactcctagctaaagtgccctcggtgggactcgaacccacactgcgcagattttgaggctgcttcctctaccaattgggatacgagggcgtgcctaagcactctgaagagagtagcataccgattcgactcctgcgacacaagacacgcgccagtcctccatttccccccggtaaaacaggcgaaacacgtcgatatcgtggacggcgtacccgtgtgttgcccgttcttctgcgtggtttcaccgcttacaatgggctgtagtttcgatgtatcgcttttgttaggagggcttatgagcaacgaaacttaccgtcagttcgatccctggcgcccctctccggtcaaggagatttcccgtagacagattgtggagacgcattatttcaatgtcgatcacgtctcctatgagtcgaatcagatcggttcgtttgaacgctactttgttcaggagaacaatggcgacactgtggctgtgctggccgtcaccgatgacggcatgattccgctggtcgagcagtatcgcatcgccaaccatcgttggacgttggagattccggcaggccacgccaacaacccgtccgaacgcccgaccgatgtggctaagcgcaagctggccgaagaggctggtttcgatgcctccaagcttacgcagttcacccgttttatgaacacgccgagctattccacccagcacaccgcaatcttcttcgccaccggacttaccccggcttcccgtcaggaaatcggcccggagactccgcgttccgacgtgcgtatggtgtcggtggacgatgcctatgagatggtggtcaatggcacgattgtggatgccaagaccatggtcgccattctgcgtctgaagagcggcacgctcgatcatctcaacgactagtcaccacgctcgatcatcgcggtgactacgtgccattgcaatcaccgcacaatcgcaacataacggataacgaaagccccccatccactttctggatggggggctttcgcgtgctatgtgctagctgtcagcagctaccagcggcctgaaatcagtcgcaagcgccaacggtgtgcacgtagatggagtcggtgcggcccggctggtgatcgccctgagcagagctcaggatgacgatcttgtcgccgtcagcaaccttgccggcatccttgaggatcttgtccgtgtagatcatcagatccttgcgggacttgtcgtggtaatcctccttgagcaggaaggcttcggtgccccaggacagagccagccagtggtaggtgtgctcgttgctggtcaggccgtagatcggggcggccggacgctcacgggagacgcggtgcacggtggcgccggtctgggtgtaggcgacgatggccttggcgttgagcttgtcggccaggtccacggcggcggaggagacggcgccggtggaggacatgtcgaggttcttgagctccgggatgcggtcgaaaccgtggtcggtggcgtagccggagatgcgcgacatggtggccacggtcacatccgggtacttgccgacggcggtctcgttggaggtcatggtggcgtcggagccgtcgaggacggcgttggcgcagtcggaggcctctgcacgggtcgggaccggggagttcaccatggagccgaggacttcggtggccacgatgaccggcttggcatactggcgggccagctcgatgatgcgcttggtggccagcgggacctcttccagcgggcactcaacggccatgtcgccacgggcggccatgacaccgtcgaaggtcttgacgatctcttcgaggttctccagagcctgcggcttctcgatcttggcaacgatcgggatgcgacggccttcctcgtccatgatctcgtgggcgcggtcgatgtcggtggcgaaacgcacgaaggacatggcgatgatgtcggcaccggtgcggatggcccaacgcaggtcagcctcatccttctcggtcagagccggcagggagacggcgacgcccggcaggttgatgcccttgtgggaggacacaggaccggccacgacgaccttggtgtacacgttgttgccctcgaccttggtgacctcaagacgaaccttgccgtcatcgatcaggatcgggtcgcccgggtggcaatcgcccggcaggcccttgaaggtggtggaggtgatgtgctcgtcgccctcgacgtcatcagtggtgatgacgaattcctggccgagctgcagctgaaccttgtcttcgccatcggcgttcttcttgaaccaaccgcagcgaatcttcgggccctgcaaatcaacaagcgcggcaacgttgcggccagtggcttcgctggccttgcgcacgttgttgtagaccttgaggtgatcctcgggggtgccgtgggagcggttcagacgagcaacgtccataccggcttcaacgagcttcaggaggttgtcgtaatcctcggtggaaggaccgatggtgtctacgatcttggctttacgcatgaatgcctgcctattcttgttcaatttggttcgaggcacgattgccccatttgccgaaacccagtctactagcgcgagccgactcatgacaagttttcttcacggtgtgttgtgagcgctcacattgttgtgttgactgggtttaagggttgtattctctaacgatttcaggccttctcggcgctttccatgctcttcatcttgatcacggaagccacggatgcgccgccaattgcgaccacaatcacagccagcgacagccatgtgggcacttccggcacccaatggatgccttcgccgccgttgatgaacggcaaggtattgccgtgcagggcctccatgatgagcttgacgccgatgaagcccagcaccacggacaggccggcaggcaggtagacgagcttgtcgagcagagcacccagcaggaagtacagctgctgcaggccgagcagggcgaacacgttggaggtgaacaccaggaacggatccttggtcaggccgaagatcgcgggaatcgagtcgaaggcaaacatgacgtcggtggtgccgatggtcaggaacacgatgagcatcggggtccagtaacgcacgccgttcttggtggtgcgcagcttctcgccgtcgtagtcgtcggtgatcttgatgatcttgcgcagattacggatgatgccgttttcgtgatattcctcgtcttcatcgccgccgagcaccagtttgacggcggtgtagatcaggaaggcgccgaacaggaagaacacccatgtgaagcgggtgatcagggccgcgccgatcagaatgaaaatgccacggaagatcaaagcgatggtgatgccgatggacagcacatacttctgaatctgcttgggcaccgcgaagttcgacatgataatgacgaacacgaacagattgtcgatggacaacgagtattcggtgagccagccggaatagaactcgatggcgggcttggagccggcgaagaaccagatgcatccgccgaagatcagcgccatgaccacgaagaaggcgatatgctgcacgcattccttggtggagggcacatgcggtcggcgcccgatgacgaacaggtcgacgatgaagaacagcgcgagcaccacgaaggtgatgatttcaaatgcgagtggggtttctgccatgattccctacactaacccatgtatgtgacgggtcatcgccccgcctcggtcatctgccggagctccttcttgagatcacggatctcgtcgcgcagacgggccgcgagttcgaactggagttgttcggcggcggtgtgcatctgttcgctcagttggcgaatcaggtcggcgaggtcctgcgcgggcaggccggccttcaggatctcctcgtggcgtttgtctgcctcgttgggatcgagtaccggcacgcccaggtgtgtgttgccggccttgcccgcgttgcggtagccaccttcaagcaaggtctgggtgtccacatcctccttggcgagcatgtcgttgacgtcgctgatcttcttgatcaggggcttgggatcgatgccgtgttcctggttgtaggcgatctgcttggcgcggcggcggtcggtctcgtcgatcgcctgcctcatggcctcggtggtctcgtcggcgtacatgatcaccgtgccggacacgtttcgcgcggcacggccgatggtctggatgagcgaacggtaggaccgcaggaagccctccttgtcggcgtcgaggatcgccaccagcgatacttccggcagatcgaggccctcacgcagcaggttgatgccgacaatcacatcgatcttgccttcgcgcaacatgcgcagcagttcgacgcggcgcagcgtatccacatcggaatgcaggtattcgaccttgatgccgcgttccagcagatagtcggtcaaatcctcggccatcttcttggtcagggtggtgaccagcgcacgctcgttcctggccacacgggccttgatctcggcgagcagatcgtcgatctgccccttgaccggccgtacgtcgatcttcgggtccagcaggccggtcggacggatgatctgttcgaccaccccgtcggacaagcccaactcgtagtcgccgggcgtggcggacagatacacggtctggccgacgcgctgcaggaactccggccatttgagcggtcgattgtccatcgcggagggcagacggaagccgtgttcgaccagcgtgcgcttgcgggaggcatcgccctcgtacatggcaccgatctgcggcacggtgacgtgtgattcgtcaatgaccagcaggaagtcatcggggaagaagtcgagcagcgtgtgcggtggggtgccggcggcgcggccgtcgaagtggcgcgaatagttttcgacgcccgagcacacgcccacctgggtgagcatttccagatcgtaggtggtgcgcatgttgaggcgctgcgcttccagctccttgccttgcttacgcagttctgccaggcgttcgtcgagttcctcgcgaatggttttgagcgcgcgttccatgcgttcggggccggccacgtaatgggaggccgggaagatgtggatttcgttttcctcgtcgatctcgtcgccggtcagcgggtgcagcgtggagatgcggtcgatctcgtcgccgaagaattcgatgcgcacggccagttcctcgtagacggggatgatttcgaccgtatcgccgcgcacgcggaaggtgccgcgcgtgaaggcgatgtcgttgcgcttgtactgcatggccacgaaccggcgcagcaggtcgtcgcgattgatctgctggccttccttgagaaacagcatacgcccggcgtattcctcaggagtgcccaggccgtagatgcaggagacggtggccacgaccacgcagtcgcgtctggtcagcaggttggccgtggcctgatggcgcaaacgttccacatcgtcgttgatgttggagtctttctcgatataggtgtcggtctgcggtatgtaggcctccggctgatagtagtcgtagtaggaaacgaaatagctcaccgcgttgtcgggcatgagctcgcggaattcggcgcacagctgcgcggcgagcgtcttgttcggctcgatgatgagcgtgggacgttgcagccgttcgatcagccatgcggtggtggcggttttgccggtgccggtggcgcccatgagcaccacgtcgttctcgccgttctcgatgcgcgtggccagttcctcgatggccttcggctggtctccggatggtcggtacggcgatttgaccacaaacggcttgtccacacgttcgatgttgaatcccatgcgctgtttccttccgattcacgctgtatcccgatgatatatcggaatatacgctaggcaactccaatacccgtcttcctcttggacgcgcagccaaccaccgctccgcgtaattgattgacgcagatgagccattccaaatcccatgcccaatgttctcggagattccgccaatgctccatccgccatcttggcgggaacgtcagccaccgatacgtacagtccgtcttgccgcacttgtatggcgagcacatacccttgttcgcgatccgcgtgcttggcgatattggcaaacgtctcttccagcaacgaccgcgtcaactggatagtcttctcgtcaaaccgactcaggagatcgaagggatcggacacaaccacctcgcctcggaaaccaagcgctgcgagttcccgccggtgccgttcgatctcggcctcgaatcgacctgcaccgatcggaacgatggcttctccggagcgacgcgcatggcatcgcgggattcgcgcagtaccgacattgtgctttgcgagaaccgctatgacatcatgcgtctgatcgagcgcccgttgagccacttcgcgcaacagtggcaagtccatcgactctccttgcgaagggtgttccgacatgatcctgtcgatgcttatgatgagatatgagagatcattggtcgtcgcatcatgcagccttgccgccaaatccaacgattcggccctgccacgcgcttccgactccctctccccctcacgatgatgccaattcagcagcagaccgattccaacgcacgccaacgccggcatgacggtccaaggcacaacggacaccaacgccccggcatcccaacccatcggcaacccatactgccatatcagctgcgccacgcgagatacggtcacagtcaccgccaacaccacgccgcaccatatgcgttgataggagaggacgattaatggctcggctatcaccacgctcaccgacatggacagatccaccggcaaggggaacaccacgcaccatgagatcgccaacgcgatattgccgccgaacgggaatgccacgcagagcaacgacaggatgacgaacaacagacccacccacagggcccacgcatcccaaaccggattgatacacgattcgatgaccgtatcagcggctatgcacaaggcgcaggctagcgccgcgatcttctcgccatgccaagacttcccgaaatcgcggaagcgacgtctaagaaaacggctgccgtcacagaacatggtatcgctcacagtaatcaaggagttcgccgcgcctcgtcaccccgatcttgcgcatggctcgtttcacatagctgtacacagtttcgacaccgattcccaagcggcgcgcaatttcaacggtcggtacatgatgtgcatagagacgcaacaccgccagctctcgatcggagaagagcctggcaccatccgcttccggctgtgcggcatccaccgtatgcaatgtctcttcaaggctatgcaaaccccaaccatgagggtatgttcccccgtcaaacaccgatttgaccgcctcgcgtatggtcgctgcgaaatctcttttcgaaatcaacgcttgggctccgcaacacgcgatatcctcaccataggttgccaggtcatacgaagtgactacgatgacgccaacctgcacgttccgctgtcgaatacgttccgtcagccgcactccgttcagcccgtccatcatgagatcgcaaataaggatgtccggcttccgcggatcgaacagacaacgttccaaggcaagactgggattatccgtaacccatagcatatgcgcctcgggaatcgtcctgccaataagcaaagtcatcatctccgcagagcaacgatcgttgtccaccaaggcaagccgaatcaggcgcccgttcttcataagtaccccctccccaaatcgcctccgtcaaacgaaatcgtaacactgtgacgattcccgtcacacagacttcgttcgctcctcattggcatcttaccgtgttgcatgcggcaaaacagccgcgcaataatgtgcggcgagcgaacttcctatcgtccgccgcacaaacacattgttaccgggaataaggtgtatcatgcactggacttataaaatcgccagtatattggccgtggctctcatcactctcgcagcaggattctatgcgcagaataacgaagaaacctatccctccggccctagctacgatattggaatttccgacgcgcacgggcagcctctatcgacattgaccggtctcgcagcgacccatcatgtcgtactcgcgagagtctcctatgagccggacggtcacggtaccaacagacgcgtaatttctattttcggcgcattagacggcaacggcatgcatgcgaattcgccatacccggattatgggttcgggccgcgcacacgtgtgcaacgcggagacagattcaccgacccattgggaagatggcttctctatggatcaccacgggataccgcttcagtagccaaatccatacggcgccaaggattcgaacttaacagagcaacccccatcggcatcacacaaatcaccaaacaattcttctccaattccatcgcccaagtcatattcgccggacttgctgtagtatttgtgtccggcgcgctttccgtgtcgacagcttcacgcgtttgcgcgatacaagccttgcatggcatgagaacaaccggcattattatgaggcaattcctgcggcatgcgttctttttcatcatctgcgtctgcatcggatggatgacttggatttccattggtgcgatcttctggcctttcgcttctcccttaggattcgccggtcaggtattcctctccatcatcatcgccacaacgtgcatggcattggttgccttgtcattgtcgattgctctagtaagggttctggtgccgaacgcactcaaattaatccaaggaaagcgccctttacgttttctcatggcttccggctgcatcatggcaatcatcgttctcgctctcagctctgccagtttgaacgttacgaacttcaaatggcggcaatcccaaacactgaaaacaacattggagcatcaattgtcatccaacgacggattccaattgcaactgtggtatagcagcgatcaaaaccgagcccgttccatgccctcatggaacgacttcgtcgaacaaacttcccaatcagaacatacgcgattcgcctcattccggctaggatgcacgtgggtggatagctcgcaagacccacagccctgcatcctcatggattcccgtacggcaaggcttcatcatcttatacgaaacaacacgacacttgcacgaatcagtgtgattatgcccgagaatgaacaatgggacagcgaatccattacgaacaatgtgcttcgcgcatactcattcgagcaaagtttggcggcagaagagggaaagagtctgcccgccatcaatcgcacgagcatctccattgaatccagaccaagagatgctgtcttatcggcatttgacaccccttccaacaccgatggcctttcctctgttcctgttgttgtcattgacccgtcactgctctctggcgataccactacatcgatggtgtccaccggcggcatgaccttcgattacagctcccgccatcagctgctcgaaatcctacgggaaaagggcgtggactctttggtggcttcggtcgtcaatcggcacgacgagatacaaactcgtttggcacgaacaactcaggaaatgaactatttttccatcacagcttgcatatccataacatgtctgctgggcggcgcaatcatggtggctttgacactatgcacactccgacgtcaaattatgttcgtggaatatatgcatggagcgccgtcatatctccgttttcaatcgatactgttcctagcagcggcgttatgcagtgcatctcttccgatccagttgctcataggaggttacaacgccgtttccacgacctcggtttccttactattcatcgtcgtttcgctggcaaccacagtgctttacgattcgcggctgcgcgccgacagtatcaaacatccctgatcgccatccacaaacctgtatcagcaatcacttaccacgtaaggaacatcaatcatgagcgccttattgatcacgcataatctgacatatcgaatcgacgaccgcaccttatgggaaggactgaacctgacattcagtcccggtgacatggttgccctgaccggagaaagcggatgtggcaaaaccactttgttgaatgtcctaggtcttttggaagagccaagttcaggaacaattacctatgatgggcaaacaattgcctccagaaagggccgacggctcatgcaccgcaacgtcatgggattcatgttccagaattacgccctggtggagcaatggacggtgaacagaaatctgattctggctctgcgcagcgtcggaataccatcggcagatagaagtcggctcatcagacgcgcattgcgagccgtgaatctgacgggctacggcaatagaccgatctacacactcagtggaggcgaacaacaacgagtcgcaatcgcgaggcttctcatccgtcaatcgctgcgcgtcatactggcggacgagccaacagcggccctcgatgccgacaaccgcgccatggtcatgcgtcacctgcgtgatttcgccgacaacggagcgatcgtgatctacacgacgcacaacgaggagaccgcggccctcgccgaccgcatcatcgcattatgattccgccagccactgttcgtacagcgcatcgacggcttcgagcattcgacccatcggctgcgtggaatcgatcaccgcgtcggctatgacacggcgttgttccgggctggactggtggcgaatgcgcgcaagcgcatcatctcgcgtcatgccgcgggtcgacaccattctgtcgacccgtacttgttcgggcgcttcgacggtgacgatatggtcgaatcgcatgggcatggcgtccaggacttccgccaacagcggaacatcatgcacgaccacggcatccggattgtccgcgaccgcctgccgctcccgagacagcgcaagatcatagatcaacggatgctcgatatcgtccagtttcctccgcaaccgttccgagtcgggcccggcgaacacgtgctcggcgatccatcgccggttgagccgcccctgatcggtcagcgcgtcggggccgaaacattccgctatacgacgaagaccgacgccgcccggttccaccactcggcgcgcgagctcgtcatagtcgataagcgccgcgccgagctcccgcagtcttgtggacaccgtgcttttgcccgccgcaataccaccggtcaatcctattcgaatcatgctccccccatcatggccatgtttcgaggttcatgcacacaacggcaaaacccggcccgccgaagcgagaccgggttttgactatacgtcaggcgtcagtcgcccgatggcgaactcacttgccgagcagctggtcgcgcagggcggcgagctgatcggagtcggcgagggtaccggtagccggagcagcggaagagtagttggaggtctcctcgaccggcttctcttccttcgggccctggccgtcggcggctgcggattcggcagcgttctccagctccttggccacgaactccttgtgctcctcccacagctcgtgggcggcggcgtactgggactcccactcctcgcgctgcttctcgtaaccggcgatccactcgttggtgttcgggtcgaagccttcggggtacttgtagttgccctgctcgtcgtactcggccggcatgccgtagatggccggatcgaagtcctcggaagccgggtcaacggagtcgttggcctgcttgagggacagggagatgcggcgacgatcgaggtcgacgtcgatcaccttgacgaacacggcctcgcccggcttgaccacggtctccgggttctcgacgtgacggttggcgagctcggagatgtgcaccaggccctcgatgccgtcctcgacggagatgaagacaccgaactggacgatcttggtgaccttgcccttgacgatctggccgggaacgtgggtgcgagcgaagcgctgccacggatcctcctgagtcgccttcagggacagggagatacgctcacggtcgagatcgacgtcgagcacctcgacggtgaccttgtcgccgaccttgacgacctcagacgggtggtcgatgtgcttccaagacagctcggaaacgtggatcaggccgtcaacaccgcccagatcgacgaaagcgccgaagttgacgatggaggacaccacgccctcacgaatctggcccttcttgagctgggacaggaaggtctcgcggacctcggactgggtctcctcgaggtactggcggcgggacaggaccacgttgttgcggttcttgtcgagctcaaggatcttggccttgatcttctggccgatgtacggggagaggtcgcggacgcgacgcatctcgacgagggaggcaggcaggaagccacgcagaccgatgtcgacgatgaggccgcccttgacggcttcgatgacggtgccctcaacgacgccgtcagcttccttgatcttctcgatgtcgccccaggcgcgctcgtactgggcacgcttcttggacagaatcagacggccttccttgtcttccttggtgacgacaagggcctcgatggcgtcgccgacctcgacgacttcgtcaggatcaacgtccttcttgatggaaagctcgcgggaggggatgacaccctcggtcttgtagccgatgtccaggaggacttcgtcgtgatcgatcttgacgacggtgccctcaaccagatcaccatcatcgaagttcttgatggtggaatcgactgccttgatgaagtcctcttcggtgccgatgtcgttgatggcaaccttggcgacttcagtgttgttctctgccatgtaaatatatggtttctaatagtggatggataatttctcgatattcagttatacgcacacccttacaggcatacagatattcacaatacaagcaactctgcccaaatttcctaggaaactctaggcgtgtcgttcggccatttccacgacgttggccaggagcatggctcgggtcatggggcccacgcctccggggttgggggtgtaggcggaggccttgtcgtagcaggccttgtccacgtcgcccttgatgcggtagcgaccggcttcttcgtcgtagacgcggctgacgcccacgtcgaccagcacggcgccgtccttgatcttgtcgggcgtcacgaatccggccgaacccattgcggcgacgatcacgtcggcgcggcgcatgtggtcggccacatcccgggtaccggtgtggcacaaggtgacggtggcgttgacggcgttgcgcgtgagcatcaggccaatcgtgcggccaatggtgatgccgcggccaagcacgcacacttccttgccgttcagatcaatgtcataggcgtcgagcagctcgagcacaccgcgcggagtgcaaggcaacggtgtcgaaatgtcgccgcgcacatgcagcaccagttcgccgaggttgtacgggtgcatgccgtcggcatccttggccgggtcgatcatgtcgatgatcgcgttctcgttgatgcccttgggcaacggcaactggacgatgaacccggtgcaggccggatcttcgttgagttcgcgtacggcagcggcgatgtcgtcgaagctggcgtccgccggcagttccttcttgactgaggtaatgcccacttcctggcaatcggcgtgcttgccggccacgtacttcatcgacccgggatccgaccccaccagcaacgtgccaagccccggctggatgccccgggccttgagcctgctcacccgttcggcaaggtcggtcttgatcccggccgcgattcgtttgccgtcgattattgtggacatcaacgccctcccctgtggtttcgatgctttctatcgaaacgataggctatcgttggaacaagtcaggattatatatcgttcgctctcacgaagaaggcgtgccatggggactcaaatcacacgacttacgcgactcgccgcagccggcctgagcgccgtcctgttgttcgcgaccgccgcatgcgcagccacctcccccactgaaaccgagccggacaacaagaccagtgttcccgcaccgaccgggccgatcaatgtggtcgcctccctcaatcaatggggctcgctggccgccgagctgggcggcgatgacgtggaagtcacgtccatcgtgaactccaccaatgtggatgcccacgatttcgagccaaagacctcggacgtcgccaagctgtccaaggcccagatcatcgtggccaacggcgcgggttacgattcctgggccaccaaatcgatgaccaagaccacgaatatcgtatccgccgcttccgtcatgggtgccatggaaggcgataacccgcatctgtggttctccaaagacgctcgatccagcatggccacggccatcaccgatgcatatgtaaaggcactccccagcaagaagaaggccttccagaagcggctcaaggcatggcaggcggatgagaaatcgctggaaacatgggcgtccgagttcaccagatcccactccgacctcacctatgcagccaccgaacccgtggtctattatctgatggccgatctcgggttcaagaatcagacgcccaagggatatacgcaatcgaccgcttccggcggcgaaccggcacccgcggacctgcagtctttccagaaactcatcgaagacaagggcgtggatgtgctggtcaacaacacgcaggaagccagtgacgcgaccaatatgatcactggcgctgccggtcgtgccgatgtgccggtagtcgacgtctccgaacaaatgcccaaggacgccgacacgctgaacgcctggatcaaccagctcatcaacaccatcatcgacgcggtggatccgagctatggctgcgaagacgccacggacggcaacgcgaattccgatgattccagcgccgacggcgccgccacggatgatgccaatgcgcacgatcccaaggccagcaccggttccagcacggagcccaagtacatccgtcagtgcaaggcggccacatccagtgactcgtctcaggattcggcaaaggccgatgcctccaatggcgattccggcgatgcctccggcaacgaccagaccgactccggcaaatagttagaagcaaaggacaacggcatcggattcatgcaatgccgatagacgccttgcacgagaagggttgtgcgaccattgtcgagatggccgcacaacccttttctttggttgtcaccatccgtacacgatattgagaacgattgtcagcatcgtttgccacaatcgggcgttatgagtgaaacttccgattgcatcgtgttcagcgatgccgccatcaagcgtggtgaccatatcatctggcagcatggcacctttgccattcccaccggttcggtcacggccatcgtcggcaccaacggcaccggcaaaaccacgatgatgagggccgagctgggacttttgccgctttgccatggcagcctgaccgtactgggcaagcccgcaggcgagatgaacaaacgcatcggatatgtgccgcagagctatgtggcgaatgtcgattccaatctcaccgccgaacaatccgtgttgctgggcctgaccggcacccgattcggcatccaccccatcaccaaggcccagaaagccaaagcgctcaaggcgatggagttcaccggcatcgccgacaaggcgcagtaccgtctgtccgaactgtccggcggtttgcgccagcgtgtggccatcgcccaggcgttggtgtgcgatccacaactgctgatgcttgacgagccgttggccaacctcgatctggccagtcaacgcgccaccgtacacgtgctggccaagctgaaccgtgaactgaacatgaccatccaggtggttgcgcacgatctcaatatgctcttgccgattctgaccggtgccgtctacttgctcgacgggcacccgcactacgccgatatgcacaacgtgctcgactccgacctactcacccacctctacggcacacaggtgcaggtggtcaccactccgcagggtgacatgttcgtgaccccgacgccggatgagccccaggaccagccgcaggatatgcacacggcagccgaagtggcgcaattgcaccatcacgagcacggcaacgccaccaatggcagtgccgccaacagcgccgagaatcgataacatcaagctagccgatccacagcccgtcaacgggctgcagctcaggcatggagaaaatacagggacatgagcaccatcaacttttcgtatgatcccgaatggctggacacactgtccgctccattcatgaccaacgccttcatcgccggcctgtgcattgccctggccgccggtgtcatgggatacttcaccatcgcccgtcgttccaccttcgcggcccatgcgctggcccatatcggtctgccgggcgcgaccggcgcggtgttgctcggcctgcccgtatcactgggcatgggcgtgttcgcactgggcggcgcactggtgatcggtgctttgggcaagcgcgtttccgagcgtgaaatcgcaaccggcaccgtactggccttcgccaccggcttgggtctgttcttcgcgcgattgtcgagttccgcctcccagcagatgcagtcgatcctcttcggctcgatcctgaccatcaccaccggccagatcatcggcttcgccgtgttcgacgtattgctgctggcattgttggccatcatctaccgcccgctgctgttcagctcgttggatgagcaggtggcacaggccaagggtgtgccgatcgggctgatgaacgtggcgtttatggcgattatggccggtgtaatcaccattgccgtgccggcagtgggtaccttgctgattttcgcgctggtgatcacgcctgcggccaccgccaatattctggccggctccccattcaaggcgatggtgatcgccagcgtgctgtgcctggtgtcgatttgggccggactcgtgctgtcggcgatgttccccgcccccccgagcttcattatcgtgacgctttccaccctgttctgggctatcgccaaggccgtggagacagtgcggaagtaatctcattcatttttcttgcccccgctggcaaattcacagcgggggctttgttatatcttctccaccaaggcattggcgatggcggcgatgccttcgccgcggccagtgaatcccatatggtcggtggtggtggcggtaaccgataccgggcaaccaaccgccgcagacagggcggcttcggcttcagcacggcgtgtgccgattttcgggcggttgccgatgatcgccactgaggccgatgccggcgtatacccgttggatgccagatgcgccacaacttcttgcagcatatcgatgccatgccttccggcaccatgcgcgtccgcaccgacaccgaacagtgaaccaatgtctcccaatcgggcggcggcaagcaacgcgtcaatcagggcgtgcgcggccacatcgccatcggaatcgccttcgataccctcgtatttggcggcatcggcctcgctacatgaatcaggcaccggccagtagagcccggcaatccacagttcacggcctgaaccggcaggcgcaaaacggtgagcgtcaaaaccctgccctatcaacactcctgcagaccccatgcagtccccttcgatggcgctacccagacgaacggcagcaaacgattatgaatcacgaagccccggcgtatcgcataaggacacgaccggggcctcaacaatcaaatcacttcttcttggacttcttctcggcttcgacacgagccaaagtatcggccgcggcctcttcgggctcggcggtgtgatgcttgtcgtcaccgggttgagcgggctcgtagcccaggttcacgtcgagcagacgctgggcttccgcctcgtcgatcttctcggacaaggcgatctcagaagtcagaatggcgcgggccttggtgagcatacgcttctcgcctgcggacaggccgtgctcgtcgacatcgcgctgggcgagatcgcgaaccacttcggcgatcttgttgacgtcaccggtggcgatcttttcgacgttcagcttgtaacggcgagaccagttcatctctttctcgatgatcggggtccgcaggatgccgaacaccttggccacttcggatgcggagacgatgtcacgcacgccgaccttcctggcattgtccacgggaacgttgatgaccaaaccatcggaagagagtacggacagctgcagatattcgcgcgtcactcccttgaccgtccgctcggtaatggcctccaccttcgctgcaccatgacgcggatagacgaccatatcgccgactttgtaagacatgtaccctccgagaactgacggcttacacacaaaaactcgaataattatgccatgcggtctggaccgcccctatgagagcgctcacaaccacggagacacaccgaaaagggcaagaattcgccattttcgacgcgccaatgtagcgttttcgactccaacgcacgtagactttgggtcatggctaaagaaacgaagatcaaggaagataccgtcaccgtgcctgtcgcccaaggcgacctcgatgcggtgagcaatgctgaattctacaacccccacggagttctcggcgggcatctcggcatcggcaagcatgccgacaccgccacaatccgtgtgctgcgtccgcttgccaagtccgtgaccatcctcacccaggatggcgaatacccgatgacccacgaatacaacggcgtgttcgtggctaccgtgccggcctccggcaccaagaagcagcccacgattcccgactaccgcgtcaggaccgagtgggaaagcggcgcagtgctcattgaggacgacccataccgttatatgcccacagtcggcgacatggacacctatctgttcggcgagggccgtcacgagaagctctgggaggcgcttggcgcgcacgtgctgcgctatgacgatccgatgggcggcgtggacggcacgcctggcgaacaggtggtaggcaccgcgttctccgtgtgggccccgaacgcccatgccgtgcgcgtggtcggtaacttcaacgcctgggatggccgtcgtcatgccatgcgcgagctcggctcctccggcgtgtgggagatcttcatccccggcatcggcgcgggcgagacctacaagttccagatcctgaacgccaattacacgtgggagatgaaggctgacccgatggagcgtcagcacgaggttccgccgcacaccgcctccatcgtcaccgaatccacctacgagtggaacgatgacgcctggatgcagcaccgccgcaccaccaacccgcatgatggcccggtctccatctatgaggtgcacgccggcagctggaagcagggactgacctaccgcgacctggccaagcagctcgtggactatgtcaagcaggaaggcttcacccacgtggagttcatgccactggcacagcacccgttctccggctcctggggctatcaggtcaccggctactatgcggtggattcccgcctcggctcccccgacgacttccgttacctggtcgatcagttccatcaggccggcatcggcgtgatcatggactgggtgcccgcccacttcccgaaggatgccttcgcactcggccgtttcgacggcaccccgctgtacgaggacccggacccgctgcgcggcgaacaccccgaatggggcacctatgtgttcaacttcggacgccgcgaagtacgcaacttcctggtggccaacgccctgttctggctcgaggacctgcatgtcgatgcgctgcgcgtggatgccgtcagctccatgctctacctcgactacagccgcgaacccggccattggcgtccgaacatctacggcggacgcgaaaacctggaggccatcgacttcctcaaggaagccaccgccaccgcgtacaagaacaaccccggcgtcatgatgatcgccgaggagtccaccgcatggccgggcatcaccgcccccacctccgccggcggcatcggcttcggtatgaagtggaacatgggatggatgcacgacaccctcgagtatctgcacgaggagcccatcaatcgcaagtggcaccacaacgaaatcaccttctccatggtgtacgcctactccgaacactacgtattgcccatcagccacgacgaagtcgtgtacggcaagggctccctgtacggcaagatgccgggcgatggctggcagaagctagccggcgtgcgttcgatgttcgcctatcagtgggctcacccgggcaagaagctctccttcatgggcaacgagctggcccagtggggcgagtgggatcacgacgcctccatcgattgggattgcctgaactggcaggagcaccgtcaggtccagaccatggtcgccgacctcaacgccttctacaaggcgcatccggcactatggagccaggacttcgatccggccggcttccagtggctgaccagcgacgatgccgaccacaacacgctgagcttcctgcgcatcggcaccaagggcgagaccttggccgtggtggtcaacttctccggtgaagcctggtccgattaccaggtggcgctgcccaccggcggcaagtggaccgaagtgttcaccaccgatgacgccaagtacggcggctccgacatccacaacggcaccttcgaagcggtcgagggcgaatatcattcgcgtccgttctcggcgaagatcaccgttccggctctgggagttgtattcttgaagccggaagactgaactggtcaacaggctgaaaggtaaccggtttatttatgctcaataccacagcgcgtcagaatacgacaccgcgcatggtgctggtggtcgaggacgagcccacactcgccacggccattgcccagcgcatcaccgctgaaggatggaccgctcgcgtggccggggacggcgcttccgccgtccaggccgcgtcccagctacgccccgatctggtaatcatggacatcatgctgccggtcatggatggtcttgaggccaccaaacgcatcgtcgccgaacgtccggtgccggtgctgatcctcaccgcacgtgatgacgaggccgacaaggtcatcggtctgggagcgggcgccgatgattacatgaccaaaccgttctccatgcgcgagctcatcgcccgctgcaaggcgctgctacgccgcgtggagcgtgcgaaggtcattgccaagaattcggagaacgagaagctgctcgacttcggttcgatggtcatagacccggcccagcgcatcgtcaccgtgaacggcgagcaggtgcatctgacccccaccgagttcgatctgctggccacgctggcccgccgcccgaagtcggtgctcacccgcgaaaagctgctcgaagaggtctgggactgggtcgacgcatccggcacccgcaccgtcgacagccacgtcaaggcgctgcgccataagctcggcgccgataccatccgcaccgtgcacggcgtaggctacgctttcgagccgccgaccgcgtgatggcatccaaaaaacaacagcaatcccggcttgatgcgatgaaacctcgcgtcaagccggttgatttgttctcctctctgaagctggaactcagcgtactgatcgttatcgccactgccatcgcgtttgccatgtgctggttcctcctgaaattcggctggtccggttggatcgccatgccgctgactttggtggtggccttgggcatcacctatttcttctcccgcggcatcaccgctcccttacgccagatgcgcgatgtggccgaagccatggcggatggcgattacacggtccgcgtggatatcgatcaggatcgtcatgacgaggtcggccagctggctcgctcgttcaacgagatggccggcgaactcgaacatgccgataaaatgcgccgcgacatgatagccaatgtgagccatgagctgcgtacgcccgtttccgctttgcaggcgatggtcgagaacatggccgacggcgtcaccgagcccactcccgccaatctggagagcatcctcacccaaacgcagcgtctctccgacctcatcgccttcctgttggatttgagccgtatggaggccggtgcggcgagtctgaatatcgaaaagttcaacttcgccgactttcttgacgagaccatcgagccgttggaaatcgccgatggcggccacgcccacgacatccgcgtcaccgtgccggccgacatctcgatggaaggcgatcaggaccgcctgcgccagctgttcaccaacatcatcgccaacgcactgaagcattcggccgacggcaccaccgtgctggtcgatgcccatgaggatgacagccaaggcaccatcgtgaccaatgtggtgaatttcggctcccagattgcaccgtccgaccgttcggatatcttccggcgctttgtcaaaggcaagacgggtcccggcaccgagtcgggcggcaccggccttggcctgtccatcgcacgttgggcggcccaattgcacggcggcaccgtcaaagtggtcgatgacacgcgaggcgccgatttcgaaatcatcctgcctaaatatcacgtcgccgaacgctgatattgtccgccgtcctaccgtatactgtattcgaacagatgttcgaatacagggtgggaggcacagcatgacacagcaatccaagtcacgaaccatgccgcacgacaccacgctgtttgtcatgcagatggccggcgattccatgatcaatgccggtattcataacggcgatctgctgattgtcgatcgttcgttggcaccagtccccggagatgtggttgcggctgtcatggacgatgaaatcgccatcaaacggctggtttcacgggccggcatcaccatattgcacgccgagaatcctcgatatcccgattacatgccgagcaacggcgcttcgcctgctatctggggcatcgtcaccgatgtcattcacccgttgatatcgtcatcggaccgtcgcgccacagcatccgccaataccagcacgcccaccaccttggtgccggcctgctgaaacacctgaacgcattgccgcacggtggcacctgtggtgacgatgtcatcaatgagaagcaccgcgtcgccatggcctatgagatcacgcttcaccgtgacatgaccggtgatacgacgggcacgctgtgccgaagaggtctgctgcacggagcgtgccttggtggaggagctcagggcattgcatggtcgcgcatcgacgccgtacccacgcaatgcccctgccaccgatttggccaacggtgccgtatgggcacgccctcttcggcgcattgacgcccgcgatgacggcaccggaaccaccaatacgcgatgccccaagcatgatgatgatattggcgtcttgttcagcagcgacaccatgatgcggccgaaagggccgtcaagctcggtatcgtcgtggtccttccagtcgagaatggcacgacgcgccgctccctggtaaatcgatgcggaccatatacgggctccgccaccaccgtctgtatcccgctcccggcattgcgcgaacagggcccagcatgccgcgcacaatacctcatccggcgcgtcacacccagcgcagccgcgtggaaacagcagattgcaggcctgcgcccacatcgcatgccaccacttgtatacgctcggaccgtccataacgcgtcaccatcaagctggagtatcgaatcgcgcaagcagtgcatccagcagttgtaccgtatcttgcggattctccacacgaacaccgatcgcaccggcctcaaccgcaggatagtcattacccgtaggcgtcatgcgatcgcccacgaacaccatttcatcggcctgtatgccaagtgtctgcgtcagcttgcgcacggcataggccttatcgatgccgcattcgctgacatccacactggtgtagccgccggccctgacccgcatgtgcggcagatcggccttgaccgcttcgaccagcgcctgtttcttcgtgttatcgcgatcccatgcctgtttggccgctacgggtgcgaactgtcccagagcggagaaggtgatctggctgcccctgttctcgattcgaggcccccatacctgctgttcccacaatcccagttcccgggcatgtcgctcaagactttccgagacagcggccacggtggcttcggacagatcatgcgcatacaccaaggcccattgcgtgccatcccaccggtaataccgggagccggaggcaggcatgacatgcagattgccgcgcctggcattcggggtgagtacatccagcacctgtgaggtgaccaccgccatgccgccccctgagatcagggccaccaccgtatggtcgagcagcgcacagaaccgttcgatcatcgcgggcctcatcggctgttttgagctggccagcgtgttgtccaaatcgaaaccgaacaccttggcgttggagcagacattatcgaaatcaagttcggaccacgaacgtaccaccatttgtcgcgcctccctcgttgacgaatgttcacagccaatgaaccaatcctaacgcatgttgcctccgccatgtcctatggtgggaaccatgcttcagccaccttggaacgcacgaatctaccgcaaccgccacggtcgcggcacacgaaccccgatgttcggcacccgtctgccccgttaccgcactcgcaccggcatgttcgacgatatggtggcggcccaggttcgcaggctcggccaagcgtggccggaactgatacgtccgctccagttcgcggtggaggatgtgccgccttcggatccgacgccttggcagaccgagccgaatatgacgtcccagtgcttccccgccagccacggcattcccgcacgagtcgtgctctaccgtatgccgttgcagaccgaggcacctaccaagctcgaattgcagttggccgtcagggatgagctggtggcccgcatagcggaattgtatgggcgcaggcccgaggaaatcgaccccgattggggcctgtgacagtattgcgggggccgtgccacttcaagtaagacagtggcacggcccccgcagctatatcggcgccgaaacatcatcagaccgatgcttcggcgagcgcgctctacttgacgatggaggaatcgttccgagcccagacatggaccgtggcgggcatcagcgttgaagcgtcgatggcggacaatccggcgatgtccttgtcttgcaacgaatcgtgactgaaacgcgctccccagctcactttcttggatgagtcctccaacatcagcacgaccgcggtgccatgatcgccggaaagtttgccggtctcaatcgtttgcgccgcgttcgcatccagcgtgatttcctcggaggtcaccgaagcaccggcatcatcgtaggcgtgcaaggtgaccgtcctgcgcgcattggacgtattggccagcgtgatggaggcctttactccgtcgggaagggccaaccccgagaattcggatggctcgccggcattgaccaatgcgaaatcggcttggccggagtcaccggagcgtgtggccttgacggagaacgacacggcatcctctgcggtggacatcacgcccaacgccccatcaggagcctctcccaagtcgatcgccgtcaccttatcggcagtgacggtggcatctttggcgggaaccaatcctttgtcggtaatccatgacagcccggtgctggtgtctgccttggcgaacagataagcggtgaccgcatcgccggcagtgatggacggcgccaccgacgcattggaggcggtcggcagcggcagcgcgaaatcagaacccttcggtgtcagaccatccatggtcaccgtacgtaccacggacgcgataggagtctccttgctggaaacggtcacgaacagaccatgctgcccatcgaccgcggcggacagttccatcgaggactccccctcggccggcacagacagcgtggattgtgtggacaatgccattttcccggctgtctcggaaccccagacggcaatgtcgacggtggtcggcttggtggagggattcgagacgatgagctgctgtgtggtaccggtcgtgccgccggagagcaggaacgactggctgagcgaggtcgatacgcaggatgccgccgatacgcctctcacatcgccgtcatcggcccatgatgcgatggtgccgacggtgccggtgccagctgcggcctgcaacatacgggtattgatcaggcgagctccctgattgatcttctgagcaccggttttcaccgaggaatcgtcggtcggatcggcgtctttcaaagtcacgtcatctgaactggacttttgcccgatcgccgagacagtggcgctgtagacggagccgaacgccgcatagcgcgcctgtgtgctcagattgccgacagtggcctggaaggcgctgtcgccgtacgtgccggtatcggccaatcctataggtgccgggcagtaggtttcggactgggtcggactaactgtctggtcgatggcattatcggaagcggccaccttgtccacccagatattggggatgggggccatgacgagaacgacgaacagcgcaatcaacaccagcatggtgatcacaccgagcacgaggccgatcgcacgtttgaaaccagaagttttgttgctcatgcctgctcctccaatccgtaggacggtcgtctgcgaggcatggcgaccaagcagtacaacgccgtgatcacacctaggcatatcagccagacgtgtctccagacactatgctgtgcacgttgctgccatgaggtatccacctgctgtgaggtgctgctacgcagcgtcagacgatagtagctgccgctatccgtggagaccagggactgggtgccgttcgatgcggcgatattcgcgctcaactgttcatacggcatgtcgttcgaggaatcgccggtctcgggaaccacgtagatgccgccgaatccaagcgcgctgatggccgcgatggcctcttcgtcgggattggacagcagcgaggcacaggcctgggccagttgttcgtcaaccgcatcatgcttgccggacagcaggcgcgcccgctggaccggggaactgtcgatcagatcgccgcgcggggtgcgcatcaccgcatagttgacgatgttgcgggtctccgcactcacggcaagcacacgatgatcggcactggcctccagataatcggtggtgaccatgggcaggccgttttcggacacgcccagtcccgcatccttatgacgttcgatgccatacatgcattgaatgccgatgcagcacaccagtatcagagcaagcaccacacggccagacacgatgagcacatgcagacggtcccttttcggtgcgggatcgctgccggacgcatgcaacggttggaatcgcttcaccgccccaccggcgacgaggcacacgcaggcaaggaagcccaatatcatcatcgcgatgccaggctgtgcggaaccggccacgacgccatcagcatccacggctatggccacacggctggaaatcagggcgagcgcgcctccgcaaacgattaccacccacatcagccgcgaggtccgcaacgcgaacggcagcaccagcgaagcaagagcgagcagcgtgatgacgccgaacagcacagtgaccgccaaatcggcatgctcagtcgatcccatttgccatcccagcgcacgctgtgcggcctcaagcaggctcagcgacgccggcgacccgttggcggatgacgttggcactgtgatgtcgccgaacagttgacgccacatgcccaaatcggcgtaacgcaccgcattgacgagcgtaggggccaccgcaaaggcggcaggaaccggaataagcaacagcatggcgcgcttgcggcgcacgaacagcaggaacatcaggaacacgacgatcagcgcgaacagcagctgcggttcggcggccaccacagggatgaagcacagtgcggcgatggccgcggcctgaacggatgtgcgcggcttgagcgggtcttcggtatggtacatgcccacggcacggaacacgaatgcgaacgcggccggcaggaacaccattacggtgagcatcggcatattggcctgcgcataccagccgaacataatgccggtggatgcccacaacagtcctcccagcacacgaaccacgtccgagcgggtgaatacgcccgccagcgcccagaacgacaatgcgctcagcggcgcggccacaaacagtatcatcgccagagcggcggtcacatggccgagcgtgaccagcgaggccagcatcagcaccagcagccacggcgtgggcggcgcaggaatgccggtgccgctgccaaacacccatggcgtggtggcggactgcaccagttgagtgaagctggcaccggtggaaagcaacacatcggaatacaacgatccaccggagaatatcgaacggaacaccggccaatacatcaccacgatggccgcaaagcacaccagcgccatcaccacggctgcgctccagcgatatatggtgcgtgtccgcagatgggcacgttccagcggactgagcagcactctgccctgctgggattggaatgcatcccgacgatcatggaactgcttgatctgccgactgtcggcgaacaaaacctgcagggacgatgcggcgaccttcgactgtctggccaccagcctgcgcgatttcatgtttcccgcgatatcggccaaagccaaccatggcaggcacaattgcacccatgcttcatacggcttcttgccgaacatcatggctatggccatgccaaaactgcgaatcagcctccacagccagacgataatccaggacgacatggccaggtcagtgtacagatagcgctgttgggagcgatgcaccgtcatcgcatgattgaccgtgtgatcttccttaagcggctccccgcctcgcgtacgaatgccctcataccgtgcgcgacgatgtgatatctccgcttgcgggactaccaccacgcgtccgccgctcaggcagacacggcggcagaaatcgaccgattcgctgtaggtggtcagccaggcattgatgccccgcagtcgcgtgaattgcgacatggacaccagcgcgcccgccagcgacaccgcgaacacatcctgtcgcccgtcatactgctcctgatcgggttctccatcgaccaccagggaatgcacggcgtgtcggcctgcatacataccgacatcatgcaggtgggatccttcccaatcacactgtttgcacccgagcacgctggcccccggcgtattgcgccacgcctcaagcaatcgttcaaggcatgaggcatccgaggggcgggaatcatcatggagcaaccacaatgcgcggggagcgtcatccaaatcggcccgatccaacgcccggctgaccgcatcgccgaaggaacgcgcgcccttggccgaaacgatgtgaatggtcacatgcttggactgcggcacctccactaccggccccgatggcgagggaatgacctcgaacgaagtggttatcctcgaaccggcgcgcccggtcgcgtcggcgatgatgacgactcccggaagaacattctgcgtcaataccgaacgcaatgtagaccggaggaaacgcatatcctcctcaacggtgatcacagccgtaatgccggtatccacatcctgcctatgcgtatacggtcgagaagacatggcgtcggccaacgcctcatgaatatcgctattacctgtcggactcataaactcccagtgtacgcaccagacttgaagggggtgtgtgtggaactacgcctgctcccggtgctctcgcttatatcgacggcgttcgcgctcgctcatgccgccccaaataccgaatcgctcatcatggtcgatggcccatttcaggcattgttcacgcacttcgcatttggcgcacacacgcttggcatcacgggtcgagcctcccttttccgggaagaacgcctccggatcggtttgcgcgcacaacgccttgtgctgccaagatacatcgccatcaggtcggaatagtccccacaattcatgccatggctcttcggctgaatcgtcgaccacaccccacatgcgattctccttgcctattgagcttttcatacggactaaattacacacatgcaatttcgtttttgtcaaattctttctcgtgtcattacatcatttttatggaactgtgtgctatggcgcggacacgatgccctgatgccgttgcacatgatattgtgccgttcctgcgcaggaacaccatagcgcaggaacacccggcggatgctgtgtcaaagtgtcattcagacaatcgacagtttcaggaggggttatgacgcaggaatcaggtggggcggatccgcatatcaacccgccaagcttcattcctgcgggaaatcgacgcacccgaccttccgggcaggtgccacgctccttcgcccctgcccgcgcctcacgtcagtcaggtcaggctccatcggcccgtccgtccgtcacgggaaatgacatcgaagagcctcaaccgaacgccaacgccacggcaagcgccaacgtcacggacaacggcaggcggactccgcccagtttttctccgaaaaccggacgtgccacccgcagcacggctccggatgccgccgcaccgcgcagcattccgccgtcgcgagcgcggatgtcttccggctcatcccgcaacgccgtgcgcaatccgtcggatatgccggtttcccggccctcatcgccagcagcaaacgtgtccacgaagttcagccatattggccggccggcggcggcaacggcgaaaacggtaacggcacaccggccgcgcgccttgcgcatcatcttatgcgcgattgcggtactggtggcggcgttgattctttctgttttcggtgcctggcaatgggtggacagcaaactgaaccggagcgactggctgaccgacacccccaacacgccggcctcgacctggctgattcttggctccgacgagcgagacggttccaccgattacggcggcgtggacaatatctcaggcttcagaaccgatacgattctggtgctgatcaagcctaaaagcgggccgagttcgctgatttccattccccgcgattcgcttatgaacgtcgataaccagtacatgaaaatcaatgcggtggcgcagattgccggcaagaaagccttggtaagcaacgtcgagcagattaccggccagaaaatcgaccatgtggcgcagatcaagttcggcggtctgcagaacgtggtgaacgccttgggcggtatcgaactgtgctatgacgaggatgttcaggattcctattccggactgaactggaaggcgggatgccatacgacggatggttccactgcattgtccttctctcgtatgcgatacgccgacgcgcgaggagacttcggacgcaacgaacgccagcggcaggtcatctcggccatcgtcaaaaaggcttccagcagtgggaccctgaccaatccgtccaaagtcgtggcagtgtccaatgccgcgatgagcgcactcaccgtggatgaaaaaaccaacccttacacgttgctcaccatggcgttggcgttcaaaagcgccaccggctcgaatggcatctccggcagcgtgtactggtccgaccctgattattacgttgatggcgttggctcctcggtgctgctcgatgacgccaggaacaccgaactgttcaatcagcttgccgacggcacgcataaggccggcgccgtaggcaatctggcggaaggctgaccgacgctttcccggagcccatcggcttcatcgtcggcgcatgatcgccaccattgcctacaccaccaatcatgcacgggcaaaatgtcatgtggataactcggcaagctagaaccacataccttgattcgacttgcgctttcggcatgcgttcccccacgctggaagcatggcatcacagcagaacgattcgaagcgacattccgcccatacggcatccgccgtatcccgggcgaagcaccgtttgggcgcgccgccattgcgcgcccgcctgaccatgcttgccgcggcgtgcccgatgatcgcgcaggcactgatgatggtcatactgctgttgcacgggcaatggctgttcgccgccatgatcacgccaggcatattcgcctgtctcgtgtccctgctgctgacgctccccccacctccgggcccggagaagacccccgccccgcaacaggcaacgatcgatatcagtatcacggacgatgccgatgcccgcgccgcagacctccgtcatgcgccgtcgcagccgatagaatcgctgctgcacttcgcacgcctgccatggcgcaccattgtgggccattggcttgaaccccttgaccttgcggtgccgatcggcatgaccggaagcgagccgctgaggctcgatctgaaccgtcaggggccgcatgctctggtggccggcaccactggttccggcaaatccgtgttgctgcaaagctggtgtctggcgctcgcctcgatgaacgggcctgagcatctgaatttcgtgtttttggatttcaaaggcggttccgcgttccgcaaactcgaacggttgccgcataccgtgggcagcgtatgcgatctggatctggcgcatgccgtacgcgcgttgcgtgcgctggaagccgaactgacacgccgtgaacagctgtccgccgctgtccatgcttccgatatccgtgatatggtcaatccgccaccgcgcctgatcgtggtcattgacgaattccatgccctgaaggaccagctcccggattatgtgaatcgtctggtgcgtattgcctcgctcggcaggtcactgggcatgtatctgatcgcctgtacgcagaatccgatgggtcaggtcagtgccgatatgaaggcgaatatgtccgtcagcatttgtttacgggttcgggaccgtctgcaatcatgcgagctgcttggtgatggtcgtgccgccgacctcagtccggcaatgcccggtgcggcgttctgcaacgattccgaacaggtgacggcattccgctgtgcaacggcgcgcgatatcgatgcggtatgccgccagatcgcgttcgcatcgcggttcgtcgggagcccgccgcagccgtccctgtttaccgcgccacttccccggcacgtaaaagaccggactgtggccaatcacgcaccgcaacgcattcgatttggacttgccgacgatggcatcaacctgcgagaagcgacggtatccctcaccggtggcaatatcggtgtcatcggcccgcaggggcgcggcaaaaccacgttgctgaaaacattggctcgacacgccagcatggctgatggcttggcggtacgtgtcagttccccgcatcgccgggtatggggatcgcaatggcttcgcaacggccgctgcacgccgtatgccagctcggatgcaccaccgcctccgcatatcgtgtggttcgtcgacgacgccgatgagttgttcgacccattccgcaccgacgagcaggcgctgtctttcacacatgcgttggccgatgagtccgtcagcgtggtattcgccgtcagcacgattcgcccgatacgtataccagagcattgcaataccagaatcgtgttcccgtgcggggaacgaacgtctgaccttatggccggagtccccgctcgcctattggatacgatgagtcatatcgatgccgacaacgcgggccgggccgtgctcatcgagggcacatcggcatgtctggtgcagtgcgcttcgtgaaaacttcggttttttctcggcgaaacctcttgaaaatcaccacggttcgtggttaccttggtactggacttaaggaacaacaccagccacggggcttttaagggaggcaagcaatgagcagcgcttttgattggcgagccaaggccgcatgtcgtgacaaggatccggaactcttcttcccggtgggcaacaccggtgcagcctatcagcagattgaggaggccaaggccgtgtgccgcacctgcaaggtgattgatgcatgcctgaagtgcgctctggacaccaatcaggattacggcgtgtggggcggcttgagcgaagatgagcgtcgtgcgctgaagcgccgcgccatgcgcgcccgccgttctcaggccatgcagatgcaaatctgatgttttgattatcgcttcgtcatactaggaaaccctcccacttgggagggtttccttatttttgggcttcgcatcactcatcctgagcggccctgagcttcatatcaagcaccacgcgggtgccgcctccgcggcgcggctcccaatgcacggaaccaccgaaatcattggtcacaaaggtgttgatgatctgcgtgcccaaaccagaaccggaagaacgagccaatcctccctgttcttcggagccgagaccggaaccgtcatcctcgaccaccacattgaggttcgggccggagcggcccacggaaatcgtgatatggccatccttgcggccttcgaacccatgctccaccgaattggtgatgagctcggtcagcacgagggacagcggcgtggcatcctgagcgggcatcatgccgaacttgcccatgtagttgatatcgatgtgctggtctttcatcgtggctaggtccacggccatgcgcagcaggttggcaatcaccttgtcgaagtcgacgacctcgtcggcggtctggctcaatccctcatgcaccatggcaatggtctgcacgcggcgttgcgcctcctgcaattccttcttgacctcatccgacttggtcttacgagcctgaagcctcagcaatgcggagacggcctgcaggttgttcttgacacgatggtgaatctcggaaatcgtagcgtccttggtctgcagctcctgctcacgacggcgcagctcggtgacgtcacggcatagcagaatcgctccgatacgaccgttgttgtcatataagggcagcgagcgtatcgagacggcggaacggttggcgttgagttcggagtcgaccgcggctttgcccgccagcaccaacggcagggtttccggaacggggtcgttctccttcaacagctgtgtgccgagttcgctgaggtaatggccaggcatggtggtcagcaggccgagacgcctaaagcagctgatggcgttcggggctgcgtatcgaaccacgccgtccatggtcaggatgatgaagccgtccgccacgcgagcgatatggcgctggctcatcaccgaatccttgtaggggaactggcctcgtggaatcatctcgtacagctgtttgcccgcgttaatgctttccgactcatatcgaccgttggattctcgtgtggccatattggtctcacgcacgaccaagcccaaggtcttgccattgtgccgaaccggcgcgtacacgttgcagacggtcgccttgcccacggttctcaataccgtggagcggaacaccacgctggagagcatggcggcgtccaattcgccgaccatgtcatccggcatgacgtttcccaccacgtcttccgcccgtagcgtcatcacggtggatgggcggcattgttcggccaccacgtatttgccgtcaccgttctgtaccagcagcagcaggtcggcaaagctcagatcggcgatcacctgccaatcggcaacgagatgatgcagccactcgcggtcctcgtcgtcgaagtcggggcgcgttgcaaggatgtgtgaaaaatcagccatgcccctatcatacgcagacacgtcgccgccattgcggcaagccacacgggcaagtatgacgactattacgacatcgcatcttcaataccgcaccaatcgcgttgcacggctgcccgccgttcaggcggtcatcgcctcatacacctgagaggacaatgcggcgatctgctgctgcgcggttcccgagaccactcccgaggtcataaccaccatcacataatcccgttctgttccgtccgcggccttgccccacaccacggcggcatcattttccacgccggccagttcaccggttttattggccacctgaatgccagacggtactccggcgggtattttggcgcgtcgcgtctgcccgagcaatacgtcaagcatggagcggctggcttcggcggaaaccagtttgcctcggtacaatgcagcgaggaatctgccgcaatcggaagccgacgtccagttctcggtgccggtcccgtctgtgccggcatcggacaacacccgcaactgcttggatgagctgaagccgtatcgggcggccgtaccagtcacccgttgcatgcctgtggccatgtcgccatcgccgaccatcaataccagctgattggtggcagcgttcgagctgacggtgatcatctggttgatcagcgaggtggtatcttgcccgcccgcggccaaggtgccggcatgttgcttatcgtacacggcaagcatcacgtacagtttgatatccgaagccgccaccatgggctggccgccgacgctcacggttttgcccgtggccagatcctcgacatacaccgaccaggtgcctccattgccggccacagctgccgtgaccgccgaggacacatctgacatccgcttctcttccgccaccgtggtcaggtcgggagcaggtgccgccttgcgctccaaggtgacatgcacagggcgttgttcgtgtttcgatgacgccgttgacgacgatgccgacgctgttgccggtgagtccgatgccgaggcgacgggcgatgttttggcgtgcgatgcgccgagaccgttatgcgcgtacatccatccaccgacgccgattaccaaagcggcgatcagggcggcgatcaggatcaatcccacgacgctgcctgttgcacgcgtgtcgctactatgcttggtatgccgagccaccgtcactgccccaatgtcttatcaacactggccagcacccggctcatcaggtccgcggccaccgactgcccctgatattgggtgacaacggccacggcggccttatgaccattggcttcgacgatggcgaagtaattccaggtgtcctggatgccttggcctcggtgggcatgcacgatcatgtcggacggaatggttacgccttcggaagcaatgtccacgttcatcaatgacgcgcctcccttggcgtccactgcggcgagcatgcgggccgcatcgcgggaggaaccgtaattctcataaccggcattgctggccgccacatcgccgaaatcgcggttgaacgaggtgcccttatacccatgcgaagatgcccacgaattgacgccgctccagccacctaccgccgcggccgccatattgccggcattgttgtccatggaacccatcatcgcgtttgcctgcgctttggcgttgtcatcgccattgtcctgggccgcaagatagaccggcagatagagaccggcagccacgaattgcttgccggactgcgacgtggtcgcgatggtggcgtcctctgaggaatcggcgtatgttccatcgatgaccatggcggagacggccacatcggaggacgagtatgaatccgcgatgtcagacaactggctggatgtgatcaccggagtggaaggcttcgacttctccgtcgagcttttcttggacgaatcgtcgctgttcttgtctttggcgctatcagacgtgttcttcttggccttggacttggcgtcagaggaatccgtcgtgccatcatcggcggaatccgacgcatcggacccggtcgactgtaccgatgtttgcgcctgcggctgagctccccacaatcccatgctatgggtgacgaacaagccgatgaccaacgccacgacgcaaatcagcgcgatgagcacaatcaccaccgctttggtgtgatcgccgccaggacgcccggcgggaggttcaggagaagcaggtgccgcagggccagcggtcatgggtcccggtgccataggccccggcaccgcggaacccggcgccgttggcggcgcgacggcgggcaacggcgccgccggctgcttcaccagcgtcagcgcgttatcgtcataggcaggggccgccggattggcctcgggctgctccaatgggcttccgcactgcgaacagaaggcatttccttgctcgttggcaaacccacactccgtgcaatacaccatcaccgaaccccttattgctgtgacgttctcatcttcggattccatagtatcgccaccattgggtaatagtgttcgtgtgagtcggtattgacaagcataaaagttacgctaacgtaggttacggcagcgtaagaagcgtatcgtcaactcgtgaaacgggggcatcaccatggcatcaacaaccgacgacgcggaaaagacgatgcatcacgacgctcataacagcgcgacgattgcagaggatgccatcatcgcatccaagcgtcaggcggctatcgaggcgcgcgaacaggcgttgcaggccaaggctgatgccgtacgggccaaggcccagttcaaggccgaggccattcgagccaaagccgaggagaaggcccggcacaagctcgccaaagcggagcaccgtgcgctgaaaatcgagggcattgcccctgcggaagtggaacgcaagattcgtctcgacgtgcacggacgaccaaagccgttgatgcgcggctggattcacgcgattgccgctcccctgtcattggcggcaggcatcgtgcttatatgcctggcacatggcgcgagtctgaagtgggcgtgtgccgtgttcatgacagcgtcgctgattctgttcaccaattcggcctgctaccatctgggcgattggagcccgcgcgtcaccgatgtgctgcggcgtatcgatcatgtcaacatcttcctgctcattgctggcacgtataccccggtttcgtttgcgctggaaccgttctggcgcaatgtgatcatcatatcgatgtgggcgtgcacggccatcgccatcgtgattcatgtgatctggatcaatgcaccacgctggctgtatacggtggtgtacatcatcttcggcatctacggcctggcttatatggtgatgttctggaattcgccgtatgcggggccagccgtggtggtgctgctgtgcgccggcggtgcctgctacatcctcggcgccatcgtctacgccttgcgcaagcccgacccttggcctcgcgtcttcggcttccatgagattttccactgcggaacggtggccggatatgcctgccatatggtggccatctacatggtgatcgtctcgctgtggcaataaacgctacgacatataagtatgcccccgcctatggggggcatactagtcacttataactcaggccagcggcttggcggccttgaccgtcacggacagctcgcggccgttcggtgcggtgtaggaaacgacgtcgcccaccttggcaccttcgatggccttgccaatcggggaatccggggtcatgatgtcgtagtcggtgccggccacgatgtcgcggctgccgagcacgtaggtcatctcgttgccgttgagctcgatggtcaccacagagccctcgcccacggtgccttccggggcattctcgatgatcttggaatcgcgcagcttgacggtgagctcggtgatgcggccctcgttcttgctctgcgcctcacgggcggcctggtagccgccgttctcggacaagtcgccctcggcacgcgccacggcgatcttgtgcgcgatttcctcacgcagctcgccttcacgatgggcgagctcttccttcatcttgttgtatgcttcctgcgtcagcaggtagaccttgtcctcagccatatcgtcctcctgaaccgttgtcgatgctgaaacaattttcgttatttatgacaaaacgccggctatgaccccggcgttcgtcatgtgctgacctatggtcagcgggtggaaatgatgtcgatgacgaacaccagcgtgtcctcgccgccgatgccggcctgcgggatgccgcgggaaccgtagccgtattccggcggaatggaaaccaccagacgcgagcccacgttatggcccggcacggtctggtcccagcccttgatgacctgtcccacgccgatgccgaagctggcgggctgatgacggtcgaagctggagtcgaatggggtgtccttaccccacaccacgccgtggtagttcacggtgacggtgtcgccgcgacgcacgatcgggccgtcgccctcggtcagctccacaaccttgaggcccttcggggcttcgggcgccgggaactcgataacgggcgtggtgccgaattcggcgttcacctgaggcatctgatctgccattagtcctccttcaaagacacaatgcgccctaccttagcaccatcggcgaatcggcggtagtccttcatccctgtgcgatacgacacgctggccgtatacgtcgattccggtcatcatgctggtgaataccagacatgtcaatcagcattcgacgacattgacggcaagcccgcccttggaggtctccttgtatttggccatcatgtcttcaccggtctgcttcatggtttcgatggcctgatcgagggtcacgatgtgtgagccgtcgccgagcatggccatacgcacggcgttgatggcggtgttggcggccatggcgttgcgttcaatgcatggaatctgcaccagtccgcccaccggatcgcaagtcaggcccaagttgtgttcgatgccgatctcagcagcattctccacctgttccggcgtgccgcccatgactgcggcaagtccggccgccgccatcgaacaggccgagccgacttcgccctggcaaccgacttccgcaccggaaattgaggcgttgcgtttgaacaggtatccgatggcaccggcggtcagcagaaacgtgaccacgccctgttcattggcgttgtccacgaaatgccagtaatagtgaagcacggcgggaatgatgccggcggaaccgttggtcggagcggttacgatgcgcccgcctccggcattctcctcagagacggccaaggcgaagagatccacccatgcggcgtcggaagactcgagcacggcgtctttgcgccggctatcgcggcgcagcacatcggaattcgaagcgagacgccgatacatcttcggcgcgcggcggggtacgtcaaggccaccgggcaatgtgggctccgccgaggtgcatccgtggtccacgcaggcgcgcataacacgccagatggcatcaatatcggatcggacctggatgcctgagcgtgaagcggtttcgttggcccatacaagttcggcgatgctgagatgatgttcccggcacaacgacaccagttcggcgcatgatgagaacgggtagggtgcctcgacgccgaaatcagtggatgatgattcgtccgcgtcggcaaaggaggtgccttccggaggacgttcatgaatgccgatcatcgggtcttcgggagcgcctttgcgcacgaatccgccgccgatggaataccagacctgttcgtcgaccaagcttgcggcggcgtcgaaagcctggaatcgcatgccattggggtgcgcggccatgcgcttccattgttcgaacaccacgtcgcggtcgtagtcgaaatggatgcgtttgaggccggcgaggttcagagtatcgtccaacgcgcaggtctcgcggatgcgcatcatgtggtcggtatccacggtggccggcagattgccttcgagcccggccatcgcagcacgatcggtgccgtggccgagaccggtcagcgccagagaaccgtaaagcgtgattttgacacgtgcggtgcgatcgaccaaatggtcggccagcaacgaggaggcaaaggcatgtgccgcgaccatcgggcctacggtgtgcgaggatgaaggtccgacgccgatggtgaacatgtcaagcacactgaacatttggctccttctcccctgctggttcggcatgccggtgtcaccaggcgtcatgccatcacgatatcgtattccagcctagcgcccggaatctttcgctttgcgcgatgatggccgcgcgcgtcgtgccggcgagcgataagtcagtcagtgagatagtgcggagaacatcataaccagtacgatgataccgatgatggccaatacgatctgcaccaccatcagcccgatggtcagtcccttcttggtggcgattttgggtgcgtacgcctgtgccaacgggaaggcgatgaagccgaacaccgcgtagttgacggtcagggccatcacatcgctgttcgacaacaccacgccgttcagcggctggttcagcgtgttcatcatcgtgctcatcacgaacatgccccacacaccgtagccgattaatccgacgacgccgtacagccatggcttgagtttgtcgttggcacgcagggtcagggcttcggcacaccacaacagggcgaagccgacgatgtaggtgaacgccacggcgatcagtatcacgatagtcgcccacggcaggagtgcggccacattgccgatcatggacagatagaatcccgagcaggcgatggcaccaacggtgagtgcagtgcccgcaatgacggcttgggcaagcatggtgggcagggcgccttgttcgactcgttcgacatcggtccagcgtgaagccatgtggattcctcgtttcatcaggtacatcgtcacaacgccacatagcctaacggccttttgtttcggccttataagctctccacatagtaagctgcgagcccctctgacgaggggagctgtcggcgaagccgactgggggagagaccgcggcacagccgcaaaaaacggcatcggccacaggccgatttcaaagtgcctccggtgggactcgaacccacaagccgaagcgatcgattttaagtcgactgcgtataccatttcgccacggaggccaacttttctattataagctatctcctgccctgagcattgcttgcgggttgctgcgcttcgtgcagccgtcgcggcatagccgctcccttcgcctacaaacagcccagtgggctgtttgtagcagccggtagcgatagcgtcgccggcgtcgcatataacgcaaacagcccaccgggctgtttgcttaacggctcagcccgctggaggcacttaccacttacgctattgagccagcaaccggcgaccataatcgagcacaatgccgtccagcagcccgtgttcgctggcgacgaacgaatcgatggcttcaccatgatcggccttggcggcttcgctgacacgcgccagcacacggctccagaccacagcgccgccgccgaccacatcgatacggccggggtggatggtcttgtattcgcggcgctcggcgcgcgtcatcctaaggaacttgtcgtccacggcataggcgtcttcaaggctcaaccgatgcccgtcgaccacggtgtgatcgtattctttcaatcccatagccaaggcggtcatcgtggtcaccgtgccggacacaccgatgatggtacgggccttgcctgcgtccacggtgcggaaggcctcatcgatatgctcgtcgatgtccgcaacggcctcatcgatctgcgcctgggtcggcggatcgttggtcagatgacgttcggtcatgcgcacggaaccgatgttcatggagaatgcgccctgaacctgggtggtgggcgcactgacgccgtcgccaccgatgaccagctcagtggacccgccgccgaggtcaaccaccagatagggggcgggcagatcgtcgcgattgaccacggaagtggcaccgaggaagctcaggtcggcttcttcagtgccgggaatgacttcggggcgcacgccgaggatacgttcgatctcatcctcgaactcctcacggttttccgcgtcacgagtggcggaggtggcaacgaaacgcaggccgtcgatgggatgctcggcaatcacaccggcgaattcccgagcggccacataggcgcgttccaacgcttcgtcggcaaaacgatgggtcttgtccacatcctgaccaaggcggatcacacgcaggatgcgcggcaccacctcatgcatgccatcggcatcgacacgtgcgattttcagtcgaatggagttcgtgccgcaatcaatgccggcgacggttacggattccttgctcattgccttctcctcgtatcccttagtgcgtatgaatggactgttcgcggtggctcatctgttgatcaatcatccagcgtgcagcggcagacggtcggatcgaattcgtctttgacgcgttccagcaccaaatcgccaatggggttgacgcccggccccataaccaaggactgggccagcagggcatgcaggcacttgacgcgcaccggcatgccaccggccgaagtgccttcaatatgctcctcactgtcgccaagacggcctgccagttcgtggcggaatgccagatacaggttatgggcctgctcatatgcggccttgagctcctcgtccgaggccagcatatcgttgtattgctgcatcacgccggcggcctcgacatgggaggcggccttgacggcttccggaccggtcagatagcacgtggtggggaaagggattccgccgggcaacaccgggcgggtgattacggcaagtggcctaccgcagacgcatcgcgcccccacggcgaccatgccgcgcgggtatcggccgagctgacgctgcaccaggtcgatgtcatggtcgttggcgggctcggcaagcatggtgtcgacaagggccttggccttggcggcgatatcgatggtcactgttgggttccctcccctgtgttctgttgggtgttctgatcggatggggtgttctgttctgacttatcggactgcttggatgagtcgttggatgacgagtcagaggaaccggaagtatcggatttgccggactcgctatcggtcacaggctcatcggcctttttgagcgagtaagacagttcgctgtaccatggcaggacttttttgttgctggtattggaatcttccgttttctgggattcgcgatcggagccggtcacggcttcgggatgcagcacacgcacggcctgttcgccggggaatacgaagccgaggcgttcacgggcctgggcggtgatgtaggccttgtcatcccaacgcttgatatcgttctccaactcctgcttttgggcgatcagcgaggcttcctcacgcttgaggccattgagctcggccaggttcagggcataagtgtggaaggtggagaccagctggatggcgccgagtgcgatgatgaacagggagacgaagaacgctatgggccccgccgacccttttttcctgacttgtgctttgccggttttgccaggtttgccggtacgggacgacttgctcatgtcacatgaaaatacccgccgcattcgacttgacgaacacgacgggtatcgagcttcagtggaaactcacgcctttacgggcgtttcagctcacttggccaagtacttcttgcaggccttgaaggcgctgtagccggcgtactgagcggtggagccgagctcctcctcgatctcgagcaggcggttgtacttggcaacgcgctcgccacgggccggggcaccggtcttgatctggcgggtgttcttagcaacagccaggtcggagatggtggtgtccggggtctcgccggagcggtgggaaaccatggaggtgtagccgttggcggtggccagctcgatggcgtcgagggtctcggtgacggaaccgatctggttcagcttgaccagcagggagttggcggcgccgaggtcgatggccttctgcagacgagccgggttggtgaccagcaggtcgtcgccgacgaactgcagacgatcgccgaggcgagcggtgatggcagcccagtcttcccagccttcctcattgaacgggtcctcgatggagacgatcgggtactcgttgatgaggttctcgtagtagtcgagcatgtaggcggagtcgcgctcttcaccgtcgaagcggtacttgccggtctccttgttgtagaactcggaggaggcgacatccaggcagatgccgatctgcttgccaggctcgtagccggcggcggagatggcgtccatgatgtacttgagggagtcctcgttggacttcatcttcggggcgaagccaccctcgtcgccgaggccggtgttcaggccttccttcttcagaacgttcttcagagtgtggtaaacctcaacgccagcgcgcagagcctcggagtaggtgtcgaagccgtacggggagatcatgtactcctgaatgtcggtggcgaagtcagcgtgagcgccaccgttcatgatgttcatgttcgggaccggcaggatgtggccgttggtgccgccgatgtagcggtacagcggcaggccggcggactcggcggaagcgtacagagcagccagggagacacccaggatggcgttggcgcccagcttgcccttgttcggggtgccgtcgagctcgatcatcaggtcgtccagagcgcgctggtcagcagcgtccatgccgatgaccttcggagcgatgacctcgttcacggccttgaccgcgttaagaacgcccttgccgccgtagacggacttgtcgccatcgcgacgctcccaagcctcagcttcaccggtggaggcgccggacggaaccagacccttgccctgagcgccgtcttcggtctccaggtagacctcaacggtcgggttgccacgggaatccagaatctgacgcgcgtacacgctttcaattactgccacaactactccttaaaacggttgtgtatcttgaatgacattcttaagagtagtgcgatttgtggacgttgtgaacaacacgcccaaaatttagtgttagcgctcacaatgccgatgcgccgcctgattgcaaggcagtacggacgaaatcgctcagtcgacgtccttgccattgaggtagtcgatttcactgtcagacaatttcagttcgctggctttgaacgagtcctgaatctcctgcgggtttctggccgagggaatcgtgaacagatattggtattgcgcaagttcccacgcgagcgtgacgcgctggtaggagcagtcgtgggacttcgcgacttcgcggaaccggtcgaacagatgctcgttgaacgggtcaaggaatccaccgagcggcgaccagcagacgaaagccaaaccgagtttttcgcaggtctccaacgtgtgttcggggtcgcggtgaaccggggagaactggttctggacggccacgagacgatcgcccaaaatgttgtgggcggcttcgatgtccgcgttgtcgattctggagataccgaccgctttggccacaccttcgtccacgagctgcttgagtgcgcccatctggtcttcgtacggcacctgcggatcattgcagtgcgagtagagcagatcgagcgtatcgacaccgaggcggcgggctgattccttggcattggcgatcatggtttcgggtcgggcgtcggcctgccagccgtagttgccgttgccgtcaagcgtgcgcagccagccggttttggtggctacgagcacctgatctttggggccatgccacgagtgcagagcatcgcggaccagatattcgccatagcccatatcctccggttcgccggtgccgggtgcgctgggcagataataggaccaagccgtgtccaaataacggactccggcatcgagcgcggcatggatggtctcgatcgcctgatcacggttggaggggcgcccctcgatggcgagcgccattgtgcccatgccgaggcggggaatctcatagccggcaagtgttgccgcgtgttggtttttcatcgttgtggcctccatgccaagtcatcgaggagttggttagtccagaggactacctggtcggagctcatggggccttggcccagggaaccggtgaacggggtgggtacgatgagctggtgggtgaccgggcggtattgggcgcctttgtaaatacggcccatacgcatctggatggattcgggcgggtcgatacggccgatgcgcacgcggttggattgcgcgagaatctccgaaatgccgagcttgcgggccttgaacttcagacgggccacgtcgaacagggtctcgaattcgaccggcggcttgccgtaacggtcggtaagctcctcttccagatccttcaaatcggcctcgttgcgagcggaggcgagcttgcggtacgcttccagacgcagcttgtccgaatcgatgtactcgatcggaatcgacgcttcgatgggcaggtcgatggacacggccaccggctcgacgttctcttcgggctccttgtacttctccacggcttcggacaccatgcgtacgtacaggtcgaagcccacgccctcgatatggccggactgctcgtcgcccagaaggttaccggtgccgcgcaattccaagtccttcatggccacatcgaaaccggagccgagcgccgtgttctgcgcgatggtggcgagccggtcatgggactgctcggtcatcggcttggacgggtcgtacaggaagtaagcgtacgcgcgctcgcggccgcgaccgacgcggccacgcagctgatggagctggctcaagccgaaacggtcggcatggtcgacgatcagcgtgttcgcattggagatatcgagaccggtctcgatgatcgtggtgcacacgagcacgtcgatgtcgcgatgccagaagtcgcggatgatctggtcgagctgcttctcccccatcttgccgtgggcgatgccgacgtgcgcctcgggcaccagcgtgtggatcttgtcggcgatggacgagatatcctgcacacgattgtggacatagaacacctggccgcctcgcagcagttcgcggcgtacggctgcggtggcctgcgcatcctcgtaggcgcccacataggtcagcaccggcaaccggtcttcgggcggggtggcaagcgtggacatctcgcgaatgccggtcacggccatctccagcgtacgcgggataggcgtggcagacagggacagcacgtccacgttggtgcgcagggctttcagcgtctccttgtgttccacgccgaaacgctgctcctcatcgatgatgacgagtcccagatccttgaacttgattttcgggttcagcagcttgtgcgtgccgatgaccacgtccaccgtgccggtttccagaccctcgatggtctcgttgatctctttggtggtctggaatcggctcatggccgccacattgaccgggaaaccctcgaatcgttcgctgaacgtctcgtaatgctgctggacaagcagcgtggtgggcacgagcacggccacctgcttgccgtcctgcacggccttgaaggcggcacgcagtgcgatttcggttttgccgaagcccacgtcgccgcagatgaggcggtccatcggcacgggcttctccatgtcggatttgacctcgtcgatggtggtgagctggtcggcggtttcctgataggggaaggcatcttccagttccttctgccatggggtgtccgggctgaacgcgaagcccctggcgcgctggcgggcggagtacagcttgatcaggtcgtcggcgatctcgtggacgtgtttgcgggccttggccttggtggccgcccagtcggagccgccgagcttgttgagcttgggggcttcggcaccgatgtatttgctgacctggtcgagctggtcggtggggatgaacagtttgtccgccggggcgccgcgcttggaaggcgcatattcgatgaccaggtattcgcgagtggttttgttggcgccggtgccgatggtgcgctggcgcatttcgatgaaccggccaatgccgtgctgctcgtgcaccacgtaatcgccttttttgagttccaccaagtcgatggccttgcgccggcgtttcggcgttttggccacggccacggccgaagtgcggccggtcaggtcgcgttcggtgagcagggcgattttggcggctttgtccacgaagccgtcgatggcctgagagcggatgacgtcgaaattggcgatgccggtagtgttgatcgcgcgcctgagcctggccaaggtgccggccgcagcggcggtgatggtgacgtggaagccggcgtcgagcaggccttcgatgccttgggaggccttggcctcatcccctcggaattcggccgggttctgggcgtcgagctgcacatggccggtcagcgtggtgtccacgccgaaactggtgaggcgaatcaccggatgttcggagtattcgagggagctgatggtttccgcatagtcgaggaagctggctttgtcgaagctgatgggcgcgccggcgccgtggccggaagcggccacatgccagctggcggccaggaactcgttcgcggtttttgccaagtcttcggcggaacggcgcagtttctccgggtcgctcaggaggatcacggcgtgcttgggcagcatggagcccaccggttccagatggtccacgagcgcgggcatcagggattccatgccttcgaccggaatggcgttggcgatggattcgagcatgtcctcagcattgggaatcgaaccgaccaaggctttggcgcgggcgcgcacggcgtcggtcagctgcagttcacggcatgcggtggcccagatggtcttgaggccgtcgccgtaggtacgctggtcggaggcgtggaattccttgatggtgtcaatttcgtcgccgaagaattcgatacgcaccgggtgcggtgcggtgggcgggaacacgtcgaggatgcctccgcgcaccgcgaactcgccacggtccatgaccaggtccacgcgcgtgtaggcgttttcgatcagacgtttggcggcttcgtcgaggggcaggtcctcccccacggtgaacacgagcggctcgacgtcgcccagtccttggacgaccggctggatgagcgagcggatcggcatgacgagaatgcgaatcgggccgaacatcggatcggtatcgctcggatgcttgagtctgcggaacacggccatgcggctggccacggtgtccgcgcgcgggctcagacgctcgtgcggcagggtttcccaggcttcgagctgggcgatgtcgtccgggtcgccgtcataccaggagcgcagcgagcccacggtctcttcggcttcgcggccggaggccacgaccagcacgaccggcttgccgggtttgccggtcacaccctgcccgatggcggcggccaaagccgggcgcaagccttcggaaacaccggccagaacggaattgtcgatgtcgtccgaaacctcgatgtcaccagtggcgagtctaaggaaggtcttgtcctgttccagctcagacaggatgcctaccagtgagccattgatcaggtccgggtgcgtcgcctcaccggccattgaacttctcctgggtcttggcaagaccgcggaagatgatgtcctcggcggcgtcggcaccgtcagccaggaattcgggcagctgcttgcgctggtccggaccgaatccgcccagcacccagttcaccgtgttgtcatgcgcgttcgcaccgcgcttggagtgaccgacgcccatgcgcacacgcgcgtatttcggcgtgccgagggaacggtcaatcgacttgatgccgttgtggccccctgcggagccgcctgccttgaccttgatacgaccgaattccaagtccatgtcatcgtgaatcaccacgatatggtcgggctcgatctggtaataggcgctaatggaagccaccgcattgccggaatcattcatataagtcagcggcttggccagaaagaacttgacggtgcggccgtccaggttcatcacgcttttaccgagcatggccagacctttgtggtcggcgaagttcaccgtccaacgttcggcgagcacgtcggcggtcatgaagcccatgttgtgccgcgtgtcctcatattttttgccggggttgcccagtcccgcaatcagccagaaatccgatgccataatccactcctcgtccgtcttcctatattcccgtatgcacgttctgtacgttccgtacgtcatgcgcgcgttcgcctcgcgcactggcccatgcccggccggattcaaccgtcaagattgtactcaacgccgccgtcaagccttggaatcggcaagcagcagggcacggcattgctcggcatccatcgatcggaccgatgaatggtgaaacgcttcgacgtcacgagtcacgatgacgtcggcgtcattgtcctcggcaacggcacggatgagcccgtcctcgaagtcgggctcatcggatcggtacgacatacacgcatggcgttccataagtggacggatgtcgaacaattccatcagtccaccgatatcgtctcgcgccgcccgctcctcgccataatgcttgcgcaacacgcaatacacgtcattcaatgacgataccggcgccatgatctcaatgtttggctgtgcaacggcttccatgagcaaatcaacacattgtttatggaaaggcgctcgtttgtcattgcacaaatcgagcagaatactcgtgtcaaacagcagtttcatcccgtcccccaaatcgttccatacgtgcctgcgcgagaatctcctcatccgaaagatcgccttccgcctccggcaaattccggtcggcgaaacgttgaatcaactcctgctttttcctacgctcccgctcctgaatcagggagagcgtcagacgctcgaattccggcagttcccccgtatccgcaaggtagtcggtcagatcacgaatcaggtccgaataggtgcgcccattacgcttaagcactttctccgcgtcgcgcttccgttcggcattgacgcgcgccgtcaccatggccatagtcatatcgcacctccttgtaataccagtattacaagagatggggacgagtgaatcgcgtctattaggcggtccgccagcgaccttttcgcgctgtttgccgttgaggtaccagtaggccagcgccacgaacagggccgccgaggatattgccgagcgtggctgcggacaggttatagaggatgcccgacacgtcgagcgccgcgacacccgccgcgtcggcgccgaaaccaaacgttttggcgaccaggcccatcggcaggaagaacatgttggccacgcagtgttcgaagcccatcgccacgaatccggcgatcggcagcaggatgcccagcaccttgtcggatacggagcgcgcggcgaatccgatgcgcacggccaggcagacgagcacgttgcacaggatgccgcacacgaacagcgtgtcccagcttggcgtcactttaacatcaactccggttggaaaaaatctcagtatgtagcattcggttctcaaataggagaaacatgcagcggcaatcaacaacttgtcgtttacgacaccaagcaagggaaacagctcagacagatgacgcttccctgcaatcggatgacatattgcgggacggcagcggattttgggcgttcttggcgtggcatcccgcaagcgttatcgcacgttatctgcaccgaatcataagaatggcagaattccaatgatttcgcaggaagagttgcgggacgcgagctatgtgcatcgtttgacgtgtgtggcatcccacgtgattgcgggataccacgtctaaacggacgaaaatcgcgtgccgtcccgtagtttgccgttatctgggataagcgcgtccgatatatggcgttcgaggaaaagagctgatccgatacaactttttagtgttataggacaccggaatccatggagagcaagggtaaaccgcctcgggcctacaggtccaaataccagtaggacatgtcccgcatggtgccggtggagtcggtggcagcggcgggcatgaggccgaattgggtgaagccgaagcggcgcatgagggcaatggagccgacgttatcggcgaaaatgatgccacaggccttgcgcatgtggcgggcccgcgcctcggtgagcagcctgtcaagcatgaacgtgcccactcccctgccttgccatgccggatcgatgtaataggccaaatcggtgacgccgtcatacccggcacgatcgtagaacacggagagcgcaccgaagccgatgattgaaccgtcttccgattccacaacaaaaacgccgtagggcggcgtatgggattcgacccaggcgcggcgttggtcgagggtgcgcggggtgaggtcggcggtggccccacccgccaccaccgcagcgttgtagatgtcggtgatggcttggatgtcggattcgacggccggatggaaggtgtatggcatgaagttcctttgaatacgcagatagcccgtccttatgataaggacgggctatgtcagttgaggtaaccgactcccttcagtcgccttcggcgatagctcccctcaccctgagggaagccaagttacttgtcgagctcgatggccttgttgagggcgtcttcaagctcctgctgcgccttgccgtaggcggtccagtcgccgttcttcatggcggactggctgtccttcatggcttgggcggcatcgttcaacgcctgctggagttcggggctgcggtcggaagacgagccggaatccgactttccgtccgtggtgccggactgaccaccattggtatcggaaccagattggtcaccggacacgttctcggcatcgcccgcggccgcaccggaattgccaccgaacacctgatccaaggcctcatccaacgtatccgcgaatccaacctgatcaccgaatgcgaccagcgtcttcttgagcaacgggaatgaggtcacgcccgaagacttgacgtacacgggctgcacgtacaccagtccgccaccgagcggcagggtgagcaggttgccgcgcaccacttgcgtgtcgccggattgcagcaggttcagttccttggatacatcggcgttggcgttgaagttgttctgcgcctggccggggcccggtacgttcgaatccttgggcagctcctgcaatcggatggtgccgtagttcgagcctatcttgcccttctcattgccggcatccgagtcgaccgacaggaagccggtcaggatctcacgggtggactggccagccggaatgtaggtggaggtcagcgagaacaccggttcctcggtgccaccggtctgcaaggtcaggtagtacggcggctgcaggatgtcctggtcctgctgggactgggattcggtcggatcgaccggcgtctgccagaagtcttcgcctgagtagtactggctggcagaggtcacgtggtacttggagagcagctcgcgctgtaccttgaacaggctttccgggtagcgcatgtggctcatcaggtcgccggagatatcggagagctggtggtactggccagggaagatcttctcccatgccttgatcaccggatcggattgatcccacacgtacaggtccacggaaccgtcgtaggcgtccacggtggccttgaccgagttgcggatgtagttggccttctgagagcccagggacgagaccgttgcggaagagacggtggtggaatccttggtggcggagccgaggtcggttatttgcgagtacgggtaggcgtcggaggtggtgtagccgtcgacgatccacttgacgcggccatcgaccacggccggatacacgcggccgtcaagcgtcaggtacggtgccaccttggccacgcgctccttgggggaacgatcgtagagaatctgcgattcgctggtcacacggtcggagaagagaatctgatcggagccgaagcggatcgcgtagagaatcctggagaacaggttgccgaccgaagggccgccgtcgcccttgaacgtggtcagagcaccttccgaaccggtcgggtagtcgaactcccaagcctgcgtgccttcaggggcaccgacaatcgagtattcggtggtgttcggcgagaagtagatgcgaggctcgtacttttcggattcggtgagcttgccctgggtggggatgccggattcgaagaattcgggctggccgtcggcggtcaccttgttgccgtaggcggccaccacgccgtaaccgtgggtgtacacggtgtggtcattgacccagttgcggttgtcattgccggccagatcgagctcgcgggcggcaatcacggtgtcctgggagacgccgtcaatctcgtacttgtcgaccgccagggtgtcggcgaaggtgtagtactgcttggactgctgcaactgtttgaacgtggggctgacgacctgcgggtcgagcagacggatctgcgcggtggtgtcggcctccttggccagagcgccctgctcacccttgtcggtcaccttgtattgctcggtcttgagcttgtcaagaccgtaggcggcgcgggtggcgtcgatgttgcgctggatgtaggtggattccatctcctgtgcgttcgggttgacgcggaagcgttgcaacagcaccggccatgccacggtgagtacaagacccaccacgaccacgacggcaatggaggtcaccggcacacgccaggccttgagcgcggcggaagcgcgcacgccgatggacgcctggccttcgagcgtgtgggagcgcatgagccagatgcccagcaccacgccgaggatggcggtcagcacggccatgatgaaggtgacggggatgttggcatgtacggcggtgtaggaggcaccggtgatgcgtgaaccctgcacggtgagctggtcgaagacgccaatcatctggcgcactgcccaagcgaacatgttgagcatcagccagatgccaagctggcgacggcaacgcttggtaatggagaacaggccgcgtccgttaaccggcatggtaatgcggataccgcccatcagcacatgcgtgaccacggaaaacacaaggcccacgcccagcagcatggccacggcggcgagcacgagcttcaggcccggcagcacgaacacgtagaagccgttgtccagaccgaactgcggatcggtggtgccgaacgactgcgcgttgaacatgagcagaatctcgctccagttcgcgttaaactgggaaccgaagatgacgccgacgatcagcgaaatcaccacagccacgcggcgagcggttttcgagctgacggatttgccgacctcgaccacatcgccgttaatgcgaatggtggaaccgtcggccgaatcagggcgtgctcgaatggccagccaggcggaaacgaagccggtcagggccatgagcagcgcgtaggccacccacagaccgattttcaccccgagctgggtccagaccacggactggaagccgagctggccgtaccacatcagatcggtgatgaatcgggacaggccgaagaacagaccgacgatgatggccaaggccagcaccacgccgatcagaatcttgctgccacgactggctcctgagccaccggacgctggcttacgggtgatacgcggattggccggaccacgtggagggcgggatgacccggaggggccagcgttggtgttgtgggccggaccgtccccatcggcctcgacatcgaggatgatcggatcgtcattgttcgcattgttgcgtcgtgaattgccgccattgccgaacagtactgagaaaggatcgttaaaagacataactcaagcctatcgaaagggcgggaggtcggttatgccctgagcacagaatgaggcaacatcctgttctacgctctgttctacgcttgccgctatgaacagacaacggccacaacatatgcgtccctcagcacacgccacacgccaacttcggcacaggagcattccaatcgtggcggcaatatgtgctttggcggtggtgttggccggtgtggcagtctacggatggcatgtcggatggttcgccaaatccacatcaaacggcaacaccaccactccccagacctcccagacgagtgcgttaccgcgcaccgacgttccttccccgaagaagaacgacgatccggcggcacaagcccaacgtgcggtatccgccatgacgcttgaggaacgtgtgggacagttagtgatggtgccgttgttcgccggttccgaaccctcctcgttggcttcaacaatcgccgacgagcacattggctcggccattctcattggcaattggaataccggcgtcgatacggtcaagaccgcgaccgcgcaactccaaggatatgcgccggccggcaatcgtctcatcatcgccaccgatcaggagggtggtcaggtacagcatctgactggtaccggtttcgacacaatgcccagtgccgttgagcagggcacaatgtccgctgacgcattgcgtcaatcggcaggcacgtggggttcgcaattagctgctgctggcataaatgtcgatttggcaccggtgctcggcacggtggtgggcgatcgtgcctcaaatgctccgattggcgcgctggatcgtgatttcggattggatgcggccggcaacgccgaacatggcatcgccgttattgaaggtttgcgagacgctcaagtcggtgcggcggtcaaacattatcctgggttgggcgcggtaagcggcaataccgacttcaccaccgaaggcattctggatacgaccaccacgttggacggggccgaggcaggtgcctttgaccaggcgattaccaaggccgatcctgcaatggtgatgatgtcgtcagccacgtatcaatccatcgacccgaataatccggcggtgttttcttctacgattatcgacggtcatattcgcaacgtcctgaagtacacgggcgtggtgatttcggattcgatgtctgccgaagcgttgagcagctacgatgtaagccaattgggagtaaatcttgtcgaggcgggcggcgacatgtcctgcatcggtcagacggattatgtaaagccaattgtggacggcctcaacgaacgggcgaagtccgatccggctttcgcttcgaaggtgacggcggcggcgactcgcgtaatgacattgaaaatcaagatgggactggcctgaccgttcatccttgcactggcgaggattgatgcgcgctgattcgcgctaatcctcaccagccctcgtacaaatgcacactagtcctcgtacgaatcgtcagtcctcgtacgaatacagaccatgcttgccgatgtattgcaccacaccgtcgggcaccagataccagaccggctcgtcgtgttcggcgcggcggcgtacatcggtcgaggagatggccaaggccgggatctcaagcgtatcgaccttgccttcgggcaaggtcacgccgtccgggctggagtagccggggcgcgtgacggccacgaagtgagcgaggtcccacatgaggtcggcgtccttccactgcatgatttcggccacggcgtctgcgccggtgatgaagaacagctcggcgtcgggatgttgggcgcggatatcgcgcagagtgtcgatggtgtaggtgacgcccggacggtcgatgtcgacacgcgagacggtgaatttggggttggatgcggtggcgatcacagtcatcagataccgatcctcggcgttggtgacgtgcttgtccagcttgaacacaggtcggccggtgggcacgaaaatcacctcatcgaggtcatacacccaggcgacttcagaggcggcgaccaagtggccgttgtggatcgggtcgaacgtgccgcccatgatgccgacgcgcaggcgtgtatgccagttgccgcgtgcggaaagcctgcctttgccgtggctgctggccccggccggtacggacaggtcggacatgcgccgttcggtttcgccttgggtgacggcaatgatttcggcgggctcggcggattccactgttttttcggactgaactgacgcagccgttttgtggctgccggtaacaccactcatgcctggccgccctcgccggcggcgtcatcggctgattcggtttcctcttcgatttcgccggcggagggattgtcttccttgggatcgatcttgcccatgtcttcatcccattcgtcttggaccacgcgacgaatctcggcgaaggtgggcagcgggaagtccggctggtagaggcggcggacctcggccacgcgctcggtgatgcggatgagcgtgtcggtcatgccgtcgaggtcgccgtcgtgctccatctggctgtatttgccgatgtagccttccatgagttccatgtgttcgcgcacgatcttgagctgggcatcgttgaggtccacgacttcgggtgaatcggtctcgggccagccgatgagcacggcgtccgcgtattcgagcgacgcacgctgggcggcggaggcgatgccgtcctcaatctgcacgaggaacacatagcggacgatgctgagccgttcggccgcgatcttcaggccgagcttgggatcgttgaggtcgatgtcgggccgcagttcgcttgccttgtttgccgtgtcagccgtagtgttcatgttgccgtcctcgttcatgcgcgcacctggcctgttccgtaaccgatccacttggtggtggtcatctcccgcaatcccatgggaccgcgtgcgtgcatcttctgcgtagaaatgccaagctcagcaccaaagccaaacacgccgccatcggtgaagcgagtggaggcgttgaccatgaccacggccgagtcgatgcgcttggcgaattcctcgatggccgcataatcctcggcgatgatggattcggtgtggcccgtggaatgcgtgttgatgtggtcgatggccgcgcccagatccggcaccaccttgatgcccatcttgagggccagatattcagtgtcccaatcctcctcggtggcgcggttgaggtcaaggccctcgatcgccgcgccggagatgatgtcatacgacgtggtgtcggcctgcagtacaacgttcgcctcggccagagcggcggcgatctgcggcaggaattcggcggcgacatccttatggaccaatagcttctcggcggcattgcacacacccacgcgctgggttttggcgttgatgatgatcaggatggccttggcgagatcaccggacttgtcgatgtagatatgcacgttgccggcaccggtttcgatgaccggcactttggagttgcgcacgacggcttggatcagacccgctcctcctcgcggcacgagcacgtcgatatggcctcgcgcctccatcatggcggtggctccggcgcgtccgtactggtcgacggattgcaccagtgcggattcgaaaccgtgtgcttcaagcaccggggcgatgacgcccagcgtggcagcattggtgcgttcggcggcgtgaccgcctcgcagcaacgcggcattgccagatttaaggcacaggctggccacgtccacagtgacgttcggccgggcctcataaatcatgccgatgacgcccatcggtacgcgcgtctgggtaaggcgcagaccgttgggcagattgtatccgcgcacgatttcgccgaccggatcaggcaaggtggccacatgacgcacgccttgggcggcggcggccacgcgcggcacgtcgaacagcaggcggtcaagcttgcccgcatccatgccgttttccttggattcgagcatgtccagcgcgttggcggcttcgatgtccgcggcgtgctcgtccagcgcgtccgcaatggcgagcagcagttcgtttttggcttcggtatttgcctgtgcaagacgctcctgcgcgcgtgcggcctgatcggcctggcggcacaccgcgtcgaacacctcaggactcaattcatcgctcataacagtcaagcgtaactcacaacgcggctgattgcttactccgacccgcttgttatgggatgtctgacgttttgaatcgcaaacagaaccggctcccctccgtctcaggcgggaagccggtgacgtgatgcgctccggtcagcgaatcatcactaaccggtacaccacggtggattagcgaatcagcaaatcagtggatctggtccaggtcggggtagagcgggaagtcttcggcgagcttgtcgacgcgggccttcagcgcggtcacgtcggcggacggtccggcggcgagcgcggtgccgatgatatcggccacctcctcgtattccttcggcccgaagccgcgggtggccagggcggacgtgccgattctcaggcccgaggccaccgaggccgggcgcgggtcgaagggcacggtgttgcggttgatggtgatgccgcaggcggcgagcagatcctcgccctgctggccgtccatctcgctgttgcgcaggtcgaccatcaccaggtgcacgtcagtgccgcctgtcagcacgctgatgccgttggccttgacgtcatcggccagtagtcgttcggcaaggatcttggcgccgtcgagcgtgcgctgcatacggtccttgaattcgggggtgccggccaccttgaagctcacggccttgcccgcgatcacatgcatgagcggaccgccctgctggccggggaacacggaggagttgagcttcttggcgtattcctgcttggcgaggatgaagccggagcgcgggccgccgaaggtcttgtgcgcggtggaagagaccacgtcggcgtacggcacaggactcgggtgcaggcccgcggctacgagtccggcgaagtgggccatgtcgacccagaatttggcgccgacctcgtcggcgatctccttcatggccttgaagtcctcgatgcgcgggtaggcggaccaaccgccgatgatcatggccgggtgggtttcgagcgcacgctggcggatgatttccgggtcgatgcggaaggtctcggggttcacgccataagcctcggcatggtagaagcggccggagaagttgattttcatgccgtgggtcaggtggccgccgtggtcgagggccaggccgagcacggtgtcgccgggcttgacgagcgcctggtagacggcggcgttggcttgggcgccggagtgcggctggacgttggcgtattcggcgccgaacagggccttggcgcgttcgcgggcgatggtttcgacttggtccacgtattcgcagccgccatagtagcggcggccggggtagccttcggcgtatttgttggtcagcacggagccctggcattgcagtaccgctcgcggcacgaagttctcagaggcgatcatctcaaggccattgcgctggcggcccagttcggagtccagcagttcggcgatctcaggatcggtttcgcagatcggcgcgttgaaagcatcggtcgctttctgcgcaaggggtgaagcggtcatgggtgctcctttggtatgggcgacaattgattcgccgttgccgccttactgtatggccggtttgtagccggcctgtttcatgatatggccggtccccgttcgatggcaatggtgattttcgccggtttgaccggtcggctatgcgagacggacggcccttctgcccacggcccacgctaaactggtgtggattcatcatccctttcaggcagaaggattcatcgtgacaaccaccttccattccacccgtagcaccaccgattcgctgaccgccaagcaggcgattcgtaagggcatcgccgatgacggcggcctgttcgtttcggacgcgttgggcaagaccaaggtggacgtggcctccctgccgggcaagtcgtaccagcagatcgccgccgaggtgctgggcgcgctgctgccggacttcacggccgaggagctgggccagtgcatcgccgacgcctacggcgaacagtggtccgatgagcgcatcaccccactcaagcccctgggtgacgattacgtgctcgaactgttcaacggtccgacttccgcgttcaaggacgtggcgctgcagatcctgccgcgcttcatggcgcacaccacgccggccgatggcgacgcggacgagaagatcatgatcctcaccgccacctccggcgacaccggcaaggccgcgctggccggcttcgcggacgccccgggcaccgcgatcaccgtcttctacccggaaggcaaggtctcccaggtccaggaactgcagatgaccacgcaggccggctccaacgtgcaggtggccgccgtggaaggcaacttcgacgacgcccagtccgcggtcaagcgcatcttcggcgactgtgccctggccgagcgtctcgccggcaattcgcacgtggtgctttcctccgccaactccatcaacgtgggccgtctggtgccgcaggtcgtctactacttctccgcttacgcccagctgctcgccgatcaggtgatcaacgtcggcgatgaggtcgagttcgtggtcccgaccggcaacttcggcgatatcctcgccggctactatgccaagctgctcggtctgccggtcaagcacctcgtggtggcttccgacaagaacaacgtgctgttcgacttcctgaccaccggtacctacaaccgccagcgcccgttcttccagaccatctccccctcgatggacatcctcatctcctccaacctggagcgcatgctgtactacttgtccgagggcgacacccgtctgatctccatgctgatgaacgacctcaacaagtggggcacgtacgagatcccggaagaactgctggccaagattcgtcagatcttcggcaccggttgggccgatgaggatcaggtacgcgagtccatcaaacactgctgggacgagaaccactacgtgatcgatccgcacaccgcctgcggctactacctgcttgagcagatgccgcgcgacccgctgaccccgcgcgtgctgctctccaccgccagcccctacaagttcccgcgcgtggtgaacgaggcattgggcttcgacgccaccggcaccgacttcgagtgcatggatgtgctggcccacgagaccggcaccaccgccccggccgccctgcgtggtcttgagaccgccgacgtgcggttcaaggacgtcgtggccatcgacgacatggaggactacgtggagaaggccgcccaggcgctgtaaacataccagcacattggctcccctcagagcggggagccattttttacatcagaattgcgtttacatcagtatcgcggcgactggcagtcctatggcgattgccaacagcacgatagtgccgatgatcacgctggggcgtgcgaggttgacggtccagccgacgccgaaacgtttggggatcatgatggcaggatcgtcacggttgatgtagatgatgccgccaatccagtgcaggtcatcgtcatacggcatggcattatcgtccgaaatgtcaccgccgtcactgtgccgaacaccggcatagacgcgcgccccgttctgcccgtaatacacgccgatcatcagcgcgccgaccagagccgccacggcgatgaacatgccgatgatgccgattagattgatatccagcacgccaatggtgacaagctgaacgcctaggcccaatccaccggctgccagcagtccgatgaccagcacgtagatgctccagacccgcgagaacacaccataggcatacccggtggcggcggggtggtcgggatcaatcgggtgcttggcgtagatgatcgcggcatggctggccaccatcaccgctgccagcaccacctgcgcgagcacggcgtaccaaatcaccatcggactcttctcggcccaaccgttcacattgccggcgatatccgcatgaatcggcacccgctccggcatccggtcatagcccagcaacccgacagcaatggtgacagcgagacaaacgacttgcagcaattcccacttcaagctcatcgggtcgggattgtcccgctcacctatcaatgctgcacggcgggcactggacgcctcccatccctgatcgactttgatggatagtactttgcggcgaaacatctgctgcagcacgaaaccacatatcgcaatcgccaccgctgcgatggacacagtccagaacgccgcgtcgactccgcagagttgccaaacggccagcgagaccagtatggcgcatacgccaagcgccaccgtaattcccgaaaacgcgactttaaatccgcgaatgcgcgtattgacatgggcggcggccggcactgtgacaccgaacacctcatgccggtcggtaacccatggaacccctgccaggccggcggtcactatcaccggcaacagtaaaaacgcacacaacgcgatgttcatcgacacgactgtattattcatcgttatctcccctgatttccttttgttgcaccgtcagtaacgctctgcgaggagcgcacgccgtatgcccgttcgcattgccgtttggtggcatcgaggaatgcggccgaatcaccgccgcgcgccctgtaggccaaggcaaggcgatagagttcctcgcccatccgctcatcctgtgcttcggcagttcggttcggtgcttctcccccgccgtcatgctcggcgacggttgcaccggcactacgacgcataacgatgtatccctcgtcacgcaacagcgcataggccttgttcaccgtgtgcaggttgatgccaaggtccacggccagcgagcgcacggacggtaacgagtcacctggcgacagctcatcgcccgcgatggctgcgatgagctgcctgtgcagctgctcgtaaatcggcacgtcactgcgctgatcgatttccacaatcacggtcaattccacccctctcaagaactgttctatttgttctacatcaaatataacagttttgccgtatgagtcaagatatgcgaatctcggttgaacatccggcaatgggccaacggcgtgttgcttgaattttctaggaaggcgggaatcgccatgctgccggcgaatgggaaaatccatgtggcttgtcagattctgttcctgcaactgaatagtcccatgagggagtagacagcattgcggcgaagggctcggcccaaaccgcaataaagcgtgccgagcgccaaagccgccaacaccggtatgacgccgctgcaggagaagctcgcgaagctggacgaacttcatgggcggcaccgccgaacagcagtcgaccattctgttcacgctgttcgtggtattccagctgttcagcagtcgaccattctgttcacgctgttcgtagtattccagctgttcaacgccttcaacagccgcgagctgggcaacgccagcctgttcgccaatctgctacgcaataaggtgatgatcggcgtgttcgcgctgatgttcgcacttcaggtgctggtggtgcagttcggcggagcgatgttccgcaccgtgccgctgctgatcgacatgtggctgaagatcatcgcggtcggacagatgcgcggttagagttctttggctcggtagatgcggatggctataagcatggagccaaaatatgcgagcagacacaacacggcgagaacaagcgccgtatgccaccagatcgtcaggaaatcggcaatattcagcaatagccattgccagtcaacaggcaatcgggccagcagcgcaatgactgcatacaagccgacaatgaccgcgccagaggccatcatcatcttgcgggaggtgaaccggtatgcacaggccagcagcaccgacccaagaatgatagccaaagcgaagatggaagcacctgctgccaaggtaccaatccaccccatatctgctatatcgccaaagacaatgaagacgccgccgcatatcaccacgtccaaagcccagagcaggccaaccaccaacagaaaaaggtaccgacctacaacttgtgcagtgcgtgaaacaggaatcagccctcgcatggcactgtgccctgcagattcctcggatgacgcaggccccaatgcactcatacatgccatcaccgatgccagacctccgagtccgcccatcagaccactggcaacgtgttcatcgacgtgggtcgatatcatcaccagcgataccacgatagacagcaccgggaaaaccagcagaaataccatattcgctacgctaaacagacctgtcccaacacaatcgaatcgacattgctttactacggatttccagctcatcgtcaccattcccttgaagcaaatatgcgagaggcaattacatacgagattccatatgccacaaccgtcgttgccaataccgcaataaccagccacaatcgttgcgcgatgatggcattcgcggcatgggccaatcctttggtcaccgaagcaggcaaaatagatagcagtatgaatccagccaatacaacgacataaatcaccatcatcgtgacttgaagaccgcctagtttggtccacagataacccgtgggcacgataagcgcgaccatcagcgcggtgcagaaacctcccaacggagccgcccacagattgcccgcgaatgaccaatccggattgaccagcacttgcaacccgtcaatcagaacaatcatcgctatcgacaatacggaaatcaccaatccaaccacatatcgcgcggccacctgactcttcctcgaagccggaataatgccacgaagtcgatatccgttctgtaagtcagcaaccgccatggtcagcacccacatggcgcaggtgaataccgtcatgatgacacccatgcgatagccgaagccatccccataagcttcaccttgaaagatgacggagaacaacggtgccaacaacaacgagaacacagtccgttcgccgacgcacaggtaggccatatcgacgcgcaatgcagtggtcaatgcatgttgccgagaccgcgacaccctcagtattgcctccatggccgctcacctcccgctcaagtcacgattggaatcatgggcattggtcagtcgaatgatgtcatcaatggaagccgattcaacgacaagccccgaaaccaccgatgcaacagcatcaagcctgtctgaccggaccagcgcatcgaatccggtggcatacgtatgtgagcccagcactacgtccgcaggcagttgtgccagttcgtctggaccgcccttaatcaggcggaacgattcctcaaactcgtctttcggaccggtgtagtagagacggccatcggtgatgtaggtaatgaagtcagcagcacgttcgaggtcggcagtgatatgggtgctgaacagtaccgaatgttcgccatcctcaatgtaggcatgcaggatatccatgagttcgtcgcgggcaagcacatcgagtccgctggtcggctcgtcgagaatcagcagcttggcgtcatggctcaatgcgatggcgagcatcagcttcatctgcatgccgcgggaaagatccttgatatgtttcttgccgttctgtgcgtcaccaaggccaaaagtatccagatacttgtgatagcatccaccgtcccatgatggatacagtggcgcgacaatacgttcaatgttcttgacttgccactgttcatgcatgtagctgaagtcgaacaccacgccgagttgttctttgacgggctcctcgttggcgatgttgtcgaggccgagcacgtgaatcgaaccggcgtcgcggtggatcatgttgaggatgagtttgatgagggtggatttgccggcgccgttcgggccgatcagtcccatgatgtagcccttgggcaggtcgaaggtcacgtcgtccagcgtgaagccggaatcatagtgtttggtgacgtcggtgacctgcaacgccatcgcgtcggattcggatatggcggtcatggccatggtcctttcttgaggttatttcttgcggtattcctcttcgagcatgcggtccaatgcgtccagcggaatgccagcggctttggcgccccggcttgcctcggccaggctttcgcgaatccgggttttgagctgacgttgcatcagttcgttgcccttgtccatcacgaaagtgcctttgccttggatgttctgcaccacgccctcatcggccagttcgttgtacgccctggtgacggtaagtacggagatgcgcagctccttggcgagtttcctcaaggaaggcagggcctcgcccgccttcaactcgccgctgagcaccgccgaacggatttgggttttgatttgctcgtagatgggttcaccggacacggatgagatgatcagtttcacctatgcccctttcgattgtggttgactagcaccccagctgtttagctgttatacaacacagtataactgttctgcttaactgtcaaggtgtgttacataacagttgaacggtgaacaaacacctcgccaacatacagtgtcgaaacatgggccgtgcctacaatggcctcggaaaggggtacccatgccgaacaacgccgttccgccgacagccccgccagcgggggcgtaacttttttatcacagcacgcgcggggcgtcgtggaagtcgaagaggacaccgtcggctaggtggcagatttcgggccagtcggaggcggaggagtcgtcgtgcatggcccagaccttcatgccgaccgatttggccgacttcatgccgaccagcaggtcttcgaacactgtgcagtcgtccggtgcagcacccaggcgcttggcggcgagcaggtagacgtcgggctggtccttgccgacgtcgttcgcgtcatcgacggagacgatatcgttgaacaaatcgaacatgccgacgtggcgtagcgccggctcacgcagacgcgggggcagcgaggtggcgacgcccagtttgacaccggaggctttcagatcgcgcagatagtcaagcgcgccgggtttggcttcgaccgtggtggaataggcgacgctggccatgtcgtcccattcctgcatgagctcttcgggcgtgtctgtaaggccgaagcgtgcgatggtgtattcggcgatctggcggaattgcatggcggagactttggtcatgtagtcgggcggcacttcgattccgcgcttgttcaggaagtcgatgtcgacttggtcccagactcccatggagtctaggagggtgccgtcgaggtcgaatatggcggctttggtcataggacactttccttcaacagttctcgggcgtggtctagggaggcttcggattcgctgccggagagcatgcgggcgatttcgtggacgcgggtttcgccgttgacttcggcgatggtggtgaccacgcccaaatcgtcgtcatcggcatccggcggctccttggtgaccacgaactgcgcgtccgcccacgaggcgacctgcgccaagtgggtgacgacgatgacctgcgcgctgcgggccagccgtgccagacgtttgcccagttcgaccgcggccttgccacccacgccggcgtcaacctcgtcgaagatgaaggtctggtcggcaccgccgcgcgtgtcggcggccaccagttccaaggccagcatcagtcggctcagttcaccgcccgaagcgcttttgcccatcggcaactgcggcgacccctcgaacggcgtaaacaggaacgcgatatcgtcgcgaccatacggaccgagcggatcatcggccttgtctcgcggcgtgacacgcacttccaaggaggcgcccagcatggcgagcgagccgagttcttcagtgacgcgcgcgcccaagtcggcagcggcagccacgcgcgcggtgctcagcacgtcggcggcggcgagggccgcatcgtacagcgtctgccgttcggattcgagttcggcgaccttttccggcgaggcgtccagatcctccagatcgaacgccgccttgtcccgccaagcgagcacgtcggccaaggtggggccccaccgacgggtgaggtcgccaagctcgtggatacggccgttgatctggtccagatcctccacgctgccttcgtcgcccagctcctggctcagggcgaacaccacgtcgcccaaatcggcattgatggattcaagccgatcggcctgctcggcgaacgtgccgccgacgcgaatcgcgcgcaacgaggtcaccgcatgattgatgagttccacggccgaagcgccgtcggcggcgtccacatccacctgcgaggcatccagcgcgcccagcgccgaacccacgccttgggcgatgtcagccgcgttttcgatgcgttcgcggcgcgccttcagctcctcgtcctcccccggctgcgggtcggttcggttgatgcggtcgatggattcgcgcaggtagtcggcctgttggcgggcagaggattcctgcgagcgcaggcgttccagccgctcatccatggcggccagcgcatcccacgccttgcggtaggcggccagttcggcttcgtctccggccacccggtccagaaactcgcgttgccgtgcggcggccgcgattttcagctgatcggtctggccatgaatgatgaccagttcgccggcgatggcccccagcaccgaacgcggtacggacttgccgccgagcacggcccgcgaacgtccggaagcgcgtacggtgcgggaaaggaacagttcgccgtcttcggggtcgacgcccgcgtcgtgggctttggccacggccgcggcagcaccggtgagcccgctgtcagaatcgtcagaaccggcatcgtcaccggcatcgttggtgtcgccggaatgttcagatgcgacggcatcatccgcgagcgcgaaaatcgcctgggcccaagcctcgtccgccccggccgagacgcgcgaggattcggcggccccaccggagaccagtcggatcgcggagagcagcatggatttgccggcaccggtctcaccggtgatggcggtcatgcctgcggccggcgcaatggcggcttctcgaatcggccccagattgcggatatcgagttcttcgagcatcaggctcctgccttgccgtcacgttcgcccggcttgtcgggatcggtaccagcgacaccagcgtcaccggcaacgccagccgcatacgcggccgccgggaacgtgtgcccgtgatgcagcggctggctcgaggcctcgttgcgcgcgtgctcgcgccaaccgaccacgggcagatcgaacttggagaccagacggttggtgaacggcatgccggagagtcgagcgaggcgcaaggtatcgcgcgattcgcgcaccatgacgcgcgtaccctgcggcagggcgcgctgacggcgtccatcgcagcaaatccagccttcggacatggaatcgtccagaatatcgatggtgaaggtcgaaccggagccgatgatcagcggcctggcgaacagggcatgcgcggccaacggaatcagctgcagggccttgacgttcggccacatgaccggaccgcccgcggagaaggcgtaggcggtggaaccggtgggcgtggagacgatgacgccgtccgcgccgaacgagttcatctccacatcgtccacgcggatggacagttcgaccatcttgccccggtcggcgcgttccagcgtgatgtcgttcagcgcccaatcctcaatgggcttggtggtgccaggcagccagacgtccacatgggcgatcatgcgttcgtcgatcgaatagtcgtgggtggcgacccggcggatcgcctcgtcgatctggaagctttcgaattcggccaggaagccgacatgccccatgttcacgccgagaatcggcacctgggtgcagtggacgagttcggcggcgcgcagtatcgtgccgtcgccgcccaggaccacgacgatttcggtgtcgtccgacacgcacggcggctgcacaccgaaatcgggggcctcggtgttgtcgatgatggtgacttcgaaaccggccactcgcagctggctcaccgcctcggctactacggttccggtctgcctgagcctggtatgcgtcaccaccaccgcgttgcgcttggccatggcatcctcctgtcgattcggtcgcactgctcattattctagccgcagacaccgtcatcactcgtacaggtgttcgaaaaatgccgcttcgtggcgcgtcgccgacaacgttccgcagagtcgattaacgtaaggcttcggcatacaatggcatacagccgcgcgatcaccgtacgcgtgccgtgcgcagcgcgatggcatgccgtatgaccatacagcagtatcagttgaggagcttgaggacccatggccaatgacttcgacgaatcctccgccaatgaggaggcctcgaagggcctgtcatggtggtattcggccgatgtactgagccgagacaaaagcgataaaaccgccaagcgcattcgccgcatcagcatcaccgaccgtctgctcaggcacccgggccgtctgtccatggtgtatttcggcgcactgatcatcatcgtcaccggcttgctgctgctgccgatctccacatcggacatcatcttcaccaacttcccggtcgcgttcttcaccgccgtctcggccctgtccacctgcggcattccggtggtgaacaccggcgaatactggtcgacgttcggccaagttgtcatcctattctccatccagttcggcggcctgggcgtcatgaccttcgcctcgatggtggctcttggcacttcccgcagactcaaggtctcccagcgcatgcttaccgcgaacgaactgggcaccacgaagctttccgaggtcaaaggcgtactcaccgtggtattgggcacctccatcatcgccgaggtgcttaccttcgtgctgctgctgcccgacctgttccgcgtgaaccacggcaatatgggacgtacattgtggcaggcgctgttctacgcggtatcggcctacaacaacaccggtttcacgcctgacgccaccggcctgcatgtgaaccgttggggcgtgggactgccgattctcatcagcgcattcataggaacgctcggcttccccgtggtgctgaatctggtgcagtgcgcacgccgacatctcagcccgaaacgttggacgttgcacaccaaactcactttggtgaccaccgctgtgctggtggccacctcactggcttggttcctgctggtcgagtggggcaataccggcctgttccccgcagatggtcccggcatgaagatgcgccgtgcgatgagcgccgccgtcatgccccgctccgccggtttcgatatttcctgggtgcccgaagtcacgaatgagaccaaggtgttcatgagcatactcatgttcatcggcgcaggctcctcatccaccgccggcggcatccgtgtcaccacgttcgcggtgattctcttgatttgccgcgccgcattcaccggccatcgcgatgtcaccgtgttccgccgccgtatcccccgccgcatccagatgaccgccgtgtccgtgaccacggcctgctttgcgctggttatggtcggtgcgatgatgctgatgttcaccaccggctgcgcgttcgtggacgccgtgttcgaggcctgctcggccttctcgttgggcggttattcggtgggcgtggcaagcgccggcaatccggccagcctgtttattctgtccgccgagatgattgtcggacgacttggcccgttgaccatcgcctactccatcagcagaccgatggctcccgaacctattcgttatccgcaggaaaacattatcgttggctgatcggccattcaatcggcacacagaaatccggcatagagaggaccatcatcatggcagcaaaaccgagcggcaacaaaagcgtgctggtcatcggcctgggccgtttcggcgggtccgtggccgccaccctcgaccagatgggtcaggatgtgctcgccgtggataagaacccggagcttgtggcccgttggtccgcgcatctgcccaccattcaggccgacatgaccgatgtgctggccatcgagcagatcgacgcctcccagttcgatacggccgtcgtggccatcggcgacagcatcgaggcttcggtgatcatcaccggcaacctgctggatgccggcgtttccgatctgtgggccaagtccgtgtcccaggagcatgcgcgcattctgcagcgcatcggcgcccgtcacatcatcaatgcggagaccgatgccggcaagcgcgtgggtcatctggtggccggcaattatctggattacatcgaaatcgacggcccgtacaccgtcgtcaagatccacacgcccctatacgcggtgggtcgcagcatcgaggacgtgcaggtgcacgacaaatacggcgtgaccgtggtgggcctcaaggccccaggcaaggagttccagtacggctccaaggaactggtcatgcatcgcaacgacgaactcatcctcatgggcaagcaggatcagatcgaccacttcatccaaggctaacccccccctaactgcgctcgctataccccctatctgctcacatcgtgaccgatataacccccctcaacatggatgcgctcattattggggcaataagccataaagctgtacgtccatattgagggggctttatcatcatggacaagcatacgcagaattgcacgttgataggcaaaggagtctacggcaccataggagtggaccaacgttcccgtcttgccgatggcgcgcattttcacaccatgattgtgaccagcaccctcgaggcctcagttatagaaggggacaaactggtcatcaagagtggcattgtgcggtgtgatggtgatattcgcgtatccagcatcagcggcagcggcgacatcgaagtcggcggcgacattatttgcgatgaaataacctttaccggcaaactgcgatgcaacagcgatatcgtttgttccggaaatctgtccgtcaatggctccctaggcacccgtcatattagcggtcagacagtccgcttgaacggcgtgttgaagggtcatgacgtcaacagcagggctctggaagttcatccactgcgcagtacgatgttttctcgttttgatatggatgggtatgaggatggcagcatggttcgccatatcacagccgtcacggttgaagccaaccatctgcaatgccggactttgacggcggactccgccatgctacgcaacggcagtgcggtggaaagcgccacgtgtgccaccgcaataggcatcgaccgtacctccagcgtgctgctggtgaacggagactgccgacgcattcatctcaagacagcgtaaagcaggtattcctcattaccgtgggtgccgatgatgggactatcggcagtggccaccacgtcaagtccgtgctgttcagcacaggcgaccacgtcgtgcaatgcccgctcccgcaatgccggatcttccacgatgccgtttttgccgagtcctgcccgcccgacctcgaactgcggtttgaccagtaacacaatctgcgcaccgggagccgcgatgcgcgcgattaccggaatcacataggtcagggaaataaaggagacgtcggagacgatcatcgccggccggtaaggcaggtcgtcggcctctacttcgcgaatgttgacgccgctcatttcgatgacgtgctcgtcattggcgatgcgcgggtcgagctggccgtggccgacgtcgagcgccacgactttggccgctcccccgcgcaacagtacatcggtgaagccaccggtggaggcaccgatatccagacattccaagctttccggcccggtaaggccattgccggcaaaggtctcgaacgcgcccaagagtttgtaagcgcctcgggagacgtagtcgtcgcccttatccacggcgagttcgctgtgcccggctttgaccatgaacgatggcttggtgatggtctcgccgtccacgcgcacatgcccggctttgatgagtcgctgcgctttggcccgcgattcgaccagtcccgaagccacgagcatcatgtcgaggcgatcaagtggggtcgcgggatcgatatgttgctcggtcatataccttcctttcgacccaccatccaccaacggggtggctcggcatggacccaccatccagcacttcacgtcatcttccgctggcgggagaatgaatctcctctgctagctgcggctgttatcaagctcgtgttgtaacgattccagcacgttgcgataggtctcaagcttgcggtcgttgtcttgttcatcaatatccgcaagttcggggtatcgctcggtgaccggcgcgtgttcgctatccgtagacataggactatgcctcgatggcgaacaccggtaccgtggcctcgctgagctgtgcgccttggtcggcggcttcccatgcggcgcatacggcggcacgcaggccgtccatactggtggggtcgctgacgtgtacctggccgttttcaaaccaagcgctagccttgcggcattcccaagtaccgctctcgtcgcggaccggctccggttgggcttcgccgagttcacgcagatcaagggcgatgaatgtgggcctcaggtgtgccggagccagcatcagttcggtcgggttggtgacaccggtcagcaccgccagcgaatcatagtcaccgcggttaccggcctcgatatcagtgtcgagtcggtcgccaatggcgatggacgcctccttgggcaccagatcgtggccttcggcggcgttcagttcgcgggcctcatcgtacatgtacgcttccggtttgccagcggaggcgaccggttcgacgccagtggccgtgatcacggcgcgaatcatcgatccgcaaccgggggcgatgcccagttcacgaggaatcgtcaggtcgcggttggtcacgaaatacgtggctccggcctcgaccgcgaacgcggcatcggccatcatctgccaagtcatatccggataccagccctgaataacggcctgcgggcggtcctgaggaccgtccacgatggtcaggccgttgcgggtgacctcatcgcgcaaatgctcggcgcccaatacctgtacgcgcgcgccggcgggcaacgccttggccaccacacgggcggccaccaccgaagaggtgatgacctgccacggctccacgtccaagccgaagcccttgagctggtcggccaccacgtgctgaaagcgcgaggagttgttcgtggtgtattcgatggtcatgccggcggcttcggccgcacgaatggaatcggctgcgtattcgaccggattcttgccgcgatacaccacgccgtcgaggtccagcagcgcaagctgataggcctcggcgagcgggcgatcggtgcctttgaggaaacgggtcattacgccgctcactcctcggtttcggtctcggtctcgtcggactcagccggttcaacggcatcgtcagcggactcggaagactcctcggcttcagattcctcagattcttccgatgcatcctcggactcagcattttcgacatcggcctcatcagactcggcatcgccgtcttcagcctcgtcgtcctcatcgccgtattcctgctccagatccggggcgtactgcgcctcgtccggatcgatgccgagcttctcgagcacgtcggagtcgtcggtgatgtcttcgagatcgtggtcaatcaccacgtcgtcgctgttttcgtcaatctcctcgtcggcatactgatcctcaagacggtccagcaggtcattaagctgctcggcttccttgctgcggccggcctcttcaaggaagtactgctcggcctgcacggcacgcatacggtactcacccggaagaccctgagagcggccgacggtatgaaccacttcaatggccttgtcccacatctccaaatcgccaagggcaccggcatacaccaggaacatctcgaccttgggagcgccatgcagctgcttgccctcatcggacagcgccagttccacggccttcttcggttcaccgacaccacgctcgcagtcagcgatgaacggcaggtagtcgaggaagccgttcatacggtaggcggtacggaactcacgcagggacagcttgtagtcgccctgacggtaggccacgaacgcgagcgtctcgcgggcaaagtcgatgcgggaggcctgacgggccacccacttggcgtgctccaaggcaagttcgggatcgctctcctccagcgcgaaagcggcgaggatgtgcagaccgatgttctccgcatgctccttggacaggccgcgcagacgttcgcgctcatccttggacagcatcgaccattccatgcccttgggcatcttgggctcgtcgggacgacggtcggtgtacgggttctgcgaggggaagctcatcgtgccgtcggagttacggcgcggacgcctcatgtattcagagcgcttctcctcacggtactggcgcttctcttcctgcgaaaactcgcggaattcgccgtcacgacggttgttgtcgcggcggtcgtccctgcggaagttgcggcgatcgccatcacggcgatcgtcgtcgcggcggaagttgcgacgttcaccatcacgatggaaatcacggcgatcgttatcccttcggtcatcgcggcggaagtcacgacgatcattgtcacgacggaagtcacgacgctcaccatcgcggtggaagtcacggcgatcatcgcgacggaaatcacgacgatcgttgtcacggtgctggtagcgcgggttctcgccgttctcgccttcgtgggaacggtagccgccttcgcggcgcggcttgaaaccttcaccgtcacggcgcggaccactgccgcggtaaccacccttgtggaagccaccggacttgccgtacgacttacggtagccgccgtggccctcgccatcaccatcacggcgcggcgcgtagccttcgccatcctcacggcggcgcggcttgaagccctcgccatcgcggtcgcggcgcggacggaagccgtcgccatcgcggcgcggaccgttgccgcgatagccgcccttgccaccgaaaccagagcggccgcccttgtggaagtcgccacccttgccgtacgacttgcggtagccgccgtggccctcgccatcaccatcacggcgcggcgcgtagccttcgccatcctcacgacggcgcggcttgaaaccttcaccgtcatgacgcggcttgaaaccgcccttgccgcgcggcttgaaacccttgccaccgcggttgcccggtcggcgatcgccataccccttatggccgccgccgtaggacttgccggaacgctcgttaccttctgccattacttgttttccttaattcgttgttgattaacggttttccacggcgccgagcgccttcttgccacgacggatgagcgcgaagcggcctgccaggaagtcggcttcggccagcacctgctcctcatcctcgatacggttgttgttgagatacacgccaccggacttgatggcgcggcgtgcctcggaagcggacttgaacagtccggcagcctgggcggcgtcgattacgcgatcgccgggcttggagacggggaagacgtgctcgccgttctcgtcgaccaccttgaaaccatcgagcacggattccagcgtttcctcatcgatgtcttcgaggttgccaccgcgtccgaacagcgcaccggaagcgtcgatggcggcctgggtagcggcctcgccatgcacgaagctggtgacctcccaggcgagggtcttctgggcctcgcgcttgccggggttggtcttggattcctcgaccaatcgttcgatttcggccttgggcaggaaggtgaacgccttcagcaggctttccatctccacgtccgggcggttgatccagaactggtagaacttgtacgggctgagcatcgtggcgtcgagccagacggcgttgccctcggacttgccgaacttcttgccggaagcatcagtgatgatcgggctggtgaacacgttgacgtccacaccgcgcaccttgtggatcaggtccaggccggaggtgaggttgccccactggtcggagccgccgagttccagcgtgcagtggtattcgtcaaacaggtggagaaagtcgttgccctgcagcacctggtagctgaactcggtgaaggagatgccttcctcagagttcaggcggcgggcgaccgtgtccttggcgagcatggtgcccagacggaagttcttgccgacgtcacgcaggaagtcgatgacggtcatcgaggcggtccaatcgtaattggacacgaaacgtacggcgttcgcgccttcggtgtccagaatgccgccgatctggttcttcagacgatcggcccagccggccaccacgtccttcgggttgagcgtgcgttcgccggactggcgcgggtcgccgatgagtccggtggcgccgccgaccagggcgattggatgatggcccgcaagctgcaggtgacgcatgttgatgagctgcacgaggttgccgatatgcaacgatgcagcagtgggatcgaagccgcaataataggtgatgggctcgccgttcagtgcttctgcgagtcgatcccggtccgtggactgggaaatcaacccgcgccattccagttcctcaagcagggtgttgaaacccgcttccttgaagtcggtgacgtgagccatagcttgtcgcttctccctatcgaattgtgaatgagactgcccaattgggcacagtcaagtttcgcagaacatggcgacagtgccgaacaccagccgagccgcgcgattcagtaaaacgccttattctagcggcgcgggcccataagttcgcgcaaagagtcgatgatgtcctgacgatccggcacctggaacttcgggaaggacttgagcatacgcttctgctgtgcgttgatgacgccattgatggcccagcgcagacgctcaaccgtatcctgcgaaagctcacgcatcctgtcggataccgcacgggagccccactgccacgtgccaccggcgcgtgccgccacatcctgcaccacctgagagacggaatcgagcacctgctcgaatccgagcatgcccgcaaccgtgaccgccaagtcgatgatggtgatcagggccagtaccgtgaccagcgtatgcagcatcggcagcggaatcatatccgtgacccgctcgacatatggctgcgaaccaagtaccacgcccacgccgccgagaccgaaaatcaacgcgcccagcaggcagacgcggccttggaggttgaagcggaaattcgagtaatcccaccagcgggcgtggaacagctgctccatgacccacgaggttgtgtattcgagtatcgtggcgcccaccatcgaaatcaggaagatgatgatcgggttatgtacgttgccgagaatggcgacgccgagtatcgcgccggtgccgtagatcgggcacagcgggccgttgaggaaccctcggttgaccaagcggtgctgttggcaggagacgagaatggattcgtacatccagccgacgaaactgtagaacagaaaccagaggaaataatgttcgagtgtgatgatcatcgacgggcttcgatctcggcgtagggcttcgcggcgggcaacgcgcgcttgttgaaccggtcgagcgagaaggtctcggcggtggcggagcatttgtccgccaaggtgaccagatagccttcgatatagcgcggcggcaccagggtcatcgggaacatgtggttctcgatgctgttgcgttcgatatcgttgagcttgaagtccttcagggcattgaccagggcggcgtggccatgggtgaagccatgccactggtgttcgccgttatcccagtcgtgccagtcgtacaggaagtaatcgtgcaggagggccgcgcgaatcagggatttgaggtcgacgcggtaccacaggtgcgcgcggtcggccatccacacagccaggcaggcgacacgcacggaatgttcgaacgtggtgacgttgccgtgctggtagcagcagcgttcgatctgcatgtggcgatgctcgatgacctcacggccgtgcttggcgaccaggcgttgaatctgcgttcgggtgagcagatgtcccacggtttcgaccctccgttcgggttggttcagtgcaatcccttgttgtgaatcacgattgcccgacgatattcaagaatccatcgagtaataccgtgaccgattgtagggcacacgtatgtccgtgcacactcatccaaaagaacgacaacgggaaccgttaatcgtggtgggtttcaagatagtcgagataaccctgaaaaccgccatcgaggcttgctacatcgtaaccgcgatcggcaaggatttcagctacttcctcgctccaccatccttgagcacaatagactacgacagttcgatctgtgggcacggttttgagcacatgggccagagggtcgagtggtgcattgatggcaccttcgaccgggtgggcggcgaagtcggctggttccctcaagtcgagcagcgtgaccgtattcgggtcgagcttggcaaattccgccggcgtgatgcggcggtacgatgcttcactgctctcatcgtcatcgaccgcattatgcaaggcaataggcatgttcttcccctctcgttccgatcttggctcccctcaaggaggggtgccacatagctctaaatcgcgcaagccggctgaatatagttggccggatcaatagcagtaatggtcggctgctcaccgcacaccgggcagtcgggcacatggttcggcaacggcacacggcggatgttcatggtcagggcatccacagtgagcatacgagccacgagcggctcccccacgccggcaatcagcttgacggcctcagtcgcctccagactgccgatcacaccgaccaccgcgcccagcacgccggcttccttgcaggtcggaatctcaccggcggcgggcatgtcgcggaagatgcagcggtagcaggggccttcgccgggaatgacggtcatcacctgaccggcgaatccgaccacgccggcatggatgtacggcttgccggccagcacgcaggcgtcattgatgaggaattttgcggcgaagttgtcggtggcatcgatcaccagatcgtacggttcgatgaggccggcgatgttgctcgcgtcgacgagctcgtagtaggtatcaaccgtcacatccgggttgagcgcgcggatggccgtggccgcggattccactttgggcgctccgacacgtgcagtggtatggataatctgacgttgcagattgctcatatccaccacatcgccgtccaccagtccgatatggccgacgccggccgccgccagatacagggcggccggagagccaagcccgcccgctccaatgatgagcacgctggaggccaacaaccgcttctgccctttgacgcccagccccttcaaaatcagatggcgcgcgtaccgctccacctgttcatcagtcaatgccatgttttctccatgtttccagctcccctcagtccgctacgcggccagctcccctcagagaggggagctaataaaagtgtcagtgcaaatatcccgtagtcggactggacggcacggcctgtccctcggtcaccttgcccagaccggacagatacgccgcacgaccagcatcgatggcgtgcttgaacgcctcagccatcagcgggatattgccagcagaggcaacggccgtgtacgccatcaccgcatccgcacccatctccatcgcatcgcaggcctggctcggacggccgatgccggcatcgatgatgaccggcacatgcgcattggcgatgatgatctcgatgaagtcacgcatgcgcaggcccatgttggagccgatcagcgaaccgagcggcataacggcggcggcaccggcctcctccagctggcgtgcggcaatcgggtccgggaacatgtagggcatgaccacgaagccttccttggccagcatttcggtggctcggatggtttcggcgttgtccggcaggaggtacttggtctcgtgttcgatttcgaccttgacgaagtcggtgtggcacacttcgcgtgccagtcgggcgatacgcacggcttcctcggcgttgcgcgcaccggaggtgttgggcagcaacgtgatgccttcgggaatgtagtcgagcacgctgttctcggtggtctgcgcgcggcgcagtgccatggtgacgatttgcgtgcctgcatgttcgaccgtggccttgatgaggttcaggtcgtagcggccggagcccagaatgaatcgcgactggaactcgtgaccgcccagggtcagcggcttgtcttccactggcagaatcggcgcggcggtgccgaccggattggtgacggcgggctgcggcggcagcggagtcgcctcaacagatgcttcagtaaccggattaatattgctcatagcttttcctttcatccaccctgtacaaactgcacaatttccatgacgcactggtcgtcgagcatggcgtcggcacgcttatcgcgcgggataatctcaccattgagttcgatggccacacgctcggcgcggaatccgtgcgcttcgagataatcggcgacgctgaccggcgtctcgagcgtgacctgctctccgttgacctgcataatatcctttcagatagtaaaaaagggtgcacgaaacgaaccgtaccttaagtggtgcgcccattcatgaacccaatcatgcgaccgttcgaccgctgtgatgtattggctccatcacgaccgtctcacggctgaattatgcaaacggaatgaaagctgtatcggagaacccggcaaatctgcaacaacgattccttacggcggcatgacccgcgtcaagttccccggtcgaagtctggcgacttcctctcagcctcacggctcccgttcgttacgatttctcagtgtatgccgttgcagtgacaacagcaaaatagagctccctctgacgagggagcttcattgggactagaacgtgccgggggctttgtaggcggagccatccgacgtggatgcggggaagagcttgagttcttcgacctcggccttggcgtcggcgatctgctcgcgcacgcgaccgtaagcggtgccgcccttgccgttgcgggagtcgaccgaaccgtggctggagagcacttcgcgtactcccggagccttgtcggccggcaggaacgcggcgaaggtctcgatgaagtcattgtcggtcagatcccacagttcctggccgcggccttcggcgagcttgacgcaggcaccagagagctcgtgcgcatggcggaacggcacaccgttcttgacaagccattcggcgatgtcggtggccagcgcgaagccggtcggggcttcctcttcaagccgctcgctgtcgaagtgcatggtcttgaccatgccggtgaaggcgggcagcagcacttcgagcgtatcgacctggtcgaacacggcctccttgtcttcctgcaggtcgcgagcgtaggcggtgggcaggcccttcagggtggccagcagaccggtcagatcgccgatgagtcggccggacttgccgcgggcgagctcggcgatatccgggttcttcttctgcggcatgatggaggagccggtggaatagccgtcgtcgagcttgacgaaggcgaactcctgggtgttccagatgatgatctcctcggacaggcgggagatgtccacgccggtcatggcggccacgaacgcgaattcggccacgagatcacgtgcggcggtgccatcgatggagttgtcggtcacgcgggagaagccgagctcacgcgccacggcctccgggtcgaggccgagcgtgttgccggccagtgcgccggagccgtacggagaggcgttgatgcgcttgtcccagtcgatcagtcgctgcacgtcgcgaatcagcggccaagcgtgggccatgagctggtgcgcgagcagcacgggctgggcgtgctgcatgtgggtgcggcccggcatcacggtgcggccggccttttcgctctgctcgatcagggcgttgacgaggtcaagcaggagtccggcaatcgcacgggagtggcggcgcagccacatacgaatcaggcaggcgatctggtcgttgcgggagcgtccggcacgcagtttgccgccgagttcgtcgccggcaatgtcaatcagtccgcgttcgagggcggtggcctcgtcctcatcgtcttcgatgggggcgaaggagccgtcatccacatgacgctggagcgtgtcgagtgcatcctccatgcgctgcagctcgtcggcggtcaaaagtcccgcacggccgagagcacgggcgtgggcgcgggaaccggcgatatcgtcgtcggccaagcgccagtcgaactgcgtggacttggacagtcgggccagttccggcgacggaccggacgtaaagcgaccaccccacagggccagatgttcgttgttctcagtcatgaaggctccttgaaaagtgaaaatagctgtgtttaagcgtagcaatgtgttcaaacatacagttgcccccgctggcgagggctgtcacatggagtgtgactgaggacagtcctttcaaagaccactcccagtcagctatgccgacagcctcgcagcgggggcgactgagtaagaattactcgacggtgttcttcgggacctcgatgccgttgccgaacttgacgtcgcgggctgcggccacgcgggacggcaggccatagatgtcgatgaagccgttggaggacctctggtcgaaggtatcgccggaatcgtaggtggcgagcttgtagtcgtacagcgaggagtcggaacgacggccggtcaccacggcgcggccaccgtgcaggaccatgcgaatctcaccggacacgtacttctgggtgtcttcgatgaaggcgttgagcgactgggttgccggggagaaccactgcgcatcgtaaaccagctcgccccagcgcttgtcgatgtcgcgcttgatgcggtgctgttcgcgttcgaggcagcagttttcgagttcctggtgagcggtgatcagagccacggcacccggagcctcgtacagctcgcgggacttgatgccgaccaggcggtcctcgatgaggtcgatgcggccgatgccctgggctccggcgcggcggttcatctcttcgatggcctgcagcggggtgacgtcacgtccgtcgatcttgaccggcacaccttccttgaactcgatgacgacttcatcttcgaccggcgggaaggccgggtcgtcggtgtaggagtagcagtccttggtcgggccgttccacggatcctcaaggaagccggtctcaatggcgcggccccacacattctggtcgatggagtacggggacttctcggtctgggtgatcggcaacttgtgctccttggcgaacgcgatctcgacatcgcgggtcagggacaggtcacgaatcgggctgatggccttcagcgtcgggtcaatggaggcaatggagacctcgaaacgaacctggtcgttgcccttgccggtgcaaccgtgggagatggtgtcggcgccgaactggtgggcggcgcgcacgaggtgcttggagatcagcggacgggagatggcggagaccagcgggtagacgccttcgtacatggcgttggccttgagggccttcatgcaatattcgttggcgaactcgtcacgggcgtcgaccacgtaggattcgacggcaccgcaggcaagggcgcgctgcttgatggtctcgaggctttcgccgccctggccgacgtcgagggacacggccacgacgtccttgccggtgcgctccttcaggtacgagatggcgacggaggtgtcaagaccgccggagtaggccagaacaatgcgcttgttatctgccattggttccctttcattcaaggtctgaaaaacaaactgatgcaagtatatacagaggactgtatatttatgcacggcgtgttggttatttggaagcgaggcttagtagccagtcggagcgggagacggcggtgtcgtcattggtgcaaatcaccatgacggtgtcgtctccagcgatggtgcccagcacgccttcgatcggctgcctgtcaatcaccgaggccacgtattgtgcggcaccggaaggcgtgtgcaccacaaccagatttccggcggcggccaccgaggtgaccagtccgttcagcacgcgggacatctgtgcctcaccgcgctcccctacatcctcaccttccgaagcaacgacgctgcgacccaccgtgtaggccaccgtgccgtccttcagccgggtcttcaccgcatgcatctcgtcaagatcgcggctcagggtcgcctgagtcaccgcaatgccctcgtcgataaggattttggacagctgtgattgcgaggtgatgatatgcgtggcgagcgcctgttctatggcactcagccgcgccgccctggtggcagggcgctgcagggacggaccggtttcactcatgcgagcaggctttcgtctccacgggccttgccggtcaaccaagtcagcaacgctttctgtgcgtgcagacggttctcggcctcgtcccacaccacggactgcgggccatcgatcacttcagcggtgacttccttgccgcggtaggcgggcaggcagtgctggaagagcgcatccggcttggccaatgccataagttcggtgttgacctggtaatcccagaacggcttggaacggatggcgtattcggcctcctcgcccatggagacccaggtgtcggtgaacacgcagtcggcgtccttcaccgcttccttggcatcggtggtgaccaggatggagccgccggtctcggccgcgacgcgcttggcgtcggccacgatgtccgggcggggcaggtagccgtgggggccggccacgcgcacgtccatgccggccacggcaccgccgagcaggtaggagttagccatgttgttggccgcgtcaccgaggtaggcgatggtctggttcttcaggttgtcgacgccgcctcggtgctcggcgatggtctggaagtcggcaagaatctggcagggatggaagtcatcggtcagggcgttgaccaccggatgggtggagtacttggccatttcttcgacgcggtcctggccgaaggtgcgccacaccacgccgtaagccatgcggtcgagcacacgagcggtatcggccacgggctcgccacggcccagctgggagccggacttgtcgatgaccagcgggtagccgccaagctcggcaacgccgatggagaagctggaacgggtgcgggtggatggcttgtcgaacagtacggcgacggcctgcggaccggcgaacggctgcttgtagaagcggtcatggtggaacttgatggcaagttcgagcacctgcttctgctcctcatggttgaggtcgtcgtcacgcagcatgtggcgaagttctggggtcatgatgatctccttggatcggtgggtcggcagtgacggcgagaaatcagtcgtcgggcaggtccgtaggcacatccttgaggatggcaagtgcctgatccacgtcttgagcggttacaatcagcggcggtgcgaaacgcagcgcattgggagccaccgcgttgacgatgagcccgtgttcgaggcagtagttcatcaccgcgtgggagcagggatgcttgagctcgacggcgtccagcaaaccacgaccgcgtacggaaacgaacagcggattaccggtggccataatgccatcgcgcagctgttcgccgcgagcttcggcgttggccaccagattctcgtcttcaatcacgccaagagtggcgagtcccgcagccgcacccagcggattgccggcaaaggtggagccgtgggaaccaggagtgaacagagccgcaagtttctcgccgaaagcgatcatgccgcccatcgggaatccgcctgccacgcccttggcgaaagtcaccatatccggcgtcacgccgccggacagatcgtcacgctggaatgcgaaccacttgccggtacgtccgataccggtctgtacttcatcgatgatgagcagcgcgtggttgatatcgcacagttcgcgcacgaacttgacgtaatcggcgcccaacggctgcacgccggcttcgccttggataagttccagaatcacagcagccaccggacccttgccatagcggccgagaccggtctgtgcaaaagcgtcgtgcagggcgaccttgtcgccggcgcgtacgaattcaatgttcggcaccagcggatcatacggcttgcggataccgggtttccatgtggcggacagcgcacccatcgtacggccatggaagccgtgagtcattgcgagaatgcgtgcgggcttgccgccgatggaaggcagggcaccaggcaaggtgcggccatacagcttggcaagcttgagggcagcttcattgccttcagcaccggagttgccgaagtagactttggagccttcaggtgcaccagccagcttgaccagtttggatgccagctcaatttgcggctcggacgcgaaatagttgctgatatgagccaccttggcagcctgatcggcaaccgctttgacccacttggggtgggcgtatccgagggaattgacggcgatgcctgccaggaaatcgaggtattcgttaccgtcaacatcccagatgtgggcaccttggccgtgatccatgacgcgcaacggcgtaccgaacacattcatgtggacctgagagtactctcccagccacttgctgtcttccgtacctagtttttcctcatgctcagtagccataagagctcctcatttccagtccttcatcgggcataaccatggtaccgatgcctgcggaggtgaatatctcattcaaaatcgaatgcggcttgcgcccgtcgatgatatgggcttggggcacgccaccgtcgatggccctgacacaggcctccatcttgggtcgcataccggattccaggtccggcagcatatcgcgcaggttttccacaccgatccggccaatcagagaattcttgtccggccaatcggcgtacagaccatccacatcggtcaagataacaagcttgcgtgcgcccacagcggcagccaaagcggcggcggcggaatcggcgttcacgttgagcacttcagtggcatcttcttcgttcggagccacggaagagacgaccgggatacgaccggcggccaccagatcctcgactgccgaggcatcgacggaaaccacatcgccgaccaagccgatatcggtgggcttgccattgatgatgggcctgcgctgcatggccgagaacaggccgccgtcttcaccggacaggcctacggccagcgggccgtgcgcgttgatcaggccgaccagttcgcgtgacaccttgccggtcaggaccatgcgcaccacgtccatggcctcgggggtggtgaccctcaggccgcctttgaattcggatttgatgccgagggccttgagcatgtgggagatctgcgggccgccgccgtgcacgacgatcggatgcaggcccacctgacgcaggaagaccatgtcttcggcgaagcactgcttcagatggtcatcgaccatggcgttgccgccgtatttgacgacgatacgctggccggcgaactcctccagccaaggcagcgcttcaataagcacttctgccttctgatcggcgcgcaaatcggtgtgcacgtcgaaatggaacccaggtcccttcaattctgtagccaatttttctcttttctgcgacgccggcgacgctatcgctgccggctgctacaaacagcccactgggctgtttgcgttatatgcgacgccggcgacgctatcgctgccggctgctacaaacagcccactgggctgtttgtcagctttcgtagtcggcgttgatgtggacgtattcgtgggtgaggtcgtcggtccagacggtggcctcggcgtccgagccggtgttcaggtcgatgtcgatgtggacttcgcgcggggtcatgtcgacctcgctgcggtcgcggccggcgccgccgttctcgcagatgcgcacaccgttgacgtccacggtcaccttgttcgaatcgtaaggcgcgacttcaggcggcacagtgcccaaggagctgacgatgcggccccagttcggatcgttgccggagatggcgcacttgagcaggttcgaggcggcgacggcacgaccacaggcaagtgccgcgtcttcgctggtggcaccggtgacggtgatacggatgtcgtgggaggcaccttcgccgtcgccgatgatttggcgggacagggatgcgcaggcctcacgcaccagcttgttgaattcgtccttgtccggttcgacgccggaggcaccggaggcgagcagcaggaccgtgtcgttggtggacatgcagccgtccacgtcgatgcggttgaacgaatgttcggcggccacggcgagtgcggcctgcatctggccggcggagacgaccgcatcggtggtgatgacgcacagcatggtggccagctgcggggcaatcatgcccgagcccttgaccatgccgccgatcttccagccgttggagccggtcagttcgaccgttttcggcttggtgtcggtggtcatgatggcgtgggaggcggcggcgccggcttcggcggtggcggcaagagcctcatgggcactcttggcaccagccaacacgttgtccaacggcagcagttcaccgatgagaccggtggagcagacagccacatcattcggttcggcgccgatgagcccggcgaccgtttccgcggtggcgacggactgggcgtaaccggcctcgccggtgcaggcgttggcaccgccggagttcagaatcacggccttgacgtgaccgtcggcgacgactttacggctccactgcaccggggcggcgcagaaacggttcgaggtgaacacgcctgcagccgcgtcgagcgggccgttgttgaccacgagggccaagtccttcttgccttcgacggatgaaataccagccgccacgccggcggcggagaaaccttgtgcaaatgtaacgctcacggtgctactccgatcttggtcaggcccgcgtcttccggcaggccgagtgcgatgttcagtgattggaccgcttgtccggcggtgccacggttgaggttgtctatggcggcaaaagcgtagatgcggccggccttgcggtcggcgacgacctgcaggtgggctgcgttggatccgatgatgttgccggtggcgggcagtgtgccctcgggcagcagcaccatgaagtcctggccttcataggccttggaccatacggcgcgaatctcctcatcgctcagtgccttggccttgtccgtcatgcgggcggacacggtggcgaggatgccccgggacatgggggcgagaatcggcgtgaagccgagcgtgaattcgctggcttcggccgcgctcttgccggccgcgtgggcgaagttctgcaggatctcgggaatgtggcggtgcttgccgcccaccgaatacggcagggcggattgcagggcctcggcggcaagcaggttggtgcgcttgagattcttgccggcacccgagtatccgacgaccagatcggccacgatatcctgcgattcaaccagtccttcggcgatgccgggctggagggccagcgtggtggcggtgacgttgcagccagggcctgcgatgcgcttggtgccaggaagcgccgcgcgctggcgggtgtatgagccgtccgcggctttgccggtgatgagctcgggcatgccgtaggtccaatgctcatagaaatcgccgccgtagaactcatcccaagcggcctgttcttcgagacgatggtcggcgcccaaatccacaaccacggcattcggatcgagctgcgaggcgagcttgcccgaagcaccgtgcggcagtgcgaggatgataacgtcatgcccgttcagcacttcgggcgtggtatcttcgacgaccagattggccagttggggaatatgcggcatgtgcttggccatcgactcccccactgaggaatggcctgccacgcaggtgatgtcgaagtcggggtgcgcggccagaatgcgcagcgcttcaccgccggcatagcccgtggcaccggccacggccactgtatatttcgccatactcatctcttttcactgatgtgtcttgggatgagtatacgcgattatgcagactattgcatatttatgcagtgggtgtgttggtatgtgaacgccacttatgcggagatggagtcggaggaggagccggtgccgccggtgagttgctggagggcttcctggtagaggctcatggcgtcatagccattgaaggccatccagatgacggcgatggtgtacagcacgttgatcaccacggcggccacagccaaaccgaagcctttcatatggaaggtgcgcgtgcgccacattgccaccgcgcccatcagtgccgagagcactggcaccgggaagaacagggcgaggataaaggagatgatcgcatacgaatcccagtgcccgtagagtgggttctggtttggatcgttcaggtcgatgccgtggtaataatgcggctggtgaggctgaccgttcggctgttgaccatacgactgcccctgcatgcccgggtacccgcccggatatgcgcccggaccggactgttggccgccttgagcatacggccagccgcccgcctgctgattgccgggccacgccggctgctgaccgtacggctggccggcctgctgggattgcgccgcgccaccgttgatgccagcggctgcggcggaatccttcttggtatccggctcgggagcgccataaatatacgggttgtaattcggcccgtattggccagacatagcaccatattcaggctgctggtactgcccgtatttcggcttgtcctgctccggttggctcatgacgctcctcgattcggatgatcggttgggtcaggcgcgcagctgggcgccgatttcggcggcctcagccacgatggccttgcggatggcgtcgctgtcttcggcggacagcgtcttgctcggcgaacggaacaccaccgcataggccagggacttcttgccctcgcccacctgttcgccggtgaacacgtcgaacagttcgatggattcgaggttcgcgccggcggccttgcgaatcacgttctcaagctggcctgcggtcacggtctcgtccacggtgaaggccaaatcctgcttgaccggcgggaacgtggagatcggcttggcctggacgggcttgccggtcagcgtggcgaacagcgcggtgaggttcagctcgaaggccgcggaatgggccgggaagccgagcgcctcgttgacgcgcgggtgcagttcaccaacccagccggtgaagacgtcgcccaccatgacgcgggcgacgcggccggggtgccattggacgggcacatcgtcggcggcgggctggtcgagttcgattgcggcaccgatacggccggcgatgcggcgcacggcctcgacggcgtcggaccagtcgaccgggcgcttgccgcccatccagccatcgtcctcggccagaccggtcaggatgccggccacatggtcgggctgttcgggcagaccggcgtcaagcgcggcgagctgttcgtcggtggggcgcacgccgccgggcagtgccgggatggcgggcgcgttcggatcccacaggtagacgtggccgagctcatacagggacacgttttcgatgccgcggcggatgttgcgctgcacggtggtggccagggtcggcagaatctcgcgacgcaggtacggacggtcgccgtagagcgggttggcgatctcgacgctgaccttcttggtggcttccgggtcgaagccgaaggccttgtaatcgtcgtcgcccacgaacgggtagctcagcgattcgaccatgccgaactcggcgagctcgtccgccacgcgacggcgacgctgctggtccggggtcaagcccaccagaccctcgaccggtgccggcggcacggtgatcggaatctggtcgtagccgaccagtcgggcgatttcctcgaccaggtcgcacggctcgttcaagtccggacgccagctcggcgcggttacggcgaactcgccgttgccgccgccggccaccgtgcagccaatgtcggtcaggatgtcggagatgcggttgatgtccacgtcgaggccggccacgcgggccacttcggaggccttgaagtggatgaccttggcgcgcggcgtgttgttcacgtcgttcgggtgttcgctgggctcgccgttgccgtacttggccatgagctcggcggccatctgggtggcggcgggctgcagcgcggtgtcgacgccacgttcgaagcggcgggaggcctcggatggaatcttgtggcgacgggccgaacgggcgatggtcacctgatcgaagtgcgctgcctccagaagaatgttcttggtgtcagcggtcacttcgccatacaggccgcccatcacaccggcaaggccgaggatgcgcgagccgcgttcgccgttcggcgaatcggtgataagcagatcttcgacgctcaggtcatgttccttgccgtccagggtggtgagtttctcaccctcgttggcgcggcgcacgacaatcgggccttcgagcttgtcgaggtcgtaggcgtgcatcggctggccgaggtcaagcatcacgtagttggtcacgtccacggccaaggagatggagcgcatgccggcgcgaatcaggcggcggcgcatccagttgggcgtgtgggcgttgggattgaagtccttgacgatacgcgcgtagtagcggtcgcaaccgggcacgccgtgaatcggattgttatcgtcgatttcaacatcgatgtccaccggggtgccgggctggtagtcagcaggttccggggccttctcgttcagtgccacggccggatcggtgtaggcggcaccggtggagtggtggtattcgcgggccacgccacggtaggacagcgtgtagccacggtccggggtgatgttgatctcaagcagaggctggtcgaggtgcagcaggtgcatggcgtcctgaccaggcttcagagcctcatattcagcctcggagaagccgtactgacgcagcagaatgatgccattgtggttgtcgcccagacccagctcacgttcggaggcacacatgccgttggagatgtggccgtaggtcttgcgcggctcgatcttgaagtcgccgggcagcacggcaccgggcagggtgacgacgaccttttcgccggccttcatgttgggcgcgccgcagatgatgccgcgcggcaccttgttgccgtcttcgtcggtctcgttccattcgtcgccgcagtccacgtggcaccagttgatggtcttgccgttcttctgcggttcgggggtggcgtcgaccacgtagccgaccacaatcgggccggtcacctgggaggagtggatctcctcttcctcaagacccaccttgacaaggtccttggcgagctgttcgtaggtcaggccttcgggaacctcgacatggtccttgagccaatcgatatcgatcataggcatggctgaatcactcccccatcacaaactgttcggcgaaacgcacgtcaccttcgaccaggtcgtgcatgtcgttgatgtcgctgcgcagcaggagcgtgcgctccatgccgacgccgaaggcgaaaccggtgtagacgtccgggtcgatgccggcggacttcagcacgttcgggttcaccatgccgcagccgccccactcgagccagccggggccgcccttcttgtcggggaaccacaggtcgagctcggcgctcggctcggtgaacgggaagtagctcgggcgcaggcgcgtcttggcttcagggccgaacatggcgacggcgagcttgtccagcacgcccttcaggtcggccatggtcaggtgcttgtcgacggcgagggcttcgcactggtggaacaccggagtatgggtggcgtccagctcatcggtgcggaacacacggccgggggacgcgatgtacagcggcacgccacgggtcaggagggcacggacctgatcggaggaggtctgcgtacgcaccaccatgttggagccgacgaaaccggcggcgtccttggcttgattgcccttgacgtagaaggtgtcctgcatctgacgggccggatggtccgggccgaagttcagggagtcgaagttgtaccattcggcttcgatttccggaccggaggagatctgccagcccatggagatgaagaagtcctcgacgtcttccatcagcttgggcagcgggtgacgggcgcccagaggcttgcggttcaccggcagcgtcatgtccacggtttcagcggcgagtgcggccttctcggcggcttccttgagctcgacctccttgggaccataggcacggccgaagtcggcgcgcagcttgcccatgagcttgccggcttccttcttctggtcgacgggcagggagccaatggccttgctggccttggtcatcgccgaatcggcacctgcgtacgttgtcttgatggccttgagctcctccaggttggaggcgttctggattttctcgatgcccttggcaacctcagcggtcacctggtcggcgtcgaacaccatttgttctgccacgagaaccctttcgtctgatgttttctcagcgtttcacagcgtttttaccggtttcacattctttcaacatgacccgacatagacagcgacatcaacatcaccgcggccgaggtgccgaggttcagcgattcggccttgccgtacagcgggatggagacgatgcggccgcagcgtgtgaggatgtccggttccaagccacgcgcctcattgccgaacagcacggctttcggagcctcgaccgccgccttgtccgccagtactgcgggcaggctttccggcttgcgttcttcggtgccgtatacgtcggcggcccagacgcccatattatggtcgtcgcctgtccaggtgaagaattcgtcggtgctcatggcgagtaccggcagatggaacagggagcctgcggtggagcggatgaccttggggttcagcacgtccacgcagtcgtccacgaagattacggcgtcgcagccggccgcatcggccgcacggatcacggtgccggcgttgcccgggtcgcgcacctgccagaaggcggcgatctgcgggccccggccgttcttgccaagttcgacgtcatcggcaccggcgtgcatggactcggcattgccgacggccacgatgccctgggcgtccggactgatgcggtgcatcacgtcgccggtgcagtagtgcacataaatcgtggcatcctgcgaggtttcgacgatcttctccaacgtggaggagatgatacgcggatgttccaacgcctgcgaaacctccacatagaggtcctgcaccacgtccggccgccaagtgacggcctcgcgcacggattgcgggccttcgataagaaaacggcccgaacgttcgcggcctttggcgcgggtcagatcggcgatgcggcgaacgcggtcggatttcggattatcaagaatctgggcgttgatgggcatagccactaccctactgccgggtcattacgtcagtcgtggctcgctcccgctggcggaggcatcgtaagcctttcagacaccttgaaaggcactgtgccagtctgtcgcctttcagacaccttgaaaggcgaagtgccaattcccggtgccgatggctacgcctatggaggccagcgggacagccagacagatgacgtagaagatccagtcgataggcttcagacgcgagatacgggcttgggagcgtagggcgctggagccgaagccgcgcgcttccatggcggtggcaagtttggtggcgcgccggatggagagcaccagcagtccgaacgcttgggagagggcacgggcgatggcgttaccgtcgccaaggccgcgcgaacgctgggacaagccaagtgcgcgccaatcttcctgcagcagcgtaaacatgcgcaatccagccaacccgccgtatacgaatcgcggtgagaagtgcagaatctcaaccaaaccgtccgccaaatcagtgggatcgaggcccagggccaggatcacgccgggtacggcaatggccgccaccctgatagccgtggcgatggccagattaatggatccctcactgatcacaatccagccaccctgccacaggatctcgcccgaggtacggccgtagagaaacacggagataaaactgccggcggcggcgatccataccggccaggtcttacggcatacggtccacggagccacgccaccaatccacagcagcacgaattcgatgccgagcgccgtggatgcggataccacatccagactgatgaacatcggaacgcacagcaacagcgcaccgatgatgcgactgaccgcgttgatgcgcgctatgaaccatgagggcgatgaggctttgaccggctccacgcgcgtttcctgcgggctgacggttaccacgtcactcatgcctcgcctcctcgaacatcacgcgtcgtgcgcccagcgcatccaccagcgcctcatcgtgcgtcaccatgaccacgcacgagccttggtcgcggatggcggcgatcagcttgaccatttcattccacgtactgaaatcctgtccgaatgtcggttcgtccatcaccaacactttgggtgcggcggccagcatggaggccacggacagtcgccgcttctccccgccagacaaggtatacgggttggctttggcgaagcgcgtgagattcatctgctcaagcatgcggtcggcggtccgataagcctcgtcttggctctgccccatcgacttggggccgatggcgacttcgtcacgcacgaaattggcagcgaactggtgttcgggctcctggaacaccatgccgatacggcccagcagttccttgcttttccagtcaatcggctcacgcccggcatgcgcgggcttgaggttgtcggcgatgagcaccttgccggcgataggctcgagcagcccggccaaggtcagggccaaggtcgatttgcccgcgccgttcggacccatcagagccgttacttcgccgggatagaaattcagattgatgccaacgccaagagcggttccacggccaaagcttaagttctcagtgctgagcaccggcgcatcgtgcgcaggctcctgcttcggcgagtaatcgggaatcgcacggcccggcacccacgcgccaccggcggccaatgcgtcgcccatctcggcgaacacctcgtccggcttgccgtcggcgatgaccgcgcccgtgggcgaacttgcatcgggtcggccgagcacgatcacgcgatcgaccagatcgagccatacatcgatatgatgttcgaccacaaccatggtctgtccggtggcctcgatgacctttttgaccgcgtcatgcacttcgaccacgccttcggggtcgaggttggcggtcggttcgtccaacaacagcagaccgggcttcatagccagcacgccggccaacgcgagacgttggcgctgaccgccggacagatggcgggtggaccgatccagttcgagtccgccgagtcccaccatatccaatgattcgcgcactcgctgccgaatctcctcgcgcggcacgttgaggttctcgcagccgaaggccgcgtcatcgcccagtcgttcaagaatgatctgcgagtccgggtcctgaagcaccagtcccacgcggcctcgcgcctcgcgcgcatcgatgccatcgatggtgagcgagccctcctgctcgccttcctcatcgccgccaagtacgcctgcgagaccggccatcatcgtgcttttgcccgcccccgaagcaccgagcagcaacacacgttcacctggccggatggtgaaatcgacggcacgcaacgcgaagtccttacgcgtggcgtgccgccatccccagccgctggccctgaccgcggccggattaacctgcatcagacgcgcgccttgctgcggccggattcaaagcgttccagagcgccggtggcggcgagcgcacgagacaagtaccagaccaccacgccggcgatcacgacgccggagatgatggagccaaccagataccaagtgacgcgcaggccgttccagcccgggttggtggcccagtagtaggcccagcagcccacgccggcgagcgcaccggacaggatggtggtgccgatgttccacttcttccaggcgaagacggcgaaggcgatttcggcacccagaccctggatgatgccgacgatcagcgagccgccgacgccccactggttgcccagcgtaagctcgaggaaggcggcgagggtttcggcaaacagtgcggcaccgggcttgcgcacgatgattgcggcgagcgggccggcgaacagccagaatccgttgagcagaccctcgaaaccgggggtcacgccttcgaacagggccagcggggcggagcagacaatgtcccagccccagaaaatgacgccggatgcgacggcgatgattgcggcgacgacgatatcgacgacgcgccacttgtaattggctttggccacagcttcagtcatgaatgtgcctttcttctgctcgtacgcaggccgaacatacatggatatatgtacgcacatgatgcacatgttcgtggccacgcgcgggttggttcaggcacgggtgggtaagagcgacatttccgtgcgccggcattatccggtcacgttccatcggtcgagactatgaatctcctctcagccgcctaacggcagctcccgtgtcaactccccgactataaagcaagccgccgtcaaaggcaatagccacatccgtgacctacctgacggcggctcgccaccattaccgatgcggttcggttacttgccgagcttgtccagcagcaaagcctcggtgatcacgttgttcttgaggccgggcagggagatggactcattggggctgtgggcgttggccttcgggtcttcggggccggtgaccagcacctgagcgttggggaaaatgcgctgcagttcggggatgaacggaatggagccgccctcgcccttgttgatgggctcaacgccgaaggcctcggtcatggcttccagcgcgtctttggtggccacggcggtcgggtccatggcccagcccatgccgttttcgccgcgttcgacagtgaccttggcaccgaacggcgcgtgggattcgaggaatgcagccagtgcttcctgcgcttcttcagggcgctgggtgggcgcggtgcgcagcgacagacggaagcgggtctccggggcgatcacgttgaaggatccctcgaccgggtgggcgtcgaagccgatcacggtcacggacggcttggtccacaggcgtgaggccagcgaaccggtgccggcgaactcgtaaccggccaccacgccggaatcctcgcgcacggtggtttcgtcaaggtcgcgttgcaaaccgccgattggctcttccgcggccacgccgggcacggccagatcgccgttctcgtcgtacatggaagcgatgagcatggcggccaacgtgttggagtcgagaatcgggccgccgtactgaccggagtgcaccgggtgctcaaggccctgcacggtcacgtccacgcaggtgttgccgcgcagcgaggtggtcaaagaaggaatgtccgccgaccagttgccggaatcggccacgataatcacgtcggcggcgaattcgtcgcggtgagcctcgatgaagggaatgaagcttggcgagcccatctcctcttcgccttcgatgaacactttgatattgacgttgaggtcgtcgcccaaagccttcagcgcaccggagtggatggcgatgccgccgccgtcatcggcggagccacggccgtaaaggcggccgtcgatttcggtggccacgaacgggtcggtgttccactcggccgggtccggaacaggctgcacatcgtgatgggcgtagagcagcacggtgggggcgtccggagaaacgatatgcgagccgatgacctcccatgcgcccggagtgccgtcggcattggaagcctgggccaccttggcatccacacccacgaggcgcagttcgtctgccacgaattcagcggagcgcttcatatgttcggcggtgatgcccttggcggaaatcgactgcagcgcaaccttttcggccagcaccttgacgatgcggttccaatcggtttcgacgcgcgaacgaatctcgtcagcggtgagcgttgccatgatggtcctcctttatatgtgtgtgagcggcgtcattgcaatggctgcgccagtatataagtgtctgaacgtcaccgtaacctcaaagcatgacatggaatccgtttaggaaaaaagaagaggcccaagttcccgttgagcaggccccgaagaagaccgccgatccttctgagaaaaaaggccgtcctaccccgaagatgaagcaggctcaggccgccggtatccgtccgctggttccggtggaccgcaaggccagcgccaaggccgccaaagcccgtctgcgtgagaaggagaacgccgagtacgaggcgatgcagaagggcgatatcaaccacatgcccaaggcggaacgcctgccttggcgtatctacatccgtgattatgtggatgcccgtttcaaccttggcgaatggttcatcccggtggccttcgcgattctgatcgtctccatgttcgtcacttctttgatgcagaaccagtgggcttccatcatcatgatggcgcttatgtacggttacctgattgccgtgatcatcgacgtatggctgatgtggcgcaagctcaaggccaagctcatcgccaagtacggcgaacagtccgtgtccaagggctcccgctccttctcctacgcttggagccgttcgattcagatgcgtcgttggaggcttcccaagccgcgttacccgaagcgcggtcactggccggcagactgatgtccatatatactctggctcccctcgttgaggggctgagccgtaaagaaaacagtccagtggactgtttttaggcgaagtggcggcgatagccgcatatggctccctagcatgggagccatacttatatgcaccaaggaggcaatcatgagcgaacagtttgatctggtcatcatcggggccggccccggcggctattccacagccctgcgcgccgccgaactcggcatgaaagtggcactcgtcgagcgtgacgccaccgtgggcggcacctgtctcaaccgtggctgcatcccctccaaggcgctcatcaccgccacccacaccatcgacaccgtgcaccgtgcggccgaactcggcgtcaacgcctcggtgaatggcatcgacttcggcacgctgcgcgactatcgcctgcgcgtggtcaagacgatggtgggaggactggccggactgctggcccatcgcggcatcaccgtgttccgagccaatgccgcgttccatgcggatgagatcgctccagcaacttccaaccacatcgtccacctcgttccctcccccgaccaaagcgacatcctcacctatcacaaggccgatgtccccgaacccagcggccccacgatggacctcacggccacgaacatcgtcatcgccaccggtgccaagccacacccattgcccggtaacccgttcgccggcgccctcatcgactccacacaggcgctggaagtcaacgaatttccctcttcggcggtgattatcggcgccggggccatcgcccttgaattcgcctcgatgtggaacgccgccggttcgaaggtgaccctgctgattcgcaaggaccgcgtgctctcagcctgggaccggagagccggcaccacgctgacccgtgagctcaaacgtcatggcgtgaacatcatcacccgcgccagcgtcacccatgtggacaccggcgcgaaccttggtgccaccgtgcactacacgcgcgaaggccaggacggcgaacagagcgtttggggcgaaatcgcccttgtcgccatcgggcgtgacccgatcaccgacccagcatggggcgtgacgattgatgaccacggacatgtcgccacgaatgcgtacggtcgcaccgacaaaccgggcgtatgggcggtgggcgacgtgacggccggtcacgcactggcgcatcgtgcttttgagcaaggcatcgtcatcgcggagaccatcgccggactcaatcccaagccggtggacgaagccgctgtgccgcagatcgtgttctccttccccgaagcggcgtcggtcgggctcaccgtcgaacaggcgcaggcgagagaggacctcgtcgaaatcaaggagaccaactatccgatgctggcgaacgcgcgcatgctgatgagcggcacggccggctcattgaccatcgtctccggctgcgacgcggccaacccggacaccccgcgcgtgctcggcgtgcacatggtctccccgatggcctccgacatcatcgccgaagccgaacagctggtcggcaaccatgtgccgctcgccgacgcagcccgcctcgttcacccgcatcccacattcagtgaaacgctcggcgaggcgctgctcaaggccgacggacgaccgttgcacacacgctgagaccaaccagcacaagcaagttcggaccagcgcacctgataagatattgcccagtgtgtttcgtcccaacaaaggaagaagtgatggcggaaaaggacgcgaagccgaagaagcagagcacaatcaagcagatcatccagatctacaagtacacggctaaggaagacaaggccctgccgtggcttgaggccggtgctttcctgctgcctgtagtcgtgatgatcatcatcggtctgattgtcaagtggacctggctgacctggatcttcaccatgattaccgccatcatgctcggcattctgctggccaccatgatgctcacccgccgcgcggatgcagtcggctacaagcagattgatggcaagcctggtgccgccatcggcgtgctgagcaacatgcagaaagccggctttgacttcccgcaggaaccggtgtggatcgacccgaagaccaaggatgccatctggcgcggcacttcgatgaacggcatctacctgatcggcgaaggcgaatacggtcgcgtcatgaaggcgatggatcgtcaggaacgcgatatcaagggcgtcaccgccggctcctccattccgatataccgcatcgccgtgggccacggccccaagcaggtgccgctgaccaagctgcgtagcacggtgatcaagtccaagagctatgagcccacggaccacaagaacgcactgatcgccaagattcatccgcgccgtcgcttcctgctgaccaaggccgagatggaaacgctgaacgatcgtcttcgcacgctgcaggccaagaagggctatgccatccccaagggcatggatccgaaccgcccgcagaagatctcccgccgcgcgatgcgcggtcgctgatcggcagcacacaaccaaatcgcacagaagccccggaatccgttcaatcggttccggggcttcgtcatatgtctcataatcgcgtccacttacatccacctacgtcacctgtcaatacccactgtccacgttgcggacatctctacctactcccccgatagtctccgtttccattctgtaatgatgtttcgttgaaataacgcgcctgcgcgattgtcggccacagtcacgaaacattctcgtaacccaagtttcgagccggcgaaacgcgctattttacgatatataccgttatatctcatacgaaaggagcggtcccgtgaccgaactcaagtccaaggaagacgtcgaggcccttatcaacaaggaaggcatcgagtatgtctccgtccgtttcaccgatcttatcggcgttcagcagcacttcaccgtgccggctagcgaattcctgaaggacgctttcaccgacggaatgccgttcgatggttcctccgttcagggcttccaggccatcaacgagtccgacatgaagctggtcccggacgttgagacctctttcgttgacccgttccgcaagcacaagacccttgacgtggccttctccatcgtcgacccgctgaccgacgagccgtactcccgcgacccgcgtcaggtcgccggcaaggccgaggcctacctgaagtccaccggcatcgccgacaccgcatccttcgctcctgaggccgagttcttcatcttcgacaaggtgcgtttcgagaactccatgcagcgctccttctacgaggtcgactccatcgaagctccgtggaactccggcgttgactccgaagaggacggcaccccgaacatcggtttcaagaatcgcgtcaagaagggctacttcccggttccgccgattgaccacacccaggatctgcgcgacgatatggtcgccaacctgcagaaggtcggtctgatcctcgagcgttcccaccacgaggtcgccggcgctggccagcaggagatcaactaccgcttcaacaccctgcagcacgcaggcgatgacctgatgaagtacaagtacgtcgtccacgagaccgccgctctggccggcaaggctgcgaccttcatgccgaagccgatcgccgacgacaacggcactggtatgcactgccaccagtccctgtggaaggacggcaagccgctgttctacgacgagaagggctacgctggtctgtccgatctggctcgctggtacatcggcggtctgatcaagcactcctcctccgtgctggccttcaccaacccgtccctgaactcctaccaccgtctggtcccgggcttcgaggctccggtcaacctggtgtactccgctcgtaaccgttctgccgccatccgtattccgctggccggcacctccccggctgccaagcgcatcgagttccgcgctccggatccgtcctgcaacccgttcctggccttctccgctcagctgatggctggcctggacggcatcctgaaccacatcgagcctccggagccggtcgacaaggacctctacgagctgccgccggaagagcacgctggcatcaagcaggtgccaagctccctggccgaggctatggacgccctggaagaggaccacgacttcctcactgccggcgacgtgttcaccgacgacctgatcgagacctggattggcctcaagcgcgacgagatcgaccaggctcgcctggccccgaccccgctcgagtacgagctctacttccacatctgagtttgagagcttagcaacgttgggatttcgccattgctcttctcttgtgggagtctaatgggagtcattcagcgtaactagaaagaacctcgtgaaattcgtttcacgaggttcttttttgtatgttgcgttgtatgttatgcgatgtgtgttgctcctggaatattccaagggcgggccgctacttagtctcccaacgctccttgagtacataggcggcggctttgggctgacggtcgcgagtgaagacgcccttcttgttgccgtcgacgcgcatgatgccttcaccggtttggaagtcgcagaggttccatacctgctcgcccaccactgcctcgaacatgtcgaacacttcgtgctgcatggtgaggtactcgcattggtactcttcactccattgcacgctcgggagcttgtgcacaccggcatcggtgtccgcaccgtattcggtgaacagaaacggcttgttgggttcggtgttcatccattggttcatctcgttgatgaaggccttcttggctccgatgagctgatacccatcttgcacataccagccgtaataccggttcaggcagatgacatccgcgaactgatggcacttgtctttgcctccggcggccatcagcagattggtgtaggtcagcgggcgatgctgcggatcgagcgtgcgcgcgtaatcgaatatctccttgaaatacggcacggccgcctcggatgccgagtcgttggcggcgtcgatgaaattccaagcgccggaggtccccggcattcttttcgtcgaaggggacaattcagaacacgaccgccgacacaatcgtcagggaggccagcgagaacagcgtgcttacgagcacgaagccgaccgcatactcgggcatgttgttcttgcgaccggtgaacatggcaatggtggtcatggtcggcagtccggcgatgaccgtgatcatcagcaccatgtcatgggtgatcggcagttgcggcaatgcgccggtcagcgcggtcagtagcgcgtagaaggcgagcgggaatgcgatcatcttggcgactaggccagcatagagttcgtagcgtttgaggacgccccaccacttggtcagcgcgaacaggccgcccaagtagattagcgacatcggcgtggccatattgccgatggtgtgcagcggcttcaggatgatgtccggcaccttgacgccgagcagaatcagaatcagggcgagcatcacgccgacgaaggcgggattgacgaatcgtttaagcaggccgaggacgcgggtgcctggcgaggggcggacgacggccggagaaccaccgtttgcggcattgctcgccgaaccagcctcccccaccgaaccggcgccgttcaccgaaccgttcgcgaccgcacctcgcgcgccaatcgcgttgccgtcagtcgcttcgacgaccggctcgcacagccatacgccgtacgtccagagcagcgtctggtcgatgatcgacatcagcgccacgtaaatcgcgccgttctgcggccaaagtgccataatcaacggaatgccgatgaatccggcgttgccgaaaataagcgacgcctgaaatacatggctacgcgaacctttgagccgcaacagtttggcgaccagccagaacaccaggatgagcagcgcgtacatcacggcggtcagcagcatcacgccccagttggcggcgagctgcgcgcggtccgcgccgtcgacggcgttcgagaacacgagcacagggatgagcacgttgagcagcagcgaacacatgccgtccagcgccgtctgaccatagaaccggagccttacacatccgtatccgaccatcagcatgatcaggaatccgactaactggccaatcatgacgccgaactgccccatgcacactcctctcgtttgctctcccgcgatttcctgtcactggttcatataggcagccatctggacaggctcggcggcacacgcatcagtatgttcgataccaccacatgccaatccacttctcgttcaaccgttccccgtgctaatgcgccgcctgccaccccgtgttgccggtgctgcgcgagcaccgctacgtgtattgcattccggtggccctcgggcgcaacgtgtgggtcggcgcgaacgtgtcgattctgtcgggagtgaccatcggcgacaattgcgtgattggcgccggtccggtcgtgacacattccatccccgccaactccgtcacctacggcgcgccctgcgaggtcgtgcgtgaaatcggcgacaaggaccgcgagtatttctacaaaaatcgcaagctcgacgtgtgggagtgagctttcgcgctactgctctttgagcttaaaacgctcactgaattggcggtcgcgccagtagtagacgtcgtcgcgttcgttgatttcgcgaattaccttgcacgggctgccataggcgaccgtgttggcggggatgtccttggtgaccagcgagttggcgccaatgaccgcgttgtccccgatggtgaccccgggcagcacggtgacattcgcgccgatccagacgttctcgccgatgtggactggcaacgaatactgggcaccctgatagcgcaggtccggacgcacgggatggccggtggctacaagcgtgacgttggggccgatcatggtgtgggatccgatgaagatctcaccatcgtccaccagcgtcaggttgaagttggcgtaacagcgctcgccccaataagtattgcagccccagttcgcatacaccgggcattcgaggtacagaccctcccccgccgcgccgaagaacgcctgcatgagttcggtacggcgcttcgggttggtcagcggcgtggcgttgagttcgagctggagatcacgctgggcggcctgcagatcaaaaaagccgtccacatcatccggcaggtagacctcgccagagaacataagcgccattttctcgcgcgtcgcatcatcgataatcggcttggcgatcggcttgtcttcggtcatcattggctcctgttcggcgttttggcgattgtgtcggtcgaactattctgtcacagactcgttttcgacacccagcatcgagcgcagccagtcaagttcggcggcaatctcggcgtcatgcacggcgatgatgccgcggcgataggggtcgtcgatctgctcggtggagagcggattgccggcgtcacaggcatcaccgtcaaggccggcgccaccatgcaggtcatcgaccgtaacccggacaaggccgcagcagcagcggctgaaggcgttaccaaccagaccccgtggaccggcggtttcaaggtcgtgaagtaagaggcgcgtcgcagcgaatcgttctcaataagaaaagtgtgaggcaaacgcacaatatcactcaatcgcgcattcgcgggaatagcatcaaacagccatttcttggattcagatgtgcgattggcaccgtgcgggcctcacacttttcttattgagaacgattcgccgtgcagtcaagccctccatccacccaaaaacgactcgcttttggccacatcatcgcggtaggccttgccgaactcgtcaatgagcccatggaattcctgcaaatccttgacactgaggttcgcatccagcaccacgggcgaataggccctgtggaatgccggatagccggccggcacatcaaatccgaggaaggcgaatagtcggcgagcataagtatcggccacgaatgtgcggcgcgaaaacacatatagcatcaggtcgtcggccgtttcgcccccgataccaaataatccgagcaattcggtccgcaattcggcgtcgggaatatctgccgctccctcaggtgaggctccgcaacgctccacataccatcggctcagtgactgtaccgtcttggatttgttgacataaaagccggacgggcgaataagttcctgtagatgcgctggccccataatcgccagcttatggggttcgagcacaccctccgcgttcaacgccgcaagcgaacgattcacattgccccacgccgtattctgcgtcagcaccgcacccaccataatctcgaacgtggtctccgccggccaccatccggtcgggccgagtgcgtcagccatggtgcggtacagcaattcgatgcgctccggcacaggccacttgtgtgcctggttggctttcatacgtttcatattctgcattcaggctccgtattagccatccgccattcatttattaggtcgattatgcgttcattaggtcacttgtgatgaacactgccttcaagaatggcttcattccaatgctcattatctcatgctaagcagggcaccgacctaatgaacgcataatcgacctaatgaacgcaacggtaaggaaaaactacagagattcagcgagatatgctcggtccacctggtctggaagtcgaaaatcttgatgacatctaccgcaattcgtgcaggattcgccgcatgaacgggatggtgaccacgaatgtcagcacgtcggacaccgattgggccatttccacgccgagcacgccgaacatcatcggcagaatcagcacgattggcgccaggaacaggccttgcctgcacaaggccaggaacgaggcgatgccggtgcggcccatggtctgggtcatcatattgcccatcatgttgaagccattgagaatcaccgtgcagcattgaatatgcagcgctgccacgcccaccgccaccacggctgggtcggaacggaagatctcgaccagttgcggcgcgaaaatccacagcagcgctgccaacgccacgagcacgcaggtggcgagccgcacgcagaaccaatatccctctttgactcgcgcgaacaggccggcaccgtagttgtagccgcacaccggctgaaagccttggccgagacccacgatcaccgaattggcgcccaacatgatgcgcatcacgatggccatgccggcgatggccgcgtcgccgaacgggttggcggcgatgttcacgcaagtcacggaaatcgagccggcgccttggcggatcagcgaaggcaggccgccgccagccacttcgcgcatgagcagcacatccggcctgcaattgcgcagggacagtttcatcacgccgaatttgcggctcatcgtggtcagaatcgtaaagctcaccgtctggcagatggcggtggcgaggccggcaccgaaaatccccagaccggccacgaaaatgaacaacggcgcgagcaggaaattcagcaatgcgcccgaaaccagcccgatcatgccgaacgccgattgcccttggtatcgcagcagtccgttgagcgcgaacgacccgcatacacagggtgcggcgaccaacaacggcgtcaggtattgcacggcgtatggggcgattgtcgaggtcgatcccagcatgacgaccagcggccgcagggtcagcaatccgattgtggcaatcaccaaaccagagagcaccgcacccgcgaagcccacggccagtagtcgggaggcgcgctcattgttctgtttgccgagttcgcggctcatcgagttgcccgcgccgttgccaaagaagaagccgagcgcctgcatcacggtcatgatggagaacgcgatgccgatggcgccggactgcgcggtgccaagctggccaataaagaacgtgtccgtgagattgtaggcagtggtcaccagattggagatgacggccggcaagcacagtttgagaatcagcggcttgaccggctgcccggtcatctgccgatatttcgcgtccgcgcttgcgcgtctaatgccatgaatctgcaccatggacggctatcctactcgcgcagggtcctatgcaaaggcgcgttaccgccatacgagtcagcgcagataccgcccggtgatgctgttcggattggccgcgatttgttccggcgttccggtggcgacgatgtgtccgccgctttcgccgccgcccggacccatgtcgatgatccagtccgcattggcgatcacgtcaaggtcatgttcgatgaccacgactgttgcgccgctcgccacaagccggtcgaacacgcccagcagcacacgcacgtcgagcgggtggagaccgatggtcggctcatcgaacacgaataccgcgtccgactgcgccttgcccatttcgctggcgagtttcagccgctgggcttcaccgcccgaaagcgccggcgtcggctcgccaagcgtcaagtagccgaggcccaaatcacgcaaggtggtcaggcgcgcgtggaccttcttgaggtcgccggtcacggacagcgcctggtccacgctcatcgccatcagctgcggcagactcaacgaaaggtgcgattctcccttaacggcacgccgaatcgcgccggcttcgggcgcataccgggatccgccgcaatccgggcattcgatggtaacgtccggcaggaactgcacgtcgagtgagatcgaaccggtgccgtcgcacgtggggcaacgcagtcggccggtgttgtatgagaaatcgccagccttccagccgcccgccttggcgccgtccgcgcgggcgaaggcgcggcgcaattcgtcgtgaatatcggcataggtggccacggtggaacgcacgtttgcgccaatcggcgtggcgtcgatgagattcgcgcgactgatgcccgcggtctcaagctcgcgcacgtgttccggcaacagctcccccgccgcctgcgctttgagtgcgggaatcagcgattcgagcaccatcgtggttttaccggagccggagacgcctgtcaccgccacgagccggccgcgcggaatatcaacgtccagcggcttgaccgtatgcaactggctggttgtcatgcggatgtggccaaggtcgaacacctgcggttccgccacgcgctcacgaatacgcgcgtttgcctgatctgacaggaacggtgcaatgcggctgcctggattcgccgccacctcgccgaccgtcccttgcgcgatcacatgccctccttcggcgccggcaaccggtcccatttcgataagatggtcggcggccttgagcacgcgcacgtcatggtccacgaccaccacggaattgccgtccgccaccaagtcatgcatcacgccgagcagcccatccacgttcgagggatgcaggccaatggacggctcgtcgagcacatacagcacgccggtggtgcggttgcgcacggcacgggcgagctgcacacgctggcgttcaccggttgaaagcgtggcaccggcgcggtcaagcgccagatagccgaggcccagatccaacagtcggcgggccacgtccaggaatgattcgcagatgttggtggccatcgtccgcatgtcggcaggcagggattccggcactccgcgcacccaatccaccgccgcatccaaggtcatcgcgctggcttcggcaaggttcagcccgcgcacgtgcggagcccgggcgacggcgctcagtcgggtacctccgcagtcggcgcatggtccctccttgagaaatcgagccacgcgcttcaggcctttctcgtccttggctttggcgagcgcgttctccaccgtgtatacggcgttgaagtaggtgaaatcgagttcggcgaaatcgtcgcctttcttcggcttgtaaagaatatgctttttgacggccggcccgttgaatacaatgtcacgctcttcgggcgtgagctcgctgaacggcacattggtgcgcacgcccatcgcgccgcacacctgcttcatgaggtcccacatgagcgaaccccatggcagcaccgcaccgtcgtcgatacttttcgactcatccggcaccagggccgcacggttcacttcgcgcacaatgccggttccggagcaggtcgggcaggcgccggccgagttgaaggcgagcgattcggcgccgggcgcgtggaattccttgccacagctgacgcaagtaatgggcagtccggccgccacgttcagcgtcggttcgttgcgcgccccgcaatgcgggcacacgtgcgaggcgacgcgggagaacaggagccgcagactgttgagcagttcggtcatcgtgccgaacgtcgagcggatgccaggcacggtgggccgctggtgcagggccagcgcggccggcacatgcagcacttcgtccacttgggcgcggctggcctgggtcaggcgacggcgcgtgtacgtggacagcgcttccaggtaacgccgcgaaccttccgcatacagcacgccaagcgccagcgagctctttcccgaaccggagacgccggccacgcccaccagttcgcccagcggaatgtcgatgtcgatgttcttcaggttatgcacgcgcgccccgcgcacttcgatcgtctgcggccgctgatcgttgctcatgctcggcactgctccgccgccaccctactgtctgacctattatcaagcgtcacgccgttacctctttctcgacctcgccctagaccgccgccgcacgagcttcatggtctccagtatcatcacgaccaacgacggcggccgaacgccggacgagaatctttcgtcttgggcaccgtccgccacctgcaattcgaactagctgaaccagcgtgacgatattgtcggctatcgatctgccgtgatcgtaatggacatcgtcgtccggaagcacgtcaccggttccgagaggagtcggcggcgcgctttcataagggcacacaatcccaagatcacacccacagatcaataccgatcaatactcgtacgtgatcgcggggtcgccgatggtcggcgtctgatccagtttgaggttggccgagccggccgcggtggtcacatcgtattcgatggtcaccgtgtcctgaggcgccagggagatgtcgtccatgtaggtcatatggtccttggcctgcacctgtgcgaaggaactgccgttcgacgccgacacgttgctgacctcgcctccggccggcgtgtagatgaccacgcggttcaccgccacgcctcccttggcgttcgccgtgatgtattccggcagggatccggcctcgcccggctgcagggtgttggtgaacgaatacgtaacgtggtaggtgttgtcgccggtcctcttcaccgtcgacttgcgctggatgtaccagtccatcttcgaggcctgcatctcgttgaagtagacgccggtcaccgggttcttcgcgtcgttggtgatctcgccggtgacgccggcgctgcgcagcaccgcctgatcctcctcgtggaacgaccagaagtacaggtgccgctgctcggccatccggagcatcgtcttggcgacggtcatgagcttctgcgtgttcatgtcgctgaacaggtgggcgaccgcctgggcggcggtctcgctgaagtactggtcctgagcggagggcgtcagttccttgtaggcgccgttgagcaggaattcggcggtgttcgacccgttgagcacgcgtccgtcagacagggtcacgtcgccggtggcgccgatcatcgcctgcagcgcgacggggtcgagcgacatcacgccgtcggacgatccgccaaacggagccgcctgccagaacttctgggccatggacgcgacgcgcgggaagtccggcgtggacgaaagattatggatgacttgaccgaagtacagtccgctgtacagcgtgccgtcaccgtcctggttgacgtcatccaacgcggcgttggaggggaactcggcatccgcgtggaactcccccaccgcgatcttgccgttgtccgcgctgaaggaaccggccgaaccgatcaggccgccggttccgcggatctcggaattcgtctgggccagcagcacgtagttgcgggcgccgttcgcaccgaggaagttcggcagcatgttgagcatgccgctcaggttttcggtcacctgcgccagggcggccatctgcgtcttgccgttctgcagcgcgttgttcaccacgccgagtttggcgtcgggaagatcctggatcgtcctggcctgcgattgcacggactggtcgaccgtggcaagctgctgcgccgcggcgatgatcggctccatgttgagctgcccatcgctactggagaggctggcaccggtcagtgtggtgacgaccttgcccagctggggcagcgtggtctgcgcgaagtcatcgatggtaccgatggcggtgcgcgccgtcttcacgtcaccgccgaccacgggcatcttctccgccagcgtccacagaccgccgctgacatcctgcttggcggcggccgcctccttctggatgtagctcacgtcggacagcgccttgaccatgtcgtcggtggaaccgtccttgatgaccttggccgcgttgacgacattgttgaggtgcgctttggcgctcatcgccgacttgtacagtttgaatccgctgaagccggccgccgcggcgcacatgaccagcaacagcagcacgacgagcagcgcgttgcgaacgcgatgggttgtcctggggaccgtgcgtgcgtgtgatggcatgggctacttccttacgttatgacatgtatcgatactggctggctgcccggttacgctttcgctggacgggtagcccggcggacggcacgtagcagtgcacgacgtgcacatcgcgtatgacgccgggggtcgtcagcgcggctgactggggtggccgcggaccggtacctggacttgcagctgccctccggcgatgcgtgtcacctgcagcggggaacgtccgctgcagttacggctattaccggccagccgacagcaatcgctggtttagttgttggtcttttccggctggtcacccgttcccatgagctggcatgcacctttcagcgagtatctctcctaccgcatgccagtctacccatgcctgcgggataacccaaaaagccttgcaagaataccgaatttctttacctttggccctgatcgttcgacggctcgcaagacggcgtaacctcatccaaccggccgatccccggaggcggaaccagcggaatcctcgtgaccgggaatgcgatcgttcccgcttgcgcgatggcggatgcgcgcaacgccagccacaggtacgagaccgactacttccgtacaggatccgttgtggtcgcattccatcgttcagcgcaacgggccataacgccctaaacgatgccagccatgtacaacggcacatctcggatcggccccacatcccgataccggtcagcagagaaacgataagcaagcggataaccgtgcctcttctgcatgattacaagcgatttggcctgtcgatgagtcccctccttcacttccacgggcaccgctttgccattcctctcgaacagaaaatccaactcaccactggagttctcggccgaccagcaatagggtgaatggccgttcatcatggtcaattgctggcatacaaattgttcggcgatcgaacctttgaactctcgaaaacagtgcgtcaccttccagcaacacacgaacattcagaccgctcaacgctcctagcagccccacatcgaggctgtacagtttaaacgcagagccgtctgcatatgccgccaatggttcaagaggcgcactcacccgattcacacgcaacgccaacgacgcatcgacaagccactgtatggcactctcaaaatccttgccacgtccaccagctcgcaccacgccgtatacgaacttcttgttctctttcgccaactgggaaggaattgaatcccatacctgattgagacgaagcgtggtgacggcgggactatcacgcatatcaatatgtttggagaaattgtcacgataatcggagaccagactattctgcaatttacgaaccgccgtgaagtcaggattcggcagagtactggcgaacgcttcaacgatctccggcatgcctcctgtatacatgaaataccgcagccaagtcatgaccctgtcatgcattacgttaattagcggaaaatccttgggctcaagcatttcggccaaggcatactgtttgcacgcatacaggaattcaacaaaagacataggatacagcttgagtctactgaccttgccaaccgggaatgaaaacccaggatgcatggcgatgcccagcgccgatccagtggccaagacgtcatactccggggcgacttcattgaacatcttcagcgaagtcatcgccctcggcacctcctgtacctcatcgaaaatgacgagcgtatcctcgggagtgatcttagttccggactcgatcgacagtgcgggaatcagccgttccacactcagatccgcatcaaacaacatacgcatgttggcattgtcgaaaaatgcgacacaacagcaatacgtaaggtacttgacaatctttgatggagtcgtatactcatatctgtcaggtacttgacataattactgaagaggatgaaaaagacacacgaccagcgacgcttcgctcgcttccttattaaaggagaccggcatgaacatcacacatgacatgagcaacgacctcaccgaatacgacccggaatcccgtcaagtagacggaccgaaccccatcgaaaaccgcatcagctcctccgcggcccgtgttcccgacatcatcagctgcacttccggcatcaccgtccaaggccgccaactccactcgttcgcgttcaccacggacgcggccatcatccgcaacaccaatgccgacgccattctcgccgtatatccgttcaccggcgaaccagtcatcacccaggccctactcaccgtggcccaggccccgctgttcgtcggcgtgggcggtggcaccaccaccggcccgcgcgtcatccaactcgccatgatggccgagatgcagggtgcggcgggcgtagtgctcaacgcgccggcgccaccctccacggtgtacgacgtggcgcgcatcacgaacatcccggtcatcgccacggtcctgacctgcgatgacgaattggacgagaaaatcgaggccggcgcctccatcatcaacgtggcggccggccgcaggacacctgacgtggtccagcagatcaggcagcgtcacccctccatcccgctgctcgccagcggcggttcgaccgacgagtccatggccgaaaccatcgtggccggcgcgaacgcgctgacctggaccccgccgaacgcgcaggagatgcagcgctcgatgatgatgcgctatcgcggcgaatccaccggcgacaacatgcagcactgacgtaaggattccgaacatgagcagtaccagcaacaacgccgccgtaaccggaaacgacgcggtcgacaacgtaatggccacgagtcaatcggcggagaacggcacaagccacaacaccgccgacggcgatatcaagaacgatgttctcagcagtttcatcagcattggccgcatcatggcgtatcgcgcgatacacagacggctcgtctcccccggcgccaaatcgccgcgcggcgaacatgctttcgacccgcgccgcggccaaggccgcgtcttggccacgctcagggaatccgaccagaccagccagaaggacttggccgcgatgttcggcatgagccgccaggccatggccgaactgttgaagaaactggaggccagcggtcacatcagccgccgtccatccaggcgggacagccgcgtcatgatggtcagcctcaccaaccagggccgcaaggccgccgatctgctgggcaaagcgcccgaccagacctcctccatgctggactgtctcaatgaaaccgagctacaaaccctacacggctacctgcagcgcatcatcgacacctcctccgacgacctaccggcctcgaccgccgaggatgtcaaaaagtgtgagctgcttatcgaacacctcaagcgcaggcgaatgccggccgaccgcgcatagtttgcgaacagcccgcacgacttgtggccgcataagcatgcggccgcacaacagtccagccgcacagtcatccagccgcccctacaaacacgcccgattcaccatttgcacggcatcttgcaccaaaccctactttgaaatgcggtattttgcgccaaaaccccattttgaaatgcggcattctgcacatacaaggcagaaaatgctactcccataagggattcggaaaggaactgccatgcttgagcgcaagatctcggacgatctgttggaatggaagctgatcggcaccggcaaagcactgctgctgaccggtgcctgccaaatcggcaagagctacgcggtacgcgagttcgccaaacacgaatacgctcattaccttgaaatcaacctgtacgagaacaagcaggaggcccgcgcgctcgcatcggcgaatgacgcgcaggagttcatcaaccgacttaccttgttctcaccttcaacgctcactcccggcggtacattgattttcatcgacgaggtgcaagaggcaccggatgtaatgaccacgtcaagtttgatgtaccggcgtcgcaattcgacgatttgacgtttcaccacatgtcgctgattgcgaaaaacagcaagtcgtgattcgagcgtggcatcaccttgcttagtcatatcaacaaaatccttgatctctgcgagactcatgcccgtggatttcagacattcaatgagatcaagcaattcaagatcgccgtcatcgaagcatctccgtccgaaaccagttcaagcgataccgggcaaaagaccttggccgtcatagtagcgcaatgtatgttcggacagcccagtctttcgcgacacctgaccgatggaatatcccatgccaactcctttccctgcagtcgagccagtgtgagtccagccatattcacggatgtcctatgcggaacggacactcttcgactgcctgaaccttgcagcccaaacatgcatcaatcagcacaaatcacagacagtgggccatatacaacggcagcttgatgcgttctccatccacttcgagttggcggggatgcagaacgtattccttgcccaatcgttgggcataccttttgcggaatttgtcgagcgaagatacgccgtatcgtttcgtggatttcacttcaatcgggctgatgcgaggcttcatcgcggcattatcgtattcccgaacgatgaggaagtctatttccatggttttcgtggcatccgccctatccgagcgcgagaagaaatacagtttgcgcccattcgcccggaattgctgagccaccgcattctccaccagcatcccttcgttgagcgaaagcttatcgaacagaatatcccggtacacatcatccggcgttgtctctcgatcggcaaacgcctgcgacaccagcaaaccggtatccgccatatagcatttgaatgaatcgttatcttcgtacaatcccagccccaccaaagggtcagtcgaattacggcacaggttcaccaagcgggcgtcttccaaccagaagaacgccgaatcgtattcacgagatcgagcccccttatcgaccgatgccagagtgaatcgtttctcatgcttggacagctgccctggaatctgagcgaaaatgccccgcacgcggccggcatcgccattggcgaacttgccgatatcatcactgtacagctgcaggatgccacgcttgatcaaatccacctcgccaaaatcgcgctgctcgacataatcggcaaccgcctgcggcataccgcccaccagcagatattcgcgccacagcctcatcgctcgtttgtgcagcgcatcgggcaacgggaccagacgctcgaacgatttgcgaatcgtttcagcaagcagctcctcccccatggcccagcagaactcctcaaaatcgagcggccccatatccattttccgttcctcggaggggatgacgatattcgccacattcctcttgatggagatcagcgaaccagtttccacatagtcataccggccatccgcaaccagatatttgatgagctccctcgccgccggataccgctgcacctcgtcgaaaataatcaacgattcacgctcgtacagtcgcttgcggtaatacgcagacaacagcatgaaaaatgtgtcaaagtcatcacgctggttttcgaagatgtcgcgaacgtcgcgcggcaaacgcgcgaaatcgatgagaatatatgacttgtactgaatgcggccgaattcctcgacaatggtgcttttgcccacacggcgagcgccttcgatgagaagagcctcacgcccacccgctttttgtttccatgcgatcagcttatccagcatcttgcgcttcaacatgagcaatcacctcattacacgaaaacaacagtatgggcatatgctattctacacgaaaacagaggtatagaggtagccgattctacacgaaaacaacggtatggaaacatgcaccgaaccggctcacccccaatctctcccccatcacaccggcggcctgttcgattgtgcggttttgtgcgaatggctcacacggttcttagtgagaaccgttctctgcgcacctgaccctagaaccggatcagcgccttgatgaccttgcgctggtccatcgcctcgtaggcgtcctggatatggtcgaggtcgtactcggcggtgaacacgcgaccggggttgatttcgcccttgagcaccgcatccagcagaccgtcatcgaggtcatagtggcgcacgggagccgggccgcccttgatgccgatgttgccgtagaacgtgccttcggcgctgatctccacgtcgtgcggcaggcccacacgaccaatcacgccaccgcggcgaatcaggccaatcgccgtgtcgaaggactgcttggagcccacgcattcgagaactgcgtccgcaccatagccaccggtcatctccagtaccttgtcaatagcctcttggccacgctcgggcacgatatcagtcgcaccgaattcgcgggcgagcgccgcgcgatcctcgtgacggctcatggcaataacgcgcgtggcaccgcgcattttggcggcaatcacaccgcacaggccaactgcgccatcgcctatgaccacggcggtgtcaccgggcttgacctcggcagaaaccgccgcgtgataaccggtggacatcacatcggaaacggtcagcagcgaagcgagcgtcgcgtcatcgtagtcttccggcgaaccgggcaccttgaccacggtgccgtccgcctccggtacgcgcaggtattcggcctgacaggcggagaagtagccgccgtgcgggcacacggattcgaagccggccttgcataccgggcacttgccgcagctgtacgggaatggcacgaccacgaaatcgccgggcttgacggattcgaccgccgcgccaacctcttcgaccacaccgatggactcgtgacccacctggctgtgtgcggcctgtccgctcagcccacggaagaaccacaaatcagagccgcacacgcacgtgcgcaccacgcggatcacgatgtcatcatcctgttcaagcatcgccttcggcacttcttccacggtcatcttgccaggctccacgaaaatcgcagctttcatggtttcagacatacgttcataactccttgttttccggcatcgagcgcttaaggcccgttatcctcgtgttctattagacaataatcgccttgcattaaccaatagccataaaccatgtttcgccatacccatgaggtatggcaacaaccgagcaattcactgcgataggccaatatccgagatacgctcactgttcgattcgtcgccatgagtaatctggagaaccggcgatgggacccgcctgaacttgtttcgaaccgcgcactgctgatagttcctacacacgatttgacattgcatggaatcgttgtgtcttcagtaggattcagcggtttcaggaaaggctattatgggctcgcaatcctcatccgcagatgcccggccgggcacgcgcacggccactcctccggcgcacaaactccccgatatccatcttgatattgtgttggtcgtcttctgcggcggtgccatcggcaccgcgattcgctatgcgttcgcgcagattcccgcagccggcagcttccataccggcacgtttgtggccaacatgctggcctgcttctgctatgcgggtctgaccgcctatttggccggctcttcccggttcgacacgcgtgccaaggagctcaccagccgtgggctcggcatgggcgtatgcggcggtttgtctacgatgtcgacgttggcattggaaggcttcaccgcgattcgcgacggtcaggtggcggccggcattgcctatctactggtgacgttcgcgctgggtctggtttgtgcgtctgccggcgtgtgggcaggaacgcatctggccggcccctcgaacgcatccgccgaagcgtccgctgatacgaatgccgctacgaccagcaagggaggtaaggcgtgatgaccgtattcctaccaatcttggtctgcctgtgcggcggcgtaggcgcctcctgccgctatctgcttgacgcgaccatcaaaacgtattggcaacgcgcattcccgctgtccacattcaccatcaatctcatcgccggattcctgaccggtctggttgcggcgctggcactgggcgggacacttgatgaaccgtggcggctggtgctggccaccggtttcctcggcggattctccacgttctcgaccgcgatcaacgaaatggtgacgctcttccacaaacgccgctaccccacggcaacggcctatctggtgctgtcgctgggtgtgccggtcgttgctgcggcctgcggttttctcgtctgaccgccacgacgattcccgacgcggtcagcggtatcatcgcgaggtcgaacgtcacaggtacatccgggaggtatatgggcatggcgaacaatggagcggatgtgaagcacaatcagggcgcggacgtcacgaatgcctcggccacgacgaacactgcggaaaataccgtgggcacggcaaccccgaagcaaaatggactcgccgtgttgggcaagtatatgggtgtttccgccacgcagaccattgtggagtatgcgacgttcgccatcctgcacttgatcggcgtgccctcgcagatctccaacggtatcgccgtggtgtgttcggcgacctacaacttcgtgatgaaccgcaacgtgacgttcaaatcgtcaagcaacttcacccgttccgtgatgcttttcgtgctgctgtgaatctggaacttcacgttcagcacactgctgatcggctggatgccgggcgcgacggacctgagtccgtatgtggtgaagttcattgcgatggcctgccagttcggctggggttatccgttgtgcaagtacgtgatttttaggtgacacattccaattgctcactgtcgttcgccttcgcctatttgtatttggagcgcttatcagaagaacagcatcgcaacgcctgcggcgaagcacatgagcagaatcgatgtcaggaagctggcgagcatcggcttcttgcccttggaagcgatggccttgaagttcacgttgatgccgagcgcggccatggccatgccgagcacgatgtacgcaaagtccacgagctgcggggtgatggaggcgatgagcggcacgaaggtgccgatgatcgaagcaccgatgaagccgagcatgaaccacgggaaggccacagtcttcttgccggtgttctccacctcggagtgcttcttctcccaccagatagcgatgatgatggccgcgaacacgagcatgagcacgcgggaaagcttcatgatggtggcgatgtccaccgcgccgaaagcgtcgccggcggcgaccgcgtgggcgatttcgtgcagggaagcaccggcggtgatgcccagctggtccttggtcatgccggccagcgggccgagcgcgatctccagcaacgcgaacacagtacccataatggctacgatggccacggccatggtcacgtcgttgtccttctcgtcctgcttgtcctcaggcaccttgatggaaccggccagacccatgacggcggccgcaccgcagatgccggtgccaccggcggtcaggatggcgagcatcgggtcgacaccgagcttgcgggcgatggcatagcacacgatgatggtcagcgtgacgaccacagctgcgatcggcagacacttgatgccctgcgtgaacagcacggcgaggttgagcttgaaaccgagcaggatgatgccgaggcgcagcagcttgttggaaatcaggccagcggcgtccttgacgcctgccttgcggccatcattggaaccgacgtaggcactgcggatcgggaactggatgatcataccgatgagcagcgcgatgataagcgcgccgaacaggctgaatccggggaactgcttgagccaggaggcgaacagcgaagccagcagagtcagaacgccaatgaacaacatgtcaacggtggtaatgcgcttccaccattttgtacagaactctctcacggtgtctattgaagctcaagcatttacatcggtcaaatcattgcaaccaatacatatcatcgattttgtcgatacctaattgatctccctctgatgagggaggtggccgccgcaggcggacggagagagagaaacaacgttcgcgacctcccctcagtcgactatctgactacccgcgcagcgcagcaataatcatctccgccaactcccgctgatcgtgcgtcagaccggatctcggcaccagcgcatagaaccgccgcacaaactcatcgccaagctcccgctgcaccggcacgcccgccggcacggcggcttccgaaatcaacgactgcccgaacccggcggacagcgccgccacaatcgccgcattactggacacttccatcgtgcgtgcaggcacaacctgagcggtcttgaaatacaaatccgtgtaataccgcacgccggaaccgtgctcgcgcaccatccacacgccgtcgggctcccccgccaacaccagccggtcctcgcacagggtgacgcggtccaccgaatcgttcacgatcggcttttccaccacgccgagctgcacggccttcatgctgacccgttcgagaatcgcatccgagttcatcacgtgtacggcgaagtcgaaactgtccatgttccgagccatcaccggcaacgccttcggcagcagaatcgccgcggtcgtgtgcgagaacgaaacggccagcggctcacgcgcctcctgcacgcgggcgatctgctcacgcgtatcccgccataatccgtcgatgccgatggcggtctggtacagcatccgcccggcctgtgtgggcgtcacgtcgcttttcgcattgcgcacgaacagcggcgcgccgaccatctgctccaattgggcgatacgcgacgacaccgtcgactgcgacaccttcagttcgtcggcagccagcgtgaactggcccacctcgtatacggcgaccagggtttcgagcagagggaacatggtttaactgtacgctgtatgatgcacgaatatttcaattagcttgggcgtagccctaggccacggacctggaccaccctcagtctcgctttgcgagccagctcccgccagcgggaccccaatggttttcatatcactatgcttcgcgcagttttgcgagctgtgttttggtcttgtggagcttggcatagatttcattgcgctgaacaggattcttgacgcgctgatggtcgcgggtgagcttgtccacttcggattcgagccgagcaatttcagtatggcgaatgatgcgcgcatccagattttcgatctccggcgtgcccagaatggtctgtgagcacagcgaggcccacagctcatcaatagtagagccggccagctccagctgggcctcccccgccggctgccaatcgccggcatatacccgatagatcggcgtgtggccggcacgccccggtatcgcccgacgcacggcgaacgcacattcctcacgtgtgctgccctcgaacggcacgtcgcgtacgcacacgaacacgatgcccgatttacgctgcccggcaatcaaatcgatgacctcgttcggtatgccagtggctttggccgtaagcttcagtccgatgaccagcacttccggaaccagtttgccgtccgcaagcccagtgttaatcgaccggaccaacgccagcatggtaatggattcgatttcgttcaccaatcgctgcttgagtttgcctgaaatcggtgccttgcccacgaacaaggctttcggcagtgtgcctttggcttcgggaatcgccgtggagacgggcagtcccagtgaaagcgcggatacggaaccacagtgtgcggcttgcgaaccagtcatcatcgaccttctttcccggcctgccatcagtgtcataccctcgcagtgcagcagtccgtttatctattggaaagcaacactagcgcatccaggccggaagtcgtggtacatatccatatcctgctgcggttataggaaatcccctccgagtttcctcgaaggggatttcttaagtcgctagttcaagcgaagattcttgtctgatgataatcaggcgaggatcttggtcacacgaccggagccgacggtgtggccgccttcacgcacagcgaaggtcaggccctcctccatggcgatgggctgaatcagctcaacggtgaaggtggcgtggtcgccgggctgaaccatctcgacgccttccggcagctcgatgacgccggtgacgtcggtggtgcggaagtagaactgcggacggtagttggagaagaacggcgagtgacggccgccttcgtccttggtcagcacgtagacttcgccctcgaacttggtgtgcggggtgacggagcccggcttggccacgacctggccacgctcgacatcctcacggccgaggccacgcagcagcagaccggtgttgtcgccagcctcgcaggcgtccatggtcttgtggaaggtctcgatggaggtgacggtggtctgctgggtcggacggataccaacgatctcgaccggagtgttgacggccagctggccacgctcgacacgaccggtgacaacggtaccacggccagagatggtgaagacgtcctcgatcggcatcaggaacggcttgtccaggtcgtgaaccggggtcgggatgtagtcatcgacggcggccatgaggtccttgacggactggacccacttctcgtggtccggagcgtcgtcgtgcagggcgccgtaggcggaggtgtggatgaccgggcagtcgcgatcgaagccgttctcgtcgaggaggtcacggacctcttcttcgacgagctcgatgagctcttcatcgtcgaccatgtcgcacttgttgagggcgacgaggatcttcgggacgccgacctgacgggcgagcagcacgtgctcgcgggtctgggccatcgggccgtcggtggcggccacaacgaggatggcgccatccatctgggcggcaccggtgatcatgttcttcacgaagtcggcgtggcccgggcagtcgacgtgagcgtagtgacgcttctcggtctggtactcgatgtgggcgatgttgatggtgataccgcgggcggcctcttccggagcggaatcgatctggttgaagtcgtactccgggttgacatccgggaactcctcgtgcagcaccttggagatggcggcagtcagggtagtcttaccgtggtcgacgtggccgatggtaccgatgttaacgtgcggcttagtacgctcgtacttttcctttgccattacttttgtcctcctggacgtctcgtgagtttcctgcgccctttcgcacagggactcgcttattctactgggtttctgggttatgtgccactttgaagagccagaacccagtcagcggtatacgatactaccgctgactggagacaccggccacttcatgatgtggcgcgtgtcactcgccgcgctgggccttgatgatctcctcggagacgctcttcggcacctcgtcgtaggagtccatctccatggtgaacatggcgcggccctgggtcttggaacgcaggtcgccgatgtagccgaacatctcggacagcgggaccttggcgtcgatgaccttgacgccgacaccgtcggtcatggactggatgttgccacggcgctggttcagatcgccgatgacttcgcccatgtactcttccggcgtacggacttcgaccttcatgatcggttcgagaatgaccggcttggccttcggggcggcttccttgaagcacatggaacctgcgagcttgaaggccatttcggaggaatcgaccgggtgcatctggccgtcggtgacggtggccttgacgcccacgaccgggaagccggcgagaacaccggactccatggcctccttgacaccggcctcgatggggccgatgaattcggcggagatgtggccgccggtgaccttgttctcgaactcgaaggtcttgccctcggtggtgtcgagcggctcgaagttcattaggacctttgcgaactggccggaaccaccggtctgcttcttgtgggtgtagccctggtccatgacggccttgcggatggtctcgcggtaggcgacctgcggcttgccctggttgcactcgaccttgaattcacgacgcatacggtcgacgatgatgtcgagctggagctcgcccatgccggcgatcagggtctggccggactcttcgtcggtcgtgacctggaaggtcggatcctcttcggccagcttggacagggcgatgcccatcttctcctggtcggccttggtcttcggctcgacggccacctggatcaccggatccgggaaggtcatggagtcgagggtgatcgggtcgttgatggagcacagggtgtcgccggtggtgacgttcttcaggcccacgaaggtgtagatgttaccggcgtcggcgcggtccatcgggttttccttatcggcgtgcatctggaagatcttgccgatgcgttccttcttctcgcgggtggagtcgagcacggagtcgcccggcacaacagagccggagtagacgcgcacgaacacgagcttgccgtagaacgggtgggtggagatcttgaagaccagagccgcgaacggatcggtcttgaccgggtggcggtcgatctcgacggactcgtcgccgggcttgtagcccttgatggccggcacgtcctcgggggacggcagatagtcgacgacgccgtccagcatcggctgaacgcccttgtccttgaaggcggagccgcagaagacagggaaggcttccttggcgatggtgagcttgcgcacgccggcgcggatgtcttccttggacaggtcaccgtcctcgaagaacttgttcatgagttcgtcgtcggcttcggcggcggcttccacgagcttctcgtggtactcctgggccttgtccttgagatcgtccgggatctcggtggtgtcgtacttggcgccgagctcctcggtgccgttccacacgtaggcctgcatctcgaccaggtcgacgacgccggtgaagtcgttctcggaaccgatcggcagctgcatcacgatcggagcggcgcccagcttctccttgatggtgtcgacggagtagtagaagttcgcgccgagcttgtccatcttgttgatgaagcagatacgcggaacgccgtacttatcggcctgacgccacacggtctcggactgcggctccacgccttccttgccgtcgaacacggcaacggcaccatcgagcacacgcagggagcgctccacctcggccgtgaagtccacgtggccaggggtatcgatgatgttgatctggaacttgtccttggtgtcgtgggactgacggctccagaagcaggtggtagcagcggactggatggtgataccacgttcctgctcctgcgccatgaagtccatggtggaggcgccgtcgtgggtctcgccgatcttgtagttcttaccggtgtagaacagaatacgctcggtagtggtggtcttgccggcatcgatgtgggccatgatgccgatattgcggacgtcgtggaggtccgaaatctcttcagccatctttttccttagttttactcagggcgagtgattaccagcggtaatgagcgaaggccttgttagcctctgccatcttatgagtatcctcgcggcgcttgacagaagcaccgaggccgttggaggcatccaggatctcgttggcgagacgctcggccatggtcttctcacgacgggcgcgggagaagtcggtcagccagcgcagcgacagggtgttggcgcggttcggcttgacctcgaccggcacctggtaggtggcgccaccgacacggcgggagcgaacctcgagggacggacggatgttgtccagggcgcgcttgagcacagccaccggttcctggtcggacttctccttgaccatatcgagcgcggagtagacgatgtcttcggcgatcgacttcttgccgtcaagcagaatcttgttgatgagctgcgccaccacggtggaaccgtagatcggatcgggcagcacgacgtgcttcttggaaggtcccttacgtgacatatctcttacttcgccttctttgctccatacagggaacgaccctgcttacggtccttgacaccctgggtatcgagcgcgccacgcacgatgtggtaacgcacacccgggagatccttcacacggccgccgcgcacgagcacgatggagtgctcctgcaggttgtggccctcgcccggaatgtaggcggtgacttcgatgcccgaggacaggcgcacacgagcgaccttacgcagagccgagttcggcttcttcggggtggtggtgtagacacgggtgcacacgccgcgacgcagcgggctgcccttcagggccaaagtcttggacttcttcggctttgcctgacgtcccttacggacgagctgttcaatagtaggcaacttgaattctccgattcagtggtttctcttgcttttgtgtgaccgccgcactgcgcccacacttttcagcacactcgcttggcatccgcctgttggcgacacccgacgaatcggaaaagatagcccagtccaccggcccgatggccttcgcccctcccgtcggcgcattactacgtgcgatcagcggtttgaaggatatcccagcatgctcgcctgttacataaggcgtgctgctggcacacacgaatatctatattacgattccgccggacaacgacgcgccgggcctcgactcactggtttggggacctcctgcgccctgtacttctcccctcctcccaacgcaacaatcccgggaatgcgtcgcacaacacacgcacacacgccctcccaacgcaatattcccgggaatgcgtcgcaaaaaagcgaacgccacacagcaggtgcccccgcggagactatgtcacacgggggcaccgccaaggaggttacattatgtttcttttcaccacatgccgcttctgtgttatctgtttccagcacatcctcgtgctcttccatatccgatgggaacctctagcgacccggcctctttgccgtattaccttgccgctttctgcattactaattatagcaaaaccgccctcgcgaaacgcccgatacattaatcgggagtaagcgggagcggctatgttatgcgaggtaggaaaggtgagtgaccgactgactggagtcgtgccttacccgacctttctcaccatctcaggatttcaggcagcgaccttggcggccttgtcggcgtcgaacgggtgggccacggaaacggtgctcttggcggagcccttctcgccgttgtcagaatcccaatgaatctcgtgccggtcgtcatggttgcgccaccagctggacaggatggagccggagatgttgtgccacacggagaagaacgtggacggcacggcggcgagcgggttggacgcgaaggaggtcagggccagcgtggcgcccagggcggagtcctgcatgccgacctcgaacgtgatggccttctgctgcgcgtagcggaagcccttcgggtagatcctgtacatcagcttcgagaagccgaagcccagcgagtagccgcacagattatgcaggatgaccaccgggatggccatcagggagctggccacgaacagcttcgggccattggcggcgacgaccacgccgatgatcagcaggatggccacctgggagacgatcggcagggcgaccgtgaccttctcgatcttcttgccgaagatcatgtggcagatcacaccgagggcaatcgggaagagcaccaccttgacggcgttaaggaacagggattcgaccggcacgctcacatactgggaggccagcagctgcatcagcagcggaatcatgaacggggcgcacagggtggagaggatgccgatggagacatcgagggccacgtcaccacgggacaggtagctcatcacgttggaggaggtgccggacgggcagcagccgacgagaatcacgcccacggccagcgggccggacaggtggaagatcgcgcacagggccacggcgacgagcggcatgatgacgaagtgggtcaccgtgccgacgatgaccatcatcggctgggtgaggatgcgcttgaaatcgtccagcgtcagggtcagccccatgccgaacagcacgatgcccagcatgtagccggtgtacgccttgccccacaggctggcggccggcacgaagtagttgaagacggcccagacgatgacgatgaccgtaaaccacttggtcagccaatctgcaaaggctttaaccttttccatggtgtttctcttcccttgttcggtgtaggtaacatcgcatgaaactaggcgggtcgcggttgatatgaaacataatgctcacattgtgaacgctcacgtaatcatctctgcaatccccagccgcaccatcacgccgttgtgtgccctgacttttcatcaatcgccacacaagacccactcgtccacatcccaccatttgagacagcccacagcctggccccaagaatgaaaccaaccgcttgattccatcgcgacacaccgatgagcacacatccgcaaagttgtgtatagtattcacctgttgtgcgaattcagcttactgaatacgacaccatggtggccatagctcagttggtagagcatctgattgtggttcagaaggtcgcgcgttcgagccgcgttggccaccccagtaaaacccttccgttcgcggaagggttttgtttttctccatgaattccccgctcctgccgggaaccgccacgttgtacactcgggcatatccaattcatctaacacaaggacaaaaggtccgtcatgctgtcttttgagaacgattactcccgcaccgcccatcccgcagtgcttgaagccgtggctgaagccaacaaccatctgtattcgggctacgggtccgacgaactgagcgatcaggccaaggccaagatccgcgaggcctgcggccagccggacgcggatgtgtggttcctcgtcggcggcacgcagaccaaccaggtcgtcatcgacaccatcaccccggcgtatgcaggcgtggtcgcggtcgcctccggccatccgaacgtgcacgaggccggcgccatcgagttctccgggcacaaggtgcttacgattccccaacacaacggcaaaatggatccaaccgaactggacgagttctgcaagaccttctatgcggacggcaactatgagcacatggtgttccctggatccgtgtacgtctcgcaaagcaccgaatatggcaccatctactccaaagccgaactgcaggccatcgccgatgtggcgcataagtacgatatgccgctgttcgtggatggcgcgcgactcggctacgcgctgaccgccactggttccgacatgacgctcacggatctggcgaccatcgccgacgtgttctacatcggcggtaccaaggtgggtgcgctgttcggcgaggccgtggtgtttaccaagcacaacacgccgaagcacttcctgacccgcatcaagcagcacggcgccttgctggccaagggcttcgtgctgggcgcgcagtttgacgccttattcaccgacaatctgtacttcaagatcgcccgcaacgccaatgaggcggccgatcgtattcgcgaggccctgcgcgccaagggctacatgctcactttcgaagcgcccaccaaccagattttcgtgacgatggatcagccgaccatcgaccgtctggagcgcgaggtcaagctcggctttaccgagaaggccgacgacacgcataccgtgatgcgcatctgcaccagctgggccaccacgcatgaagagatcgatcagcttattgaggtgttgtaaaacccttcgctaatctctctctccgtcatcgcttcgcgatgccacctccctcaccagagggaggttttttcgtagctcccgccgatgagggagctggccgccgcaggcggactgagggaaagacctctccgcaaacgagaaggctcctactcccctatcgccttgcgttccatatccacgaacttgtggaccgaggcttccacggaataatgcgccttggtgtattcggcgtatttctcgccccattcggcgcgctcggcctgatgtgcgatccaccaatcgatgcgtcgggccagcagggccgcgtcccgcacggggaacaacgactcgtcgatcagcgcgaactggccggccgccgacagttcggacgcggcgatcaccggcaccaatccgcacgccatcgcctcgatcacgctcaccgattcgatgtcggcaatcgaacaatgcacgaacaaatcgcccgaacgcaacaaatcgggcatatcggcgtgcttgtggaatccgatatcggccttgcgcgccagcaaacgtccggcgcggaacttgagatactgcttgagcggcccagtaccggcgatcaccagctgaatatcgccggcgtggcgggacatcgacaccgccttgatcagcgtaatctgatctttctcgctggccagtcggccggaagcgacgacacggaacggcacgggagccgaggcatccggatcggccggcttcttcggagaatacaccggtgaataaccattggaaatcacgtgcaacttggctttatacccgtgcgcgcgcaacaggctcgcggtcatttcggtgggcacatggatgtggtcaatgtgcttgtacagccagtgcttgaacagccagtacaggaagctggaaataccgggaatgcgacgtagcgggccggccgaatacagcacgttctccggctgcaggtggaatccggcagtcacgggaatgcccagttggtgggcgactttagcggcacgacggccgaatttgaacggcatatagatatgcaccacatccacgccttggaaggcggtgcggaacaacgtgtcgctgggttcggcgaattgcatgagctgcttggcggccacccacgagacgagtggcaccttattcacacgcgccggatattcgggcgcccctataccgacaagcctcacatgatggccttgccgctccaattccgcagcccattgcaaggccgaattggaggtgccgttgccctgattgcccaccgtatcgaccacaagagcgatagtcagcggacgatcaatgctctcttcaatcccgttttcgcgcattgcctcatcctaaaccaccgcgcggcaatagcgtcggccgcgctgcttggataggccggaaatggtatgggctgccgcattttgcccaatattgaatcacgcgcttcgcagcgcacgatcggcgcgggccacggcctggaacaactcggcggtgtgcttgagcagactgatgcgcacccagccttcgcccgcctgaccgaagcaggcccccggcatcagcgccacgccggccgtgttgagcagccaatccacgaatgcggcggaatcgccatgccaccgcgccggcacgcgcgcccacgcgaacaggccgccttgggcctcagccaccggcagaccagcctgggtaaacccgtcacgcaccacttcaaaacgatgctgatattgcacagccagcagcttcaccgtgctctgatcggattccagcgccaccgcaccggcctgctgaataacgctggaagccaacaccgcagtctgccggtgtacggctttgacggcagagaggacttcggcgttgcccgccacgaatccaccgcgccagccggccaccatatacatcttggacagcgagccaagttccagcgccacgtccagcgcgcccggagtctccagcaggctcagcgagcgcacgtcgccgaattcgagccccgcataggcgaaatcgttaagtacgatgaatccgtattgcttggccaggcgcatggccgtctcatacagttcgggtgttgcggccgcgccggtcggattgttgggatagttcagaatcagcagtttggcgcgagtccatagcgctggttccaccgcatccaagtcgggcaggaatccgcggctcgggtcagcgggaatcgtctcgaactggccaccggccactactgttgagccctcgtactgcgggtaatatgggtcgaccgccaccaccgtatctcccggatcgaccagcgcctggatgacggtggtgatgccgacggacgagccggaagtcgccagcagctgggtggcggggtccacggtgacgttgtgctggcgcgaataccagccggcaatcgcattcagatattccggaagcccatcaaatggcgggtaccggaacagggaaggattgtgggaagcgtgagaaagcgcgtcctgtacaaaggatggcggccagccatcgggattccctttgctcaagtcgatgatatccttgccagcggcgacggctgctgcagcgcgtgcgtccgcctcagcaaaaggattgccgggcagactagccgcccgtcgagaaatcagagccgcgttcggcgtcggcatgtcgccctcccccttcgactattgccagcgtgccggcttgtagcctgaaatgccggaaccggcacgccgctattcgctatatgtcgcatcccaaaatgttggcccgaccgccccatacttcatcggccggtgattgctaaggtacgacggctctgttacgcacgcaatggcatgtctatacgcagtatttatggcgggttacgggcatctgaatcttcatggggcggcaacctgcccatggggcggtatttaccccatggggcggtgaaattcccatggggcggtaaggcaaaacggcttaattccgcggtttcacaaaaccaacaaaccgccccatggactcattaccgccccatggggaatttaccgccccatgaagccggatattccgcccgtaattttggccacgcgaggcactccgctcacgcgacataccgaaatcatcgcgtcatggcagaatgtgggtatgactgagaacgccgtgaatactgccgtgacttccgcctcctctcccgcaattcccgccgagacttccgccgtcccccccgcaactcgcgcagccaaccacccgctgggcacaccgctgggcaagcaccccacccgtgtgctgtttttgggcgctggcgagctgggcaaggaggtcacacttgaactcatgcgactgggcgcatgggtgtgtgctgctgactcctatgccggcgctccggcccagcaggtggcgcatgaataccgcgcgttggatatggcgaatgccgccgaattgcaggcattgttcgatgaaatcaagccggacatcatcgtacccgaggtagaggccatcgccaccgatgtgctggccggtgctgcggccgcgggcgcccaggtggtgccgagcgccgaaatcgccgcgatctgcatggaccgcgagcgcctgcgcgtactggcccacgaagaattgggcttgccgactacaccgtatcgttttgccggctcgctggaagagctgcgcgccggagcttcggaagtcggctatccgtgcgtggtcaagccggtgatgagctcgtctggtcacggccagtcggtggtgcgttccgccgacgccatcgatgccgcttggaccgaagcgcaggagggccgccgcgccgccgatgagggcgatgtgtcgcgcgtgatcgttgaggcgcttgccccgctggagcgtgagctgacggtactgaccgtttcttcgtccgccggcattgtgacgtgcgcgccgatcggccaacgtcaggagtccggcgattaccgcgagtcctggcagccggctaccgagcccgatggtgaggccgagcgggcgcgcgacatcgcacgtaccgccgttgaaggcttggtggccaaggctcaggcgaccggcgaaaccggttggggcgtattcggcgtggagctgttcgtgctcaccgacggctcgattctgttcaacgaggtctccccccgtccgcacgataccggtatggtgacgatgacctcccagcgtctgagcgagttcgcgctgcacgcccgcgcgattctcggcctgccgatcacccccgagcatgtggcgctcacgattccggccggctcggtggcggcaagccatgcgattgtggtggccggcgacggtgaggccgagttcaccgatatggccgctgctctggccgaacccggcacggacctgcgcatttttgccaagcccgaagtgcatggccaccgccgcatggccgtggcactggccgtcggcgagtccgaagccgacgcccgtgccaaggccggccgtgttgccgatgcgttgacgattaccgtggagtagtccacggcctgatcagctcagcatggcctcaatattattgccgtccgggtcgtggatgaacgcggcgtaatacgtggggccatagttcgggcgcgggcccggagcgccgttgtcggtaccgccaaaggcgagaccggcctcatggaacgccttgacggcgtcctcatccttggcgcggaacgccacatgagacggcaccaccgggttgccgtccttcggagactccaaccaaacgctgtcaccatcctcgtcattggcaaagcacacggcggtcgggtacgccactttcttgacgtaacccagcggggccagcagcttctcgtagaaatccgcgtactgtgcggcgtcggaaacaaacaaaccaatatgatcgatcatgacgaacctccttgcaccatttcgtcactcccattatcgtgcgtgcgcggccgtacactcacgttttgtctattgacgaacatctgagtgtccgcgcgcttgcgtagatactgtcacgccgaacgactatgcgaccggcaatgagtcgattgtcggaccaataccgtccgcctccgccatcccaacagcgtatggccgttcgatgaggcgacatatgatgcgctggccgcatcgtagcgtcatgccgagtgttgttgtagccctcgattggtacccttttaccgttagttcacccagaaattccactcctgaaaggtgagtcatggagaagctggaaaagctctacgagggcaaggccaagcaactgtacgcaaccgacgatcccgaggttctgtgggtcgaatacaagaacaccgccaccgctggcgatggtgaaaagaaggaagacttcaccggcaagggccgcctgaacaacctcatcaccaccatcatcttcgacctgctcaagaagcgcggcatcgacagccatctcatcaagcgagtgaacgacaccggccagctggtacgcaaggtgaacatgttcccgttggagatcgtgctgcgcaacgtggccgccggccacttctgctcccgtctgggcgtggaggaaggcctgccgctcaaggagccggtgcttgagtacttcctgaagaacgacgatctgcacgatccgttcgtcaacgacgatgacctggtggccctcgacgtatgcactcgcgaggatctcgccgagatcgccccgctggcccgcaagatcaacgaggccttgatcgagatcttcgccaagatcgacgtcaagctggtcgacttcaagatcgaaatgggccgcgccaccgacggcacgctgctgttggccgacgagatcaccccggattcctgccgtctgtgggaccagaaggaccactccggcaaggtcgagcaccttgacaaggacctgttccgccgtggtctcggcagcatcatcccggcctacgaagagatcgaggagcgcctcgccgaactcgccaagtccgaaggcatcgaagtcgccgagtaagtcgtttaggtgcaggtagcagaaacatacagctggctcctctctccgaggggagctgtcgccgataggcgactgaggggaggtcaagacgttcaccgccatgacaactcccctcagtcagctccgctgacagctcccctcggagaggggagccaagttcttttaccgcgcttcttcaatttttcaatattttcaagaaaggatttccatggtttttcgcgtgtacgtggaaaagaagcccggctttgatgtcgaagcccagcagcttgcgggcgaactgcgcacgatcctcggactgaacggcctcaaggccctgcgcatcgtgaaccgctatgacgtcgaaggcatctcccaagagctgttcggccagaccgtgcccaccgtgttcagcgagcctcaggtggacaatgtggcctacgacctacccgacttcgccggcgccaaggtcttcgccaccgagttcctgcccggccagttcgaccagcgcgccgactccgccgccgaatgcatccagctcatctcccagggcgagcgcccgacggtccgttccgccaagctgtacgcgctggaaggcgaactgaccgacgccgacgtggacgccatcaagcattacgtgatcaacccggtcgaggcccgcgaggccagcctggagaccaaggaaaccctgaagacccaggtgccggtgcccggcaaggtcgagaccatcgccggtttcaacgagatggacgccgaagccggccagaagttcatcgacgagcgcggtctggccatggatctggccgacctcgaattctgtcagaagtacttcagcgaggagggccgcgagcccaccatcaccgaaatcaaggtgatcgacacctactggtccgaccactgccgtcacaccacgttcggcaccgagctggacgaagtaaccatcgatgacgccaccgtcaaggccgccttcgagcgttacctggcgatgcgccacgagctcggccgcgacgccaagcccgtctgccttatggacatgggcactatcggcgccaagtggctcaagaagaacggtgtcctgaccggcctcgacgagtccgaggaaatcaacgcctgcaccgtcaaggtcaaggttgacgtgaacggccacgacgaggactggctgttcctgttcaagaacgagacccacaaccaccccaccgaaatcgaaccgtttggtggcgcggccacctgcatcggcggctgcattcgcgatcctctgtccggccgttcctacgtgtatcaggcgatgcgcgtcactggcgccgcggacccgaccgtgccggtctccgagacgctggaaggcaagctcccccagcgcaagctcgtgaccaccgccgccgccggctacagctcctacggcaaccagatcggtctggccaccggtcaggtcgacgagatctaccaccccggctacgtggccaaacgcatggaggtgggtgcggtcgtggccgccactccggccgaccatgtgcgccgcgaaaccccggcccccggcgacaagatcatcctgctgggcggccgcaccggccgtgacggcatcggtggcgccaccggttcgtccaaggcgcataacgtggaatcgctcgaactcgacggcgccgaagtgcagaagggcaacgctccggtggagcgcaagctgcagcgtctgttccgccgcggcgatgcctgccgtctgatcaagcgctgcaacgacttcggcgcgggtggcgtgtccgtggcggtcggcgagttggccgacggcctgttcgtggacctcaacaccgtgcccaagaaatacgagggcctggacggcaccgagctggccatctccgaatcccaggagcgcatggccgtggacgtggccgccgaggacgtggacgagttcctgatctacgcccgcgaagagaacctcgaagccacggtgatcgccaccgtgaccgaggacccgcgcatggtgatgacctggaacggcgacaagatcgtgaatctgtcccgtgagttcctggcctccaacggcgcttccaagcaccagaccgtgcatgtcgaggcacagcagtcctacgagaccccgtggggcgagggcacgctggccgagcgtatgaacaagctggtcaccgacatcaacgtggcctccaacaagggcctttcggagcgcttcgactccaccatcggcgcgggcaccgtgctcatgccgttcggcggcaagcgtcagctcaccccgaacatggccatggtcgccaagctgccggtgttcggcgagaccaccaccgcttcggcgatggcgtggggcttcaacccgtacatcatgtccaagaaccagttcaccggcgcctacctgtccgtggtcgagtcgctggccaagctggtcgcggccggcttcgagcatgagaaggcctacctgagcttccaggagtacttcgagaagctgcgcgacgagccggaacgctggggcaagccggcggccgccgtgctcggcgcactgatggcccaagtggacctgggcgccggcgccatcggcggcaaggactccatgtccggttcgttcgaggatctcgacgtgccgccgacgctgatctccttcgccgtggccgtgggcaacatgaagcgcgccacctcccctgaattcaaggacgccgatcaccgtatcgtgcgcatcgcgccgcgctacctggccgacggtctgaccccggacaaggatgcgctgcttgaggtgttctccgtgatcgaggagctcaccgacttccacgatgccctggccgtctctacgccgggctatggcgccaccgccgaagccctgttcaagatgacgctcggcaaccgcatcggcgtgactctgaacgacagcatcgccgtggacgacctgttcaccccggcatatggttcgttcatcgtcgagctggcagacgatgccaagcttccggccgtctccaatttggtcgagatcggcgaaatcggcaccaccacctccgagtacgtgttcaaggccgccggcgagacgctggacctgaacgctgtgcaggaagcttgggagtccggcatcgaatccgtgttcccgtaccgttccaagggcgaggacaagggcgcgaccgtcgagaccatcgacttccacgcgccgaagaagaccgtgtacgtcggctcttccgtggccaagccgcatgtggtgatcccggtgttcccgggcaacaactgcgagtatgattccgccgccgccttcgagcgcgccggcgccgacgtgaccacgctgatcatcaacaacctgacaccggccgccgtcgccgaatccacgcaggcgttggtcgatgagatcaacaagagccagatcgtgatgatcccgggcggcttctccggcggcgacgagccggacggttccgccaagttcatcaccgcgttcttccgcgcgccggccgtcaccgaggccgtgcgtgacctgttgaagaaccgcgacggcctgatgctcggcatctgcaacggcttccaggcgctcgtcaagctgggtctggtgccgtacggcgacatcgtgccgatgaccgacgcctgcccgacgctgaccttcaacaccatcggccgccaccagagccgactggtccgcacgcgcgtggcctccgatctctccccgtggctgtccaagacttcggtcggcgacatccacaccgtggccatctcccacggcgagggccgcttcgtggcctccgacgaggtactcgcccagctcagggccaacggccagatcgccacgcagtacgtggacgagaccggcacccccggcatggatctggatgtgaacccgaacggctcgctgctcgccatcgagggcatcaccagcccggacggccgcgtgtttggcaagatgggtcactcggagcgttccggcaacggcctgtacgtcaacgtgcccggcaacaagtaccagccgatcttcgaggccggcgtggaatacttcgccgcctgataatcggcgcgtatcgcgtctgatacggcacacagggaaggaactctcgggttccttcccttttttgttcatgccggtcatgggctaaggttggggtgttcgcactaccgaatccgccgctgaaaggacctgtcgtcatgccgatcaacgaggcattgttcgccgcgatgaaggccgccagctacatcaagcccaacgcgggcaagtcgtacaaattgcagcgcgtggcggaagagcttatcgccaagcaggcacccgccaatccgaaatgccgtgtcgaggacgccttcgcgcctatggcggatggatatgccgtaccattgcgagtgttcacgccgctggtcgcctatggagcgcccctgcccgaagccctggaggaatcttccgccaatggcacgccagtggcctcggcaatatccgcgattctgcccgccgtattacccaaagtcctacccaaaatacccatcaaggaaagcacgtcgagcggcaacaccgacggtatttccggcaatgccaacacggaacttccctcagtcacgccgcgtggcacgatcctgtttttccacggtggcggttggaccacaggcggcatcaacctgtacacgcaggcttgcgcgcatatggccgtacgtctgcaacgccgtgtgatctcggtcgagtaccggctggctcctgaataccgcttccctactgctgttgaggattgctatgaggtagcccggcagctgtttgctggggaattgccgatttctggggtgggtggttctgttgatgttgaccacccccagtcggctgcgccgacagcccccaccggcgggggcgatatatctgcgacaatcccagcaccggatcccgacagcatcgtgctgtttggcgacagcgcgggcggcaatcttgcggccgccgtctcgctcatggcccgcgaccgcggcgagttcatgccgcgcacgcagatgctgctttacccggtggtcggcaacgactacaatcccgagaccagcccgttcgaatcggtgcggaccaacggcaccgactacatcctcaccgcacaggacatggccgactacatcgacatgtaccgttcgtccgtggccgacctgaccaatccgtatttcgcgccgctcaccgcgcatgacctgagcaatcagccgcgcacgctggtgttgtccgccgaatactgcccgctcagagacgaggacgaagcgtacgcccgtcgtctgcaattggtgaacgacaacgtctcctgttaccggattcacgacggcatccacggttatctgctcaacacgtcggccgtagggctggtgtccaccacttaccggatcatcgagcatttcctcgacgacacaccgctggtgccggctcccggcaccggcaccaccgccaacgcaccggagggaggcgacgcatggcaagacgtacttggtaccgactagacaacatcggcaagttctactcctcccaggctggccgctcctcgcagaccgtgttccgctattcggccgagctggcggacgacatcgccccggacatcctgcagcacgcgctcgaccatgccatcgcccagttcccgagcttcaacgtgcacctgctcaacggcatgttctggcattacctcgaacagtcggacggccggccactggtggagccggaacatctgccgatatgctcgcgactgcattacgggcccaaaagcatgctgttccgcgtgagttatttccgcaatcgtgtcaatctcgaggtctcgcacatcatttcggacggtcgcggcgccatcaacctgttcaagtcactgttgcacgcctacatcgccgagcggtacgacgtgccgggcgtgccttcggattacgacggctcggacagcgacaaagccgaaaacagcttcgacaaatactacgagaaagacaaggccggtgccgcgcccggcacgaagatctaccggctggccggccccatcgaccgggacgcgcccacgttcatggaatatcacgtcagcgccagcaaggtgcttggtgcagcgcatcagtgcggagtgagcctcacctcctacctcatcgccgcgatactgtgcgcgattcgcgacgtcatgccctcgcgcgcccgcaatcgcgcgattcgcgtggatattccggtcgacttgcgcgccttcttcaggtcggagaccgtgcgcaacttctacggcatgacttacgtggcgtacacgccggccgatatcgaagccgatgaggactccgcgaaaacttccgcaacgggcccagacgcgaccggtgacggccagcagtccgccgcccgcaccgcgcacggcaacggtatgggtggattgctgaccgatgagccgttggccgacatcgcccgccatgtgcaggagcagctcgaccatgccaccagtcgcgagcgcgtcgaatcgcatatgaaccgcatgattgcgctggaaaagaatccggcgctgcgtctcgcgccctcccctgccaaggactgggtgctggagctggcccggttcatcgccgaccgcgagaccacgaccaccgtctcgaaccttggccgagtcaccttggacgaacgactcgcgagccatgtgcgttcggtgagcttcctcaccacaccggccagcctgaatttcacggtctgctcgtttggcgacgacctgagcatcggcatctccaccgtctaccatgatctgaacgtcatcaagaacctgtgtcggattctcgccgcgcagggcatcagcggccgtatgaacatcgccggcgcgcatgtggagaaaggagcgtcggcatgaagcattgcgatgcctgcaacgtcgatttcaccggcgatatggcccgttgcccactctgtcagaacgaattgcacggcgaggcctctcccgccgcattccccgcgcagcagatctatctgcgtccgaggcgtttggcggtggagatcatcacgtttgtaaccggcgcgattctgctgctgcatggcttcttcagctatctgttttcgtggccgataccgattgccagtgcatcggcggccgcgctgatcatcagcgtgctgttcatcaacagtgcgattctgcacgcgccgcggccgcttcgcctcatgtttcgatatttctatatcatgctggcgattgcgctggtctggtttgtggcgacgatgaatcatgtcgtcaccatgttcgtcataccgatcacgtgtctggtttcgctggtctttgacgtggtgctgcttatcgtgctgcgggccaaggccattgaccagtacgccaagtatctggcgttcgacatcgtcgccggtctgctgcctctgacgttcattccgctcggctgggctccgtgggatgtgctggtgatggtcagcgggctggtctccctgctggtgctgctcggcctgctcgtcttcgcccgccgccagctcttctcggaattcggcaaacagttctcggcgtaagttgactgatattgacgtttaatagtgatggcccacaggaagattccctgtgggccatcactatctgttgtgtatggatacgcttaatcgtctacttcatagtggtcgacagatgccttcacctgcgccgcatcggcatcgctaccggtttcgaattttaccttttctcctgcaggccaagcattagtactggcgtatacttcggcagccttcacgccatcggcatcgtatagagccaatatcaagttgacggtaccgaaatcgattccgctgatgttttcgatgacggctgagtatgcgtagtagccatatccgtcatcagttttctcaaaagtcgcagaggcaatcagattattcagcgcgtcttccgtttccgtctttttcttgacggacgaaccgttggcaacaatatcattcaatggatcttgatatttactgtctaccgtgagcttgtaattatcgacaaaatccttgagcaatgccgaacgcttatcgtataccttagtccattcggtgctgtaatccgagctgagataggaataatcctcgttcactttttgtgaatcctcaagcaggttgatataagtaatgactttctcctgcaacttcgaatccttgaactgccgctctttcaaaggctcatcgttatcgatttcagcctgaacagcatctttgacatgcttgacggaatcggtatctttcttctgctcgtactggtcgagaacatccgaacgcttctgatacgcttttgcgattatggacatcgcctcatcatccgcatagtctggaccgtcatccttttgagtgttaccgcagcctgcagcgccaacgatgaacaccaaactaacgaccgctgcaagtaccgtcttacccacgtttcgtacataggaaatcataagagtcctctcaattcctcgtttttcctatgacgcgactgcataacctccaagaataaatcagttcccaactgatttttgacgataaataattgaccttgctataccataaaaaagcgctgttactcatgcctcatagcatgagtaacagcgcttggcaacaatgtagactatttttttcggctctgttgtgtggatattcaccgtatacgagtccatttctgcaatagatgaatacatcttttcaatcaccgtttttgcctgctcattagcattcttcaacaaatcccccttattcagtttcttttccgactgcgttttggcgtctttcaaggcatctgctgtatctgaaacttcattgccgttaaatagtgaagattcttcatcaaagaatctcaatgaatccgggtccaccgaaactgactagatagtaggtgctggcagcgtgatgtcgatggttcgattatgcttattgacatcaatctcagccttactcagatcgacgccggcacgggcctcaaacgtatagaacatcacaaatgatttttttattgaggagagacatggtggtgattaacgcaatttacaaaaagctttacgcgcaagactgtggcagccgactaagtggggtaagaagcttctgaaaatcgcggattccataagctactaagtgacggaagcgagtggacaatgcaaacgcgggagcatgtgttggatactttgaatcatgacggcgcgaaagtctttgccaaggggatgataaggcagggatggaatgctctaggtgagggaatgcataacaccgtagtcggtatccagcattcgttgaagaacagtggcagggcatggaatcgtttcgtctccgaatggcaggatgcgaaacaggccgcgaatgccgctcattctaacccaaacaacacggtgatgagggatttctgggatggtcagttcaagagattcggagattggagcaaaggccatgggtggtccatcggcaacacaattatgaatgcccgaaccgggtataccgattttcggggtatccacgacatgaagaatatcgcggctgtcgacgcccgtcggacggtgtgggacaccatgaattttggtcagcatgttgtgtcgtatgccaacgcgacgtatgacacgttggcatacggcgaaagtggtgaagcctttcgtgaatccgactgcggatggtggtctgcagtggaagcattcgccacaggattatttcaagacgctcgttccggatccagatcagttatggaatttcaagaccatatatcaggcaccgggaaagttgtccgatggggcggctgagacatctaatgccattcgagttggtatcagtgatctataaaggatggatgattgacgatgagtaagcattctagaaatgatggtcggcaaccggagcaatatgcacgtttatcggagtctccttcggaggatgagtctgatga

SEQ ID NO: 2 - DNA, 11358 bp, Unknown
  R30_18m  MAG No. k141_222
cgcaaggcctgaccggccattccggacacacattctggccgacctcgagttccccgcccatacaactcgaacaggaggaacgcccaccgccacaaaggaacacaagccaaaacggacacacattttggcctataaccccgggtgttgcactttcaattagacaacgggcgtatgcgcactctttatcggcatgatagggagtagcgaattgtgattctcgcaatctaaagggaattgatgttgtttttttttcctcgattcattattgtgcagacagcccatatgaacagtggaattgcatagaatgcgtatgattcaaactgaatatataggtatgcgagaagaatgaaccagcatatgttccgtcggctccatccatgatggaccgctacgtgtgctaataccaaaagcaagaaggccaaaaagcaaaatagaccaaattcggtaatgaagctggcatagatgctcattgtgaaagtatccgctgggggatttgctaaaccatcgatttcggtattgggcgcaccgccatgggcgtcataccattggcgggcaccggcgtaaccagtacgcactgcattagagatattgcctgcgccccatccaaacatgaagtgagatagatcatgtttccatgaccacatgggagcgagcatatggaagattcttgcactcatcgatccgtcaccagcaagtaatccattggtggctaaagagtttagacgcggattgatgataattgcgctcaatccacctgctccaagaagtcctaaagcactgacgaacccagctgttaccttacgtgagtggaagttgattgtcgctatcagccagataaatgtagctaccactgtatccagtatgattcgggtgccggagcccatcgcaattgctccagcggcaaatatcggtatcaatatgccaatcttgcggtcgcgggtcagccagaaaactggcaggagtacgccgaacagatgcatgccgatatagctaggttctgcgaacatgaattgaggacgaacgctcgcatagtttctatacagagcaccccaaaaatatgctcgtactggctgccagttcagatgtcgttctaaagcgatatattgcagtatcccaatgaggaatgccactacatatgcggtgaatagcgtagttaacaatgttcgtacaggtacacgtttaatgcggatcgcgatgtcgagcgaagccaagcacgccagccctaacaatatggagatgaatgactttgcggttgcgctggcgtgtattccatatgactgccagccgtatacggatgtgagcactagtagcaggggaaagaggaagaacggcaggaagcggcgtgcggtatcgcgcaagtatcgccagttgatgattgtgtacagggtgaacaaccagggggagattggcgtccaataggggagtggaatgccaatttttgtgccatcaaatggcagcatggccgctgcggcaaacatcaacatgtctgatggggtgatggtgatacgagtcagcgtctcggtcattgccccgcgctgtagcgcggggcaatgaccggagtttctgcgtttttcttgaactgacttgttgccgagctgcgtattgttcggtgtggacatacttggttccctcccatatcctccatgagaactgtaccagttgcacgtgtgggtgaggtgatgggggttcggtcaaccgttcactttcatgaagtacttttaaactcccaccaagtaattggcagtcgcttacaaaaactgaataatctatgggccaatcagccgtttagatcctctccgtggggctggtgcatgtattgttcaacccaagccatgctggtttttggaaattaaaagcctgaattatcattaattcgaaatccaggcttttacagtattcgtataatcgcgaattaagcagaaatcactcagccttcttgcggccgcggcgcttcatggtgccggcagtggcgtttgcgacatcaaaaatcacggtcttgtcttccgggtaagcagtgccgttgacggaggcgaaagagacctcgccttctggagcttcgacaagcgtgaagtacttggaaattgcttcaacaagcacagcatccttgatacttacagacgtagtctgcttgccctcacccttgctgaatttcacggcattatccgccttagcggtagtcggcgttacggcaatttgtctggttttatcgttaataaggatcttaacttgtgctggaaaattcagcacttctgcggtggccttattaaaacgtacaacggaatcggtaacggtcattaccgttttgccaacgggcttaactagctgaacttcttcgaatccttgaagcaaggatgccataatatactccttcacactgcataagtattattgacaattttgattgtaatgaatgataatttgaattacaattttatatatcacattctcaatttcaattcataatatggaatagggaaatagtgctgtcgcaaaatattgagtgagaatacattgtgattgcgattgtgtacagttattctgcagtcgtatcaaaggttttggtcattgttcacaaggatacaaaagctcgagaagttccccggtaggtgctaaattatagaccatctgtgagaatttcccgaagaggtaaggaagaacattgaccatcgctgatttgctgcagattgttcgcaagcatctcgcgtctgcgattatctcgttcgtggtggtgtttgctgcggttgcagctgtcacgttcatcatgccgccgaagtacacggctacggctgaagtgttcgccacgtatgccggtcagtccggcgagacgcagaccaccaacgatatgagctcgggtgccaattatttgaacacccagatcaagacgtatccggaactggtgaagaccgaagccgtgctccagcccgtcattaaggacctcggtctggatatgaccacgaccgatcttgccgatgtggtgaccgctacgaaccccacgaacacgttcatggtggatatctcggcggaagtcggcgatccgcagcaagcggccgacatcgccaacagcgtggcgaagaacctctccgatcagatttcttccgacctgtacaacaactcctcttccaacggctctcccatcaagctcacggtagtgcagagggctcagactcctaccgggcagagctccccgaacattccgctgtatctggccatgggcctgattctcggcctcatcgtaggcattggcgttgccctgctgaaggacatcctcaaccccaaggtggactccaccgatgatgtgcgtgagctgacccacgcctcttcgctgggtactgtgcctcaggcttcgattcttgacgacagccgcccggtcgtggttgctcagccggccggtagcgaggccgaggaattccgccgcatccgcacgaacctttcgttccttaccaccaccgctacgcagggtcatggccgactgctggtcatcagctctaccaatccgtccgaaggtaaaactacggtttccgccaatgttgccgtggctctcgccgaggaaggcaagagcgtactgttcatcgatgccgatctgcgccacccgtccgtggcccacaaactcggcatcgaaggccacgtgggcctgtctcacgtgctgtctcgccaggcatccccggccgatgtcattcagaagtattggaagccgaacctgcacatcatgccggccggtaagcgtccggctaacgccagcatcttgctgaactccgatctcatgaaggaaatggtcgagcaggccctcacccagtacgattacgtgatcatcgatactgctccgctgtccgttgccagcgaagccaccgtgttcggccgtatggccggcggtctggtgctcgtgactggtaagggcgtagtggagaagaaggagctggagaacaccgctacggctctgcaggccgctgaagtgccgattctcggcttcatcttcaacttcgctgatccgaagaagatacactcgaagaactattactactactattacgaggacggcaacaagcgcagctctcataagggtgccaagagcaagggcaagaagaaagcccgcaagtaatagtttggcgtttgccgatcgtcttgcaatatgaaccgtgcggtacttctgtgccgcacggtttactgttataagactgagttgttggatttatggtgctggctgtatatcgaatagtaaagaattgtgacattcttgaataccagctggcacgctcggcatagggctggataaactgacagtttggaatgacttcaatgatgcaaaggaatgagaagagcatgggagcagacgaacgccctgaaccgaacgcggaatctggttcctctacgtcgccggctcgcggtgatatcgtcgataccttctgggacataccgcctatctcatttgacgggaacgcagacagcgctgcgccgagtgacggcaacagtactggtgctgttgcggatggctctcaatctgcattccccagctttgacgaagtattggaatggcctactgcgagtgcggcgaatactgctggcgatgcctcttccccttccgatgctgtggctactgccccgatgacttttgcggcgcctgatactgcggagagcgctcagtcgcctcagcgggatgacaatgcgacgctgccgctttttgcgccggttcctgaagccaagccgcaacgtgatagtgccacagacgatctgagcatcgatttcagtgccatcgaacagaaccccgagccggtggaggagccggaagaagaccgtgtggcagggactcctcgcggtggcaagggcggcaagaagaggaccaagggcattatcatttcggtgattgctgcgctggtggtgattgcagcaatcattggtggtgtatggtactggcgttccagcgagcagcgtcaggaaagccatcagctgcatcaggatgcgttgacagcatgtgctgaggccgtggaccagaattccaccgctcagaaggcgctggccaaggcgttggccgacgcccagagtgctcaaagcattacagctgatcaagtggctgacggcgcgaccgtggatgcgttgaagaaggcaatcgccgcggtaaagaacgtggaagcggtggagtgcaagacttcagcttccacgtcggacctcaaggaatatgccaagacggccactagccagaccaagaccgccaagaagaacgccactgcgattactgccgcggcaaagggcgtgacggacagcaagaacgctaaggatcaggctaacgctcagcaggcgttgcagagcaagatagccgaggctcagactttgctggacaacagcctgtatgccgtcgacgataattcaacgcgcatgacactggaaagcgacatcgccaacgccaataccgtgctgtcccagcagggcactgacgtaaaggccatgcaggatgccgtcaacacgctgactgcgtccatggatgcagtcaacacgtccatggccaactacagcgcagctgttgaggctcagcaagaagcagcgcggcagaaagctctgaatgattattatgcacgattaaggcagcagcagttgttgcagcagcgacagcaaacacagccagacggtacagacgatccggggacaggtggccaggcggctgatcaggggacgaaaccgaaagatgatccggaaccgaaagatgagtcgaagtagtaagttatcgtgctctagcctaaattgtcaaaggaaccgcgaataacagtagtgcgcatttccaccatttgctgttgcaaaccagctcaatatacgcgtgctttgtgccgctatgccgtcacggattcgcataatcagttgtggagggcacttcgtatgacacggtaaaagtgatctctagggcgttgcataatgcaaggattcggctgataaggcgcagaaatgctgatgccggtccccgatgattgggaaccggcatcatgcgtatgagttcgctcggcgtttgggccgggtctcactcagccttcttacggccgcggcgcttcatggtgcctgcagtggcgttggcggcgtcgaagatcacggtcttgctgtctgggtaggcggtgccgttcacggactgataggacttcgccttcgggggattccgccaaggtgaagtctccttgcggcgcggaacctgttgtgtacgtgttgatttggctggcttagtagctcttgtgcgcctgccaatacgcgtacgcgccggaaatcgagccataatggccgttgcaataattcacaaaccacttgaactgggtctggtagttggtctgccagtctgcacctgcggaagccatcttgctgcccggcagcgcctgcggcaggccataagcacctgaagacgggttcgtggcggtggggctccagccggattcgtggctgatgatgaagttggcggcggtgaagtcggcctcggagtagccgttggaaatcaggtagtcatgcgcccaggactgaatctcgccggccggcgtggtggtgccgaggctggcggcgctgggcgaagacacggtggcagtgcccaccagaatcaccttatcgaccggagccttcttgacccaggaggtgaacacattggaggaaacgacctgatctccggagcgggttaccagagacgtggtctccagcacgcccttctcgccttcggtctcgaccttctcctggcccttgggcaggctcgaggtctccttgcgcacttcattgaaggcgatttcggtgtcggtggtcttcaccgtggtgttggcgcggttgatggaaatgactgtggactcgctgaccttggaatccaggctcggagtcacgctgtcttccggatcgaggacgatatcgccggtttccagcacatccttgacggtggtcatgttggctttttcgccgagaaccacgcgggacttgccgttgaccttgacggtcacataagtggtgctcttgagcgcaccacgggaggccgagcgggaagctgcgccgtcggtggcggagaatgaggttggggtgatgggatgcgtagcggtgctcgactgatagaagtcgcgggatataacgcctgcagtggcaatgagacccactgcggctacggccgctgcgatcttcgcccactgaccccgagatagggtcttgacgattgaggttcgctcagcgtgcttcgacattgcgctccttggttgggtacacactgctctctatcataggacgttgagtggatgaataaaaaatccgtggcgggtgttcgacccgccacggatggcatatgtagtagttagcagtgcaaggaagcgctatatatgggctttttccgtgcttccgctgccgcagcgtgataaggcttactgctgctcctgcgctgcctgctgcgctttggcggcggccagatccagcgccttggcctgggcgatgaggtcgtccagatcggaggcctgcagcgcgccggcctgctggaagatgacctcgccctgcttggcaatcatcagcgtaggcacagcttgaatgccggcagcctgagccagatcctgattggcgtcgatgtccaccttgacgaaagcgatgttcgcattctccggctcgttggacgcagcttcgaaaatcgggccgaacgcacggcacgggccgcaccatgtggcccagaagtcgacgaacacgatctcgttgtcggtgatggtcttctcaaactcagctgaagtgatggcggtggtggccattgaagttccttcctcaaacacagtgcttgatgctgtgtaccagtttcccagcaacacccaacatttcggcaaaagtttgtgccccaagctgaatggattgcgggcgcatggaggcgatgaggcgctttgctgagaattcacagacaatttttcggtgaattgtgcccatgttcatcaatgcgcgcgataatgagaccatgccagtcatgaatgatgaagtgcccgacgagggcgattatgatgccggccgtggccgcggcgaattcgacaacatcacgcccgaggacttcatccacgggggcggttccggccacggcaacccgccgggctggctgggaccggccgacatcaaccgggcgcgtcatcagatgcccatcgcatacgtggagatcgtgcccgtgcgcaccgatgagatgggccgcatctcccaggtgggctcgctgctgcgcgtatccgaggacgggtcgatcgaacgcacgctgatcaccggccgtgtgctgtaccacgagacgctgcgcgaggccatcgcccgcaatgtggccaaggacctgggcgacatcgccctgccgctgctgccggtcggactccagccattcaccgtggccgaattcttccccacgccgggactgagcgaatactacgatccgcgccagcacgccatcgccctgtgctacatggtgcccatcgccggcgactgcaagccgcaggacgagacgctggacgtggaatgggtggatcccaagagcgacgtaatgaacacgttcgtggcgcagatggtcaacggccacgggcgcatcgtgcggcaggcgttggcctgggccggaatctgacagttgttttgcttcccgctggtgggacgtgaatgtgaaggagtaattcatggcaatcgaattggccaatcatatctatcgcgatggcgaaggcgtgccggtggtgctgatgaacgcctacccggtggaccaccgcatgtgggacgtgtgcgcgaaggcgctcgccgactccgccgacctgaacgatgtgccggacttcccgatttgggcgccggatatggccggctccggcgcatccccggtgccgagcgatgccgattctggcccccgcatggcgaacggcgcgtacagcgaggcgctggatcgcctggccggagcctacgtggacctgatcaaggccgccggctacgagcaggcgatctgggtcggactgtcgatgggcggctacgtggcgatggacatccagcgcctgtaccccgaaacggtggccggactggccttgtgtgacacgatggccgcgtccgacggcgtgggcggagagaaccgactgaagatggcggacgccgccgaacagacgaactcggtcgaaccggtcatgcacttcgcgcaaccggccgatggcgattccaccgtcaagaagactcctgaattcatcgcgaccatgaccgactggatcaacgaacagaacccggctggtctggcctggcgtcagcgcatgacctatggccggcccgaactgggggcggtgccggaaacgatcagcgcaccgagcctggtggtgtccggcgaactggacccctccagcaatccgagtgtgatgcgtccgctcgccgagcgaatcgccggcgccgaattcatcgacattccggactgcggccatttcagtgccgtcgaacatccggataccgtggcgcgagcactgctctcgctcgtcaggcgcgtgcagaacgcgcagaagaacgcataggagacctcgatgggcactgacattcatttttcgcccctggcgctgacccatgcgctgccgttcctgccgctcgcgcaaggtgacatcgactatcaggtggaccggcgcggtgaacccggtctgatcgacgagctgttggccgagccgaccaccaaagtcgtgcttacgcgcggcggacttgtcgccgtaccgcgcggccaaggcgagctcgtggactatgagaacgtgaaaatgcggctcgccacgttgccgggcgcctatgtgtccgccgaactggcacgctaccccgaaacggtcgccatgttcctcggctcctatgtcggggcgcgcggcgaatccgtggtcgccgtggatatcacgcgcgtgccggaagccggcgttcccggtgttgacgggattgctgatgtttccggtgctgccggcggcgtgctcggcacccaggattccggcaccgtggacggcgcgctgggcaagaacggcatcagcggaggtgctgccgccggaatacggcagccgggaaataccaagggcaatggcggcgtagccgcagccaaaatcgccgggccgctcggtgtaccggattcggccggacaaggtgcggacgatgccttcgatgattcggtcggcgcgcccgtacaacccttggtcccgaagcctacgctgctgcaacaggccgtgacccggttcgactgggtggacctgcgcggattcgcccctcacgccaacgcgcgcgaggctgggcaagccaccagtgccatcaccttaagcatctggcacagccgccagcggttctgccccacctgtggcgcggcggtccggccggcgctcgccggatgggcgcagcgatgcaccaacgaggcggacggcaaccgtgtgctgttcccgcgcgtggagccggcggtcatcaccgccatcgtggacgggcacgaccgtctgctgctgcaacacaacgcggcatggaaggatccgaggctgtattcggtgtccgccggatttgtggaggcgggggagaaccttgaacacgcctgccgccgcgaggccatggaagagaccggcatcaagctcggcgaggtacggtacctgggctcgcagccgtggccgttcccggcttcgctgatgatggcgttcaaggcacatgcgatcaccaccgacgtgcatgtggacggcgaggagaccatgaccgcgcgatgggtcacacgcgacgaatacacggccgagctcatcgccggccgtatggcggcgccgggccgcgccaccatcgcccgctacatgattgaggaatggctcggtcgcgagctgtgacggaccgcgaagataggttaagcttatgactatgagtgatgacaacgaaaacgaacagccgctgaacctcgacattcccgaccacctcgaatactccgaggagcatgcttgggtggaccgttcggtcgaccccgcaatcatcggcataaccgaatacgccgccgaccagcttggcgaacttgtgttcgtggatttgcctgagcctggcgcccgtgtggaggccggcgacgagatcgtggagcttgaatcctccaaggccgtccagccgttgatcagccccgtggcgggtacggtcaagtatgtgaaccgtgacgtggcggacgacccgtccgtggtcaacggcgatccgtacggcgaaggctggctgctgaaggtcgagcttgacgacgatgagccggagctgctgagcgccgacgaatacgcgaaggtcgtgcggtagttccacccatagctcccctccctgaggggagccagtatgtggcatcaaacctatatgcatcgtgcctcttatggaggggagccaagaaaatgaggcgtatggcctatattggtgtctatgagaagcccacgcgaggattttgaggcggcaggcaag

SEQ ID NO: 3 - DNA, 42984 bp, Unknown
  R30_18m  MAG No. k141_486
cggcaggccgtatcatccgcgcgcctatacgctgggcgtcaacagttatcaccatcaggcgattcgcacgctgggccagggactggaaccgatggccactgcgccggacagcatcgtggaggcggtctggatgccggccaagcgtttcgtctgggccgtccaatggcatcctgagttctcccaccgcgccgatagcaaccaacgtcgcatcctcagcgccttcatcgacgcctgctgacgcaagctttccgccgatctcgacgaaacgccttccaggaagcagaacggcgtgattccgttcatctagtctccgggaaaacgcccgcgccccggaacgcgagaaccccgcgtcccttgcgggagcggggtccaagcggtatgtccttgattctgatgttccagataagggggcccgaatcagcgggcgtagaattcgaccacgtactggatgttgacctgcaccgggatctcttcgacctccggcttacgggtcacagtggccttcagggacggcaggttcacgtcgaggtagccggggaccgcaggcagcacgtcacggtgcacgccttcggcggcgatctggaacggaaccatggtctggctcttggccttcacctgaatggtctggccgggcttgacgcggtaggacgggcggtccacgatgttgccgtcaacgaggatgtgacggtgcaccacgaactgacgggcctgggcggtggtgcgggcgaagccggcacgcagcaccaagttgtcgagacgggtctcgaggtcggtcagcatggcgttaccggtctggccggcagtacgggtggccttctcgtaagcggcgcgaagctgcttctcggagatgccgtactgagcgcgcagacgctgcttttcgcgcatacgcaccgcgtaatcggactcggtgcggcggcggtcacggccgtgctcgccaggagcgtacggacgcttttcgaagatgcgctgagccttgggggtcagtgcgatgccgagggcgcgagacagacgcacctgacggcgagaacgctgaacgttcgtcattggattaatccttctgtcgttatctgaacggaacgcttgccttgcatatgcctggcaagcgctgagtcgggcctccccagcgcttcgtcgtgaacaaacacgaacgggttggttttcttgcgattacctaccgccgacccgctgatgggctatgactccagacggtatctacctgttggcagacaccagcaaatcatattacaccgaggctatggacagcactccggcgtccatgcgatacacccggtctgcgtattcgagtgcatcgggatcatgggtgaccatgagaatcgccgtgccgttgttggcttggtctttgagcaggcgcattacgatgtcggtgctctcctggtcgaggtcgccggtcggctcgtcggcgatgagcaggctcggctggttcatcagcgcgcgggcgatggagacgcgccgcatttcaccgccggacagctcgcgcgggtagctgtctgccagatcggcgacaccaagctgggtgagcagcatgcgagctcgggtggcgaacaggtccggacggctcgcagccgtgtttgacggcgtgttttcccggtctgtgattggcgcaatgacgtccggcatgaacaggtcggcggctgcttcatcattggtggcagcggcttgtgccacggcatcggtcgacgcaacagcgtccacctgagcaacggcatccgttgcttctgcgttttgggcgaacggcagcggctccggaaacatcgttgcgggcagaatcacgttgtcgagcacggtcaggttgccgagcagggtctggctttgggtcacgaatccgatggtgcgattcctcagcacggacagtgctttatcgcccaagtcggccacattgcgtccagccacgctcacggttcccgaggtcgggcgaatcagcccggcgaccatgttgatcagcgtgcttttgccgttgcccgaccggccgacgatggcgatgaattcgccggcatcgacggtgaggttcacgtggctgacggcgtcgaacggcgcgccgcggcggacgaactggcgggtcaggtccgtcaaggtcagcagatggtccggggagggcgtctcggttacgtgcggcgaatccggcgcagtcggcgcgttcggctgagctggcgtggtcggctggagcttggtcggctcaaccgtggtcagctgagtcggcgtagttgtctcagtcatatcactccccctctcgcagggtcaggtaggcttcgggccggccgagacgccacatggtggccagcgaaccgatgatgccgatgaccgtagagcacacaatggtcacggcaatgaatccgatcaccgcaaccgggctggcttgcagatacggcaattgaagttgtttgccgatcagcgaactgaatgggaaaatcaccaggctggccgcgccgacgccgattacgccaccgatcagaccgatgatggcggattccttcagaatgatggcattcaacatgccgcgcgtggcgcccatgatgcgcagggacgcgaattcgcgtttgcgttcgttcaccgacgaggcgaatacggcgagcagcacaatcacgcccattacccagatcaccgccacgaaaatcttgaggtaggtgacaagcgcggtcagcgaagttctggtgttggcggtgatgccgccggggtatacgtaccccaaatcggcgaaccgggagtcaagacgcttgatgttttcagccacggtctgcgcttcgtaaccccgctgcgtcttgatcatcacggtggagacggcttcgcctgcatattcggcgggcatgacctgcttggagaccttggccgaggcggcgaccatatcaggcacggtgttttggttgatgaacaccgaattgtcgaggctggtgccggtgttggcgagctgggcgacgaccggccacttatggccgtagagttcgatggtgccgtcggtggacacgttgacgtttgcgccggcaatcatctgaccgtcttcaagggggccttcgaactgggatgcgacccatggttcgatgacgaagtcagtgtccgggtcgtaaccgatgatctgcagcttttcggcacagcaggcggcggccagcgatgatatataggtctgttcggtggcctgtgcgatgccgtcggcctgcatgacctcgtcggcgatgtctttggtgaaatagaaagtgctgggattgccgctggtgagcagcgcttcagccttctgcgcggtgttctgcggcacgaccataaggtcggcgcccaggcgtttttccatactggtcattccggtgttgaggttcatggtcagcatggtgccgccgaagaacgtcagcgcgaggatggtgacgacggagagcagtgcgccggtgcggaacggcttgcgtttgaggttttcaatcggaaggccgcgcaatgcgatatgggatggcacgatgagtccttatgttgcttatagtgcggttgcaataagcgaggccggagtccagcgttcggaatggctggactccggccatctgcgcgatcagttgcgcttggcggcgcgaaagtcaagccagatggcgatggccgcgaacacgatggtgagcacgccgagcacaatgagcgtgggcagcataaccatgcggcagtgcatcatcgcgcccttgcaaataccgatcaggaaggtgggtacggcgagtagcagcagggcgttggctgcggcggcgatattgagaccgatgcgaatctgcggggcgacgaacaaagccacgacgccgaacacgaggatgatgacgccgatgccggtggccgcctgttgcgagtgatggcaggcacccggcatgtcatggccggtgcaggcgtgcgcaaaggtctggggcgcgatggtaatcagcgcaccgagcagaatattgggcacggatgcaaacagcttgttcttcataactactttttcctctctcctgtttccaaggctcgtaggcgcaacctccgcattatgcccagatagtgatgaagaacacaagtcttgttttttgtgaatttatttggtatataactcagcccctcgtcagaggggccaatttatctacaacttctcaataggcgctacgcggagcatgaggcgtttgacgccggcggagccgaagtccacggtgattaccgaattgcgacccttgtcttgcgcgtcggtgaccttgccgagaccgtactgatcgtggctgatcatgtcgcccacggcgaagtcggcgatattcaggccattgtccttggtgagcttcgagctgggcacggcagagccggtcgaaccggatttcggtgtggtgcggcgcgtggtgaccttgccgccacgggtaccgccatatgaaccggatgaagaaccggaacgggaacgcggcccgtaagacgaccccgaaccggagcctgaagaaccataggacgaacccgaacgggagcgagacccgtaggcggacgaacccgaacgggaaccatacgaggagccggaacccgagccatacgacgacccataccgcgaccgcgacccataggacgaacccgaaccggacgaaccacgcgagccgaacgtcgacgacccgccaaacgcggcgccgccaaaatcgtcatcatcccagccgcccaaatcgtcggcgaatccatcggtctcccagctggcgcgcatacgctccacgccggcttcacggcgtttccaatcaatcagcgaatccggaatctcgtcgaggaactggctgggcatcatatcggcggcctggccccactgggagcggacggcggcgcgcgtgacatacagtcgctgcttggcgcgcgtgatgcccacataggcgagtcggcgttcctcctgcagttcagtggtgtcttccatcgaacgcgaatgcgggaaggtgccctgttccatgccggtcaggaacaccaccgggtattcgaggcccttggcggtgtgcaaggtcataagcgtcaccttgccggagtcctccgcctcgccgggtagttggtcggagtcggccacaagcgcggtggtctccaggaatgcggacaacgtggcgtcaggcgtgttctgttcgaattcggcggcagtggactgcagctgggagaggttctccagacgggaggcgtcctgcgggtccacggatttctcgagttcggcccttaagcccgacttctccaatacttcggccacgatctcgctgggcttggagtcgtgcgcgcgcgtgaactgcgagagcgcgcccatcagatcgcggaatgctcgtagcgaggtggcggtgcgtgtcggcacctcgatctcatccaagtgcatgagtgcgtagaagaagctggtgccatgctcgcgcgcgtaggcgagcagcacgccttcggcgcggtcgccaagcccacgcttgggcacgttgagaatacggcgtagattcacatcgtcgtccggattgacgagcgcctgcaaataggccagcgcatccttgatttcgcgacgttcgtagaacttggtgccgccgacgagctgatacggctgattcgtgttgatcagcgcctcttcgagcgagcgggattgggcgttggcgcggtacatgatcgccatgtcggagtaggcgatgcccgcttcggcgtgcaggcgcgcgatttcggtggccacccactgggcctcctgctgggcgttgtccgccgcgtagccgacgatcggctcgcccttgccgagcgcggtccacagtttcttgggcttgcggccctcgttgttgctgatcaccgcgttggccgcatccagaatggtctgcgtcgaacgatagttctgttcgagcatgatggtcttggcgttcgggaagtcctgctcgaagtcctgaatgttgcggatgtcggcaccacggaacgcgtagatggactggtcggaatcgcccaccacggtgatccaggcggggccggacttgccggcgttcggcgcgcccgggatggccttctcccccgtgtccacgccggccagctcgcgcacaagcacgtactgggcgtggttggtgtcctgatactcgtcgacgagaatgtaacggaagcggtgatggtagtactcggcgacggccgggtcggtgcgcagcaactcgaccgtgcggccgatcagatcgtcgaagtcgacggcgttggccagggccaagcgatgctcgtattcggcgtagatcaccgcatagatggcttcaaggtcgcccaccgtgccgaactggtagccgcgctggccaggcgtgaagtcgggcgcgtgaacggcgaggttttccttccaaccggtcagattgttcttgaggtcggagatatggccgaggatcgagcgtggagtgtagcgcttgatgtcgaggttgaattcggtggcgatgattttgacgagtcgctcggagtcggcggaatcataaatggagaagccggacttgagcccgatggacttgccgtcgcgcctcagaatgcgcacgcaggcggaatggaaggtggagacccacatgcgctgggccaccgggccgatcagcgagccgagtcgttcgcgcatttcggcggcggccttgttggtgaaggtgatggccagaatctggctcggccatgcgccgaactggctcaagatccaggcgatgcggcgggtcagcacacgggttttgccggagccggcaccggcgccgatcagtagcgcctgaccgcggtattgcacggcttccgcctgctgcgggttcagatcgcctacgagttcctgcgcgctgcgtgcgatgacttccggctcgtcgtacactgttgcctccctttgaatcgcgacattcatgtttaccacatgcacgggtcagcgcaggacaacgtacacttacaagtatccatatcattcactgacatacagcaatgggaggtctaatgcaggaacttgaggagcgaatccagagcgagggaacggtgaaggcgggtgatgtgctcaaggtggacgcgtttctgaaccaccagtgcgacgtgcgtctgttcgaccgcatgggttcggcatgggccgctcatttcgccggcaagcacatcaccaagattctgaccatcgaggcgtccggcatcggcattgcgtgtgtggcggcccagcatttcggcaatgtgccggtggtgttcgccaagaaggcgcagtccatcaaccttgacggcgaccagtacaccaccacggtctattccttcaccaagcagaaggagttcccggtgatcgtggccaagaagtatctgaacgccggcgaccatgtgctgcttattgacgattttctggccaacggcaaggcgttgcgcggtctgattgacctgtgcgaggcggccggtgtcacggtcgagggcattggcatcgccgtggagaagggcttccagggcggcggtgacgcgctgcgtgccgaaggctacgatgtggattcgctggccatcgtcgagtccatgaatcccgagaccggcgaaatcacatttaggcactgagcacattgactgctcccgccagcgggagcaacagagagaagaaaagaatcatgtcagagaagaaaaccaagaattccgtatcctttgaggcgctgtcttcgctgaacgcgccagtatccttctggaagggcattccgttcggcctgcagcatgtgatggccatgttcgtggcgaacctcgccccgatcttcatcgtcgcctcggccgcgaaaatgaccccggcccaatcggccaccatcatccaggccggccttctggtggcgggcctgggcacctgcctgcaactgtacggcgcgtggctcatcggctcgcgtctgccgatggtcaccggcatctccttcacctacgtggcggccgccgtggcgatctgcgcagacaagggctatggcgcagtggccggcgcggtaatggtcggtggcctgctggaactcgtgctgggtttgacggccaagtattggcgtcggttcgtgccgcccatcgtctccgccatcgtggtcacgtcgatcggcttctcgctgcttaacgtgggtgccacgagcttcggcggcggcagcggagccaaggacttcggaagctggcagaacctgacgctcgggcttatatctttggtcgcctgcctggcgttccagctgttgatgaagggcacggccaagcagctgtccgtgctgttcggcctggtggtcggctatgtggcggccatctgcatgggcaaggtcgatttctccggtttccagaacctcgccatcgtgtccgtgccgcagttcatgccgttcaagcctgagttcgactggggttcgatcatctccatcggcctgctctacgtcgtctcctcggtcgaggtgctgggtgacaccgccgcgctgaccaaggtgggcctgaaccgtacgcccaccgaacgcgagaccgcgggcgccatcgccggcgacggcctgatctccaccgtatccggcctgttcggatgcctgccgctgacctcgttcgcacagaacatcggattggtggccatgaccaaggtcgtcaaccgcaaggtgattctctccggcggactgattctggtgctggcgagcttcgtgccggccatcgccgaggtgttcaactcgctgccgcaggcggtgctcggcggctgcacgatcatgatgttcggcaacatcattctttcgggcttccagatgatcgccgaagcgggcttcacgcagcgcaacatcacgattgcggcgctttcgctgaccatcggcatcggcttcacccaggtgagcgacatcttcgcgcagttcccggcactgttccaacaaatcttcgcctcgaactgcatcgccgtgtcgttcgtggtggccgtaatcctgaacgccgtgctgcccagcgaggagcacttcctctccgcgcccaaggaggcaccggccgcggacgccgagtgataacaacgcgacatatcagctgcgcataatcacatgctgatgccctatcgtcttgcaggatgatagggcatcattgattttgagagagactacaagttgaaccatgagttcgagccggtggcgtgtcgatcaatcgacatcttcccattcgaggatgtctccgggttggcagtcgagtgccttgcagatggcgtccaatgtggtgaagcggacggctttggcacgtccgttcttcagaatggacacgttggcgggcgtgatgccaatttgttcggcgagctcgccgacgccaatcttgcgtttggccatcatgacgtcgagattgatgcgaatcgtcatctcaaatcacctgctcaagttcgcgcccgatccggacaaggagaacagtttccatacggccacgaacgccgcttcgatgcagagcaggaacagcacgcccataatgagatatgaccagtgcatcgacgtctggctcgggcagaggccggccagcgcgccgctcaatcccggtacggcgaatagttggccccctaggcaggccagccagaccagaatcacgatggctttcaacgcgagcaacacccatcggttcatgtagtttttcatagcccggtcctttcaggtgccgacgtttttggcgacaccgcgaacatcgatatgactatatcgaaaaacgatataccttgcaaggcgtattgcgtcaaccggcattggtcgctcatatgcatataggcttcggcagactgtcagcagaccgtcagctcaacggaacgaacgccatatgagccacccattcgcgcacgagcgtgatgacggcttcgggttggtcgatgtgcgcgttgtgaccggcattatccagagtcacgaaggtggcgttgggatagtgcggcaacagggcttgctggtcttcgtatccgacgatctggtcttgcttgccggtgacgatgagcaccggacccgcatatgtgccgagcatttcctcgggattatcggccagccaataacgctgatccagccgttcgcatgccgcacggtcgcacaacgccacgccgggcaggatgaaccgttggtagcgccgccacgcgtcgaatgactggttgacgcccatggtaatgaaatcgaacacctgttcctgtggcaaggagtgcgtcagcttgggattgggctgtgcaaccacatgttcggccacatgccggccggcatgctgcgggtccacgaccggcgcgatcaatgccataccggccactcggcgaggttcgcgcgccaatacttcgcggacaagcgcaccgcccatcgagttgccgaccatggcgaatggagccgctttaccgacaaggccgtcaatggccgtttgcagccaatccgccatttccggcagcccgcaggcatgctcgggcaatgccggcgtacggccgaaaccgggcagatccagatatatacggcgaattgaatcattgccgtcaaacgccttgtcgagcatcatcagcgaacgatggtccacacccatgccatgcacgaacacgacgggcaatccatcatcattgccctcaatcgcgcagtacggctgcaattgtgccatgtgttcctctccttcaacccggtacaaatcgcctttcacacaatagcggcagcagctcccctggtgtcggagcaatcccgaccgccattctcggtttcgaggggctgatttcgtggtttggggacatccacttccgtttcaaggggctggtcattggccaaaacccaagtacgaatggcttcatgccaacgtcatttcgccgttttggagctgtcgctactcggccatcagcccctcgaaacggaagtggatgtctcggaacgagcaaatcagccccttgaaacgcaaatagacgattgcgaatcgacttatcagctgcgtcgaacttgcaatagagatgtcggtgtatcattccccggtctgattgcgcggatgtcaggaagcgtgaagaattgtcacaaagtcgcgtgatggcgcagccgccgttcaggtggatatgccacgctgtcatgatgacggccgagccggaacacgacaaatctcgcatgctgcataggccagccggtcacggtcagccatgacaccgaaatattggaggcgcaatgggacaacaggtgcggtgcggcagacgccgctcccatggcgcgggcgcgctgattgcagccgtcatacttgttgttgcggcgctgatcgcggcatggacgctgctgccacggctattcacgcctcacgagaccgcgcgcacggccgaggaagcatattgcgcggcggtgtcgcccgacggagcccgccgcaccttgacgcctgatcaggcgcagaacgcggcgctgattgcgaacatcgccgtcacgcgcggactgccggatcacgcggcgacggtggccatcgccacggccatgcaggagtcgaggctgacgaatctggactacggcgacttggattcgctcggcctgttccaacagcggcccagccaaggctggggcacggcggagcaggtgtccgacatgacctatgcgacaaacatcttctacgaccatctgctgcaggtgccggattgggagacgattccggtggaggacgccgcgcaggaggtgcagcgctcaggctacccggaactatatgccacatgggatgcgatggcacgcgcttgggcctcggggctgaccggcgaacggtcggcgggcgtcacgtgcgcgttggagccagcaacctcctcggacgcggacgggttggttgccgccataagcgctacactgccgaatgtcaaggtctcggttatgcccctaaatggcaaaaccggcacgaacaacggcgctgcgaccaatacggccagcacaacgttgacgatcacgctgccggacggcctgtccgccgacaaccgcactcgactttgctggcagacggcagggtggctggttacacaggcgcatcaatacggcattgatgcactgcacgcggacggcatggattggaaccgcagagccggcacatggaccggcaccgaaaccgccgagcagaccgtcaccgtcacgcttgcgtgatgtgacctataccgccgttgcgaccacaaatccgactgactggagcctacgccgtcgatgccgcctgaggcacgacacggatatgttttttactcgttcgaatgagcccaatccacgacggcttcgatgttattgccatccgggtccagcacgaatgcggagtaatagccgggatggtacgggcgcggaccgggagcgccgttgtctcggccgccggcggcgagcgcggctgcatggaacgcctgcacggcttgctggctgtcagccaggaacgcgatgtgtgtgaccggcgtgaccggcgaagcctccgcctccggcccgtcaatcggtgacacgtagaaatcggagtgcagggttccatcatccacgccgaatccgagcgtgggctcatgatgcgccttgacgatatagccgagcggtgcgagcgcctgtttgtagaatgtgatgctacggtcgatgtctttcacgtgcaacgtcagatggtccagcatggtcttggtcaccctcccctggttcttgtattcgattgctgcttgcagtgtaagcccgaacgtttcccacagggccgcgcatggctatgatgagagcaatcgcacgtcgagttcgagacaatattcaaaacgaatccaaggcaatagggggaatgatgatgaccaaggcactgattgtggtggatatgcagccgacgttctgtgaaggcggcgaactgggagtcgaaggcggcaacgcggtcgccgagcggatcgccgattatgtgaacgcgcatcgcagcgagtacgcgtatatcgcaaccacgcaggactggcatatcgagccgggcgcgcactggtcggcggaaccggatttcgtggacacgtggccgaagcatggtgcggccggcacgccgaacgccgaattgcatccggcgatcaaggcgctgattatccatcatcatttcaagaagggccagtattcggcggcatattccggttttgagggcatcgaggacaatatcgaccgtatccagacccgtgaggaggttgcggccgagcaatccgccggcaagacgctggccaatgcgctgaaggccgccggcgtgagtcgcgtggatgtggtgggcatcgccgaatcgcattgcgtcaaggacaccgcgctcgatgccaggaagttcggtttcgaggtcaccgtgttcgaggacctgaccgtaccggtcagcgaggagctcggtgtcgcggtccgcaaacagatgacgacggccggcatcacattggccgagtcccgctgatcaggccggatatacccagagcgaacgcacgaacacttccgtatattcaaggccgacactgccgcatagtcgcctagtcgatatgtgaagaaggcttttatggttacgatgctgctgacttcgatattccgcaacgcctcgtccgccgtgcatgaagtcgaaccgcatccgcaaggcaagcgggtcgcgttcatcccgacggcgagcgccgtggaaccgtgggggccggttcactcggcgttgagcaaacacgcgctgcaacgcctcggtttcgaggtggagcaactggatgtggaagatgtgccgagcgggtccgccgaacgcgtcacgcgtagcatcgccgaggccgactgcatctatgtgggcggcggcaacacgttctttctcctgcaggagttgcgccgcaccggtgccgaccgggccatcatcgagcaggtgcgcgccggcacgccgtacatcggcgagtccgcgggctcggtcatcacggcacctgacatcggctatatcaagctcatggaccgcacggacaaagcccccgatctcaccgattacgcaggattgggcttggctgatttccgcgtggtcccccaccatcatgcaacggccatgggccacgccgcacaacgcattctcgaccggtatggtgccgatctcagtctcaagcccctcaccaaccggcaggccctgcttgtcaaggatggcaaaacccggctgctgcgatgatgcgggtcgtcggcccgtcgcccattcggcatcgccgtggtgtgtccggcctgacatgcctatcgagcggcatcaatcacacagcaatgtggctgggaacctcgccgaacgtcaacacctgcatacatcagcacggcaaaatctgccgaaatcgcccggcgcacgagatgccagccggccccatccgtcacctcagtgccgtaccgggccaggcatggccttgagcaacgggatgaatccggcgcacagtaccagggccacgacggcgagtatctgccagtgggcggagccgagccagccgccccacgtgccgacggcaccgccgatcgcatacgcgaacctggcacggccgctgaatttggccaggtcaccaccgctcagcagcagttgtcgcgatacgatcacgccatgcgccagcaggccatagccgaggttgttgatgagccatccgacgcacaccgcggcaaactcgggaaccagtacggcggcaagggaaattgccgtggcgattgccccgatggcggacacggcgcgcatgccgagttttgcggagagccgcatgtagacaaacgatccgatgatgctgcccacgccgccgaatgcgtagaccacggtcagcatatcgctgccgtaccgggagccgatgcccagcaacgcatagcttgcccacagcgacggaatcagcgcaagcagcagcgacgcgatcaacagtctgacccgggtcaagcgggtgaccggagtgcgctgcggcgcgtgtgacgtgtcggccgccgtggattcgtcggcggagccgtcgccgtcatcgccgcccgcaccatcgttgccgaatcccggcatgaactcgcgggtgcggaatcgcgtcagcgcgcaggcaaatgacagtgccgacgaggtgagcagcatggccatgatggaggcgttggccaaggccgatccggcaacctggcccagcaacgtaccggccacgctggcaatcacggcgacatagccgctgtacttgacgagcatgtcatcgtcgtcgccggccgcatccacctcgaacacttcggaggccacgtcgatgacctgcccggtcatcagcagcaggcatgacagggccagcagcagccacttccaatacgtccaaccgttgggcaccagcgcgaccgccaggcacagtacgccttccacgccctccgtggtcgcaagcgaacggaacgagccgaaccgctgcacgatccatgcggatatcggagaagcgaagtcgatgaccagattgaacgtcttgcggaacgcgatcacccatgccggcagtccgacgatcagaatcgaaggaatcaccgacccctcgaaaatcgcgttggacagcatcgaaaacgtcatacccaccaacgcccatcgcaacgccctgctcaataccgataatcctcgcataccttagttccttgtccttgccagtgtaacggaattatgacttctcaatcgtccccccgctgtctaaatgaaagtgcaacaccctttcactggttatctggacaatctccaatctaaggggtgttgcactttcatttagacagcgccccccatatccgcatgtcactgctgccatcataatgagccagtagacgcctttaagcgttctgacaaccatggaatcgaaaatcgctatgcacatcatagaacagcactgccaaggcaagaggtctgaccagtcgctcaatgaggacgggctgatcatcaccgatggtttcgcggcagtggtggatggagtgaccagcaaaagtgtgcaccaccctgccggccttgttcttggccgcgtccagcaccggcgcgaggcctgcggcccattcgcgcaccgaacggccggcgagcatgtcgttgccgcccacgcacacgatcagcacatccggccggtcattgtccggtagcgcacgcgccgggcggtcgcgccgagcttgccgaccgtacgccaggccaccggccgaccggtacgcttgcgacgcgcgcggcaagcagcggcataatgcctttcgactggtcgtccacgccacatccggccaccaatgaatcgccgaccatgacggcaagaatcggcttcacgccgttcgcgcctttccaatcggggccgatcggcgccttgatatccaccacgcgacccttggcatcgaacaaaccgaaccgtttgcccttcggctcggacgccaacttcacccggcccttggcccacataccctcaatcggagcaacggcagcatcaaatcacacgcaagattcccacgccacccaacatagtccgccctcctcgacctcgttagcggccagtagcaacccctattcgaaaactcgataaccatcgtcaattcgcataatttgaacgttttaggtgttttggtcgctttggacgttttatactgtgacagataaaaaggaggtcaccatggcagaatccgacaaactcaccattccacgaacaatccttccatccatcaacattgacgacatgacgacattggaggcattcaccgcacgatttcttgatgagcggatcttcatcaaagatgccagcggcgtggagactcccctaccttcgcagctttgcgacgccgtcaggcagacggccatccttctcgccgaaggcaaaagtgtaacgatcagtgccaccgaacaagatctgactaccgaacaggcggcggcaatgctcggcatttcgcggcaaacactgataagactgcttgataaaggacttattcctttttcacgtccgtccaatcaccgtcgcatccggctggaagacctgcttgaatacaagcgagcctcgaaacacaccaaggattgcgccctgagccaaatgatcggcgtcggggaagacgccgaattgtacgacctgcccgagccgaccccgcaggaagccatgcatgcggtatcggaggtaaggagagtacgggccgatgctgtcggtgtttcttgatgccaatgtcatctattccatcaccttgaccgatgttctgctcaccttggccgagcatgacctttttcttcccctgtggtcgcctaacgtattacaagaagcacaggaagccgcctcccgaacactgcctgacgccgcacaacaagccttccgaaaaagactgataatgatggaccaggcattccccgaatcctccatacatgttgaggaatcggaatggagccaattcgatctgcctgacccggatgatcgtcacgtacttgcggctgcggcacagggacaagcagacgcactggccacgcgcaatatcaaggattttccccagaaactgcttgactctttctccattcaggtcatcacgccagatgatttgctctgtgtattacttagacgaaatccggaagccacagctagcgccatacgtgagcttatcgattctcgacatcggccaccgataaacattcccgactttgctaaaagacttgaacgctctggcgcaacacagtttgcagccgctattgcgcatatacgacagcctctcggcaatcattcgtactttgaccagtaacccatgaattctggatgaattggggtgaaccggcggggctggaggcgagcgggcggcggattatggggcacaatggtgtcaaggaggccgccatggtcgatgactatactgccaaaatgactgagctgatcgaactcatgcgtctgatcggcaacgatacgcagcagtgcgaggtcaaggaatgcaagcgcaagatctcctcgaccatcaccgatacgctgtccgcgttctccaacggctccggcggctggatcatccttggcctgtccgaaaagaacgggttcacgccggtcgagggattcgacgcgcgcgccatgcaggaggcgctgagccaggcgtgcgagaagatgacgccggtggtgcggcccgtgatcgtcacctgcccgttcgaaggcgcgaatctggtgttcgcgcgcatcgacgaaatgctgccgcgcgacaagccctgcttcaccaccgcgctcggaccgcacggcggctcgttcatccgcaccggcgacggcgaccggcgcatgacctcctatgaggtcgaccggctcatcgaggagcatctgcagcccacctacgatctggatatcgtgcccggcgccacgaccgatgacctcgacccgcagctcgtttccggattgttggcacgcgtgcgcgaacagcatccgcgcgtgttcgccgaccgggacggcatcgatgtgctgctggatctgcaggtgttgcgccatgatgattccgacgagtcggaggtcggcggaatactgcgtcccaccttggccggactgctggcgttgggccgctatccgcagaagttctatccgcggctcggcatttcgatagccgtgtttccggggacgagccgggacgatgtgttccggggcgacgaacgattggtcgcctcgaagtcggtggtcggttcgattccggtgatgatcgacgatgcggtcgactcgttgatgcgttggattggcgcgaagaagcccgattatccgccactcgtgttgcgcgaggcgattgcgaacgcgctcacccaccgtgattattcgcccgatgcgcgcggcacgcaggtgcatatcagcgtgttcaccgatcgcatcgagatcaccaatccgggtggcctgtacggcatggtgacacatgatgtgctggcgagcccgcatccggtgacgggcgcgccgttcgtctccacccgaaaccagttcctgttcacgctgctggagtccacgccgtatccgggcggcgggtttgtgaacccagaaggcggcgacggctaccagcgcatcgccgccgcgttgcgcgaggccggcatcgagccggcgaccacgcgcaacgacatcaacacgttcacgatgaccatcaccaagcagcgcacgatggcgaacagttcaccgggtgacgtggtcaaggcgattatgaccgtactggaacggcattcggcgatgagcgtcaaggagatcatgcgcgaactgcagttgactccgctggccgccacgtccggcatgcgtgagctgatgaaggaagggcgggtcgcccgagtcaagttcgccgacgacccggtgcagcggtatcggttgaaaggctgattttctcactcggccagctgcgtggtggcgggcgcggccagggtgggacgggatcggcggaagcggccggcggccaggccaatgcagatgaacatcacaccgaacagtgcgaccaatcccagcgagccggcccagccggcgacgctcacgccgctctccgcagccgtgccgaagccgagcgcgttgtcgatcgcggtgcaataccaccagccgggcaggaacttggctatggtcaccatcacgccgggcatcatgtcaaccggcaatgcgacgcccgacgtgaacatgatgagcaggccgaagatattggcgaatccgttggcagccgcctccgaaaacccgaattcgctgagcatgaatccacaggcgacggtcatcagcgcatatacgcaggttgcgcagaacgtcatcagcactccttcggcgctcaatgtcaacggatcaagtcctgccgcgaccatcagaccgaccgccagcaccagataaccgacgcatacgacgagcgcgaatccgctgagcgtcagcaaccgctggagtcccatcgacgacatgcgttgtggggatgcggtgagacgacggcgaacttccccggtggtgaatatgcccagaatcattgacccgcagacggtcatcgccaaaaacagcggatacagcgcggttttcatggtgttgccaaatctgctggccgccatgtccgaagcactttccgcgtccgcgcttgccgtgtcgatcacagcgaccttatggttcgcgtccatgtcactcgccgatgcggcagccgctttcgacgcctcgaacagatcgccgacgctgggtttctcaatctgaccggccggcagcatatcaagcatgtcctgattcgagaattcaccaaacccgcccatgccatcttcagacgaatcacccgcagtgtctccaatgtcgataccggccatagctgcgagcgccgcactatcgaccgtcgtatgcgagccaatcaatgccgtacgcgtgagtgaaaggaacccgatgacgttcatccgggccatcgagcctgcaccggacgtatagctggtgaccgtgtccacgcttggtggattctcgcctgtcgccgcggcatcaatgaaatcgtcggcgaaaccatcggggatgatgacgatcagatccacccagttcgaggcgacggcttgttgcagagtttcactagcatcgtcaacgttcaccagttcgctggaatccgacaggtatgtgcgcatcgatgacgcgatgccgcccctgtccgagtcccgatcgatgacggcgacacgcattttggccggctcgaatgccgcggctgcggaatcggatgtgccagacagcatcgaccagctgatagacagcatcatgatgcccacgaacacgaggtaaatcaacaggtaggccctgtgcgagaacagtacacgcaatgtggctttacaggtgttcatagcgttgcctcctcagcattgcgatgccggccaagaggaataccgcgctcatcgccagcaaaatggcacaagtggtgatgaacggctggtagctgtcgtagtacaaaatgtcgtaaaacaggttcgtcacctgttgcgcggggttgatggtgccgaggatgggcgcgttgcgtgctatccagtcactgatctgcatggcgaagccgccgtacagtccggtgaacagcgacaatgtgcaggcgattccgctcgacaaaccgtatttcgtgtcgtaggaaagcttcggtaccgcgccgagcaaagtaccggctgaactggtcatgaatgcggcgatgattaccgcgaccaccgtcaccggttctcgccctccaaacgaaatgtcgcagatgaagcgaatataggccaatgcgataagcaatgcgaccgatgcgcacaaccagcaggcaaggaaaccggcaataagctgtctggcatggctcaatggcgccacggtgcggcgaatgcccaatgcggacaggttggcttgtgctgtggagaccgtgctgattgagtaccccatggcaatcatgcaggacatggccagcaacgcgtaatagtatctggcgatggcattgggctggaaatgcgtgagcgttgtttcgtgagtcacatcgacgctttgcccgatgctattccagaagttgcggctgagcgcagcctgtggattgtcggcgatggtttgtcgggtgacggcgtcggtgcggttgtacagatcgatggcgctgcgcaatgccgataggctgatgtccagtccgacgcttcctgtggtgtcattggccgcggtcaccgtttcccgactgatggttatcgccaaacgcccgttgccgtaagcagccaggtagccgcggactgtgccatcggcgagcagctgttcggctttccgcacggtgtcggctgcggtgatggtcagcaattgctgattgatatcggcgtatgccgtgccgtccaaagactccgacgatgaggccgtctctccagacaaggcatccacaaacgtacgcgctccgtccgcctgctgccagcggctatcttcgacgacggccattggtatcggtttgagctcgtatccctcggacagtccgccgaagaacccgttgaacatggttgccagcacgatcggaaacacaatcatccagaacagtgcctgacgattgcgcaggttcgctttcaatgcgaccaaaaatgtggtccacatgatgtctccttacctgctcccgctggcgggagctgtcggcgaagccgactgagggtggttgttgcaaggccacccccactcgcttcgcgggagccccgccagcaggggcaagatggtcagtccctcagtgccttgccggtgagttcgaggaacacgtcgttgagggtgggcgggcgactggtcaggtggccgatgttggcgccggagcgtttcaccgcgtcgagcacgtcggtcaggttgtgttcgccgcgccggcatcgcacgtcgagttccttgccgtcgtaggtggcttcgatcacgcacggcagcgcacggacctcagccatcgccgaatccgccagatcgagcgtttcgatggtgatgcgctcgcccgtgtcgatcatgttcttgagctcgtcggcggttccgagcgccaggtgccggccgtggtccatgatgaggatgcggtcgcagatctgctcgacctcctccatgtagtggctggtgtagatcaccgtggcgccggcctggttgagccgctggatgccttccagaatcgaattgcggctttgcgggtcgacggcgaccgtgggttcgtcgaagaagatcaggtcaggcttgtgcgcgatgccgcaggcgatgttcaggcgtcgcagcagaccgccggacagtttgccgggccggaacttgcggaagtcctggagtccgacgaattcgatggcctcctcgaccagcggcgcgcggtcagttttcttcggcacgtacagcgagcagaagtagtcgatgttttcggtgacggtcagttcgttgaacacggccacattctgcggcacgatgccgatacggcgcttcagcgcgtaggaggtcggcgtcatcggctggccgaatacgcgaatcgtgcccgaatcgtaggtgagcaatgcgaggatgcagttgatcgcagtggttttgccggacccgttcggcccaagcaggccgaaaatctcgccctggttcacgtcaaggtcaaagtagtcgagcgccaccatgtcgccgtagcgtttgaccagttggctgacgtgcacggccagagccgggttggttgtcgagtcgtgttcggaagctctgttgtcggttgccatagccactcccttccttggtgattccatcatcccaagaaggggccggacgccgccacaagcaaacgtcacgacttggccgtacaggcgtgacatttgtcattacagcccttcggcgtcggtctgcatggccttgtacaccttatcgaccggcatcaggctgatctcgtccatcgaatagttggacgccctgtggctttgcgcaatcatcggtatcatccctttacggttgtgtcgacaacatccgacgcttgtgcctcatctattcgggaagtgtgacccgttgtcttggaccgtcatgcgaataattccgcacgcccgtcaagttcgtcgtgttccgcacaccgctagactggtggtggaagagcgtcgagccggggaggtgccatgcgcgtgttggccgagaagggcttgctgctcgtgttgggcctggctttggcctggcttgtcggggtgcggctcgatggcgtgttcatcgccggcctgctgttggccgtttccgtcgccggattggtggaatggctgcgtcccgcgcaatggtcttgggtcttgtgtacggcgtatctcgtcatcgccgtggcggtgccttcatggtgcgcgttcatgccgctcatcgcctacgatactgcacagctgccggccctcgcctcgaccggagcccgggctggggcacggactgcggcaagcggccgctcccccagtgtctcgcggaccgcggcctctcgccgttcccttgccgatgcaatacgttcggccccgtggctttcggtcgccgcgcgctggatatggctgttgccgccgatcgcgctctggttcgcccgtggcaccgaccgtctccagacgctggtgatgacgatggtcgccctgcttggattcgttctgggccgggcccgcgcctcctcggacgaggcgcggcgcgcgttgctgcacgcgcaggacagggcgcgcgaatcctcgcgggccactcgttcgcgcatcgccgacatcgatgaggaacgcgcccagtcgattcgcatggcaaccctcggcgagcgcacgcgtatcgcccgggagatccacgacaatgtgggccatctgctgacccgcgcgatcatgcaggcgcaggccggcaggacggtggccgaggcgacgaacgatacggtcgctgcgcaagggttcgccacgttgggtgcgacgttggatgatgcgatgacgatggtgcgccgttcggtgcatgatcttgaggatgacggcactgatttcgccgcgcagatcgatgatgccgtcacgtcgttcgacggcatctcccccggtttcgccgtgacgctggccaacgatatcgccaaggcgcccgcgccggtctcgcgctgtttcacgaccgtgattcgcgaggcattgtcgaacgtggtgcatcatagtgcggcgcacgaggcgagcgtgacgttgcgcgacttccccgcgttctggcagttggtcattcaggatccggggccggccgtgtccgagtccgatgggtcccggacggccgctgcccgcccgcgtgcgatgcgtgccacgcgcgtcggctcgcgactcgccgccgacagtgttgccgatatgcgcggttcggccgatgagctgatgcgcggcatgggtttggcggatatcgaatcgcgcgtacgcgcccttggcggcactgcggtttgcgggccgtatgagggcggctggcgtgtgttcgtatccgtgccgaagaagcgttggaccatggaatcgggggattgatgagaatcgcaatcgtggatgatgatccgatcgtctgccagtcgttggagacgattctgacggccaccggcacggccgaggtgctatggacggcaaatgacggcgacgccgccgtgcgccgttatttcgagacgccggcgagccgaccggacgtgctgctgatcgatattcagatgcccggcaccagcggtttggatgccgcgcgtgagattctggccacggacccggccgcgcgcatactgttcctgaccacgttttcggaccagtcgtatatcgcgcaggcgatggggcttggcgccaagggctatctcatcaaacaggatgtggcggcggtcgggcctgcgctgcaggcggtgatggccggtcaggtggtgctcggcgcggaagtgctcggcaagctcaccgaacggactccggatcctgccgattccgacgattccggagataccgccgattccatcgagggcctgcttggcgagcgtgagcgtgagatcaccgcactggtcgccgagggcctcgataaccgcgacatcgccgccagactgttcctgagcgaaggcacggtccgcaatcgcatcagcgcgatactggacaagctcggcctgaccaaccgcacccaactcgccatcatatggctgaacacgcaccggtgaggggcctttggtcaagtaggtctctccctccgtcatcgcttcgcgatgccacctcgaacgcgattcaggacagcttgcagctgacctcttattcgctcgttgtcactcacccttgcctaaaaacacctccggcgttttcttcacggctcggctcatcagagggaggttgtgaaaaaccaacctcagctgtttttcatgacgatactgtcgatggtgttggccacgcgctcgcagtcgtcggagcactgttcgaggtgacggtacacgtcatgccaggcgaacacctgcagcggatcggtgcaggtggtgtgcagcgtgcgcatcgactcgatgaacaggtggtcggcgtccgtttcgatcgtgttgatggcgaacaccagttcgcgcaacgtcttggaatgccggaatcgcggcagttcgttgaccagctcacagatgctttccgtggcacgcactaccatatccgacatctggaccgcatcgtcgcgcatgtcggtcacattgtcgtagtacatgcggttgagcacaccttcgatgctgtcggtcacatcgtcgagcacgtggccaagctcgtcgatgtcctcacggtcgaacggcgtgatgaacgcggtcaccagttcgtccatcatgtcgtggcgcacctcgtccgccgacttctcaatcgcgtgcatgctgtccatgcgttcgcgcagctggtccggattgaagtcgtgcatgacctcggacagcagcttcgcggcctggcatgcgtagtccgcgctgcggcggaatccgtcgaagtagaacacgtctttttgtctcgccatgatgggtggattcctttctagaacacgaccatgaacagtttggccattacgaagctgatgagaccgcaaccggggaaggtgaacacccaggtgagcatcatgtcgcgcaccacgccgaagttgatggcggagaggcggcgtaccgcgcccacgcccatgatggcgctgcacagaatcatgagccagaccggaatcatcacaccggtcacgctgggttggccgttgcagaacgccatgccgaggaacagcacgccgatgaacttctggccgtcctgcgcgccatgcatgaagctcatggccgccgcgcccacgatctgcgcgtaggtgaagaacccgttggtgcggcggcggtccatgccggcgcagatcagggtcacggccttgcacaccaaccaacggaacgggggcaggctcatactttgcttcgatatgctcgtcgacatttcccgtcatctaccgaggattcggtcatgcgtgtgcgaaaatggacacggtgtcaatcaggaggtgcacagtggttgtaagcacggattcgagccgcacaatgcccgattgggtgaagtacggggtgttctggcacgtgtatccgctgggcttctgcggtgccgatatcaggcccgtcggcccgcgccagttccatggccgcggccttgacgcgatgatcccttggctggagtacgtgcgcgatctaggcgcgtccggcctgctgctgggtccggtgttcgagtcggcgacgcatggatacgacacgctcgaccatatgcgcatcgatgtgcgattgggcggggatgccgcgttcgaccagctgattgcggcctgccgggacatgggattgcaggtggtgctggatggcgtgttcaatcatgtgagccgcgatcatccggccgtccgggcggcgcttgacgagaccgccggacgcttgaatccggccgacaacccgtggcatggtctggtccgcgcgcatgtcggtgataatgacgaacccgctttggatgtgttcgagggacacggggatctggtggcgctggaccattcggctgacgagaccgttgactatgtggtccatgtgatgagccattggctggatcgcggagccgccggctggcgcctcgacgccgcgtatgccgtgccgagcccgttctgggcgcgcgtgttgccgcaggtcaaagccgcacacccgtattcgtggattttcggtgaggtgatccatggcgattacccgcgcatcatcgaggaatccacgatggattcgatcacgcaatacgagctatggaagtcgatccagcatgcgctggagacggagaacttcttcgagctggattggaatctcaagcggcacaacgcgttcctgaattccttcgtgccgcagacgttcatcggcaaccatgacgtgacgcgtatcgcatcgcagattggcccggccaaggcggcgttggcattggcggtgctcatgacggtcggcggcgtgccaagcatctattacggcgacgagcagggctatgtgggcgtcaagcaggagcgtttcggcggcgatgacgacgtacgtccgaagttccccgactcccctgccgaactgtccacgctgggagagccgacataccggctgcatcaggcgctgatcgcgctgcgccgtcgcaacccatggctgattgacgcgcgtaccgaggccgtgaagctggaaaacaagcacttcgtctatcgttcgacgagcgccgacgcccagcattccctgaccgtggacctcaacatcgagcaatcccccactttcaccatccgcaacgccgacggcagtacagcgtatcaatactgagctacctcatcagagggagctcaccattcaccgccgaatgcctcggatcagcaggtcgagcaggtacccgtacgaccggtcgacccgttcgcggccacgtgtgcggggttgtgcggaacgcagttcgaattggatgaacccgtgtatggacacccagatggaggatgcaatcaggtgggggtcatcgtcgcggaacacggccgccgcctggccgtatcgaatgatctgcgtgatggcgtccaggcagtgctgggccgagtccgacgcctgtcccatccagaccagcgcgtaaatgccgggggcatccagcgcgtgttcacggtagatcatgcccgccctgcgcaggcgcagcacggggtcggattcgtcaatggcgatgagctgttcgcgcagatcggtgaagtatgcgtcgatgagcgcatcggacaccgcctgcttgccgccgatgtgctggtagatgctggtgggcgacacgtcggcctgcgcggacagcgtacggatggtcagaccgtccacgccgtcctgttccacgatccgcctcgccgcgtcaagaattcttccgcggatttcaagggttggcgtgcgtctggatcggggctgcgattgcgtcatatccgttattctagggtgcgtacaggccattatcgccgttttggcatggccacgatcgcaacgaccgcggcgataagtgcaatcgtcatggccgccaggcagacgctgtgcagcccgtccatgaacgcggatgcgaccgagtcatccagcaatctgcgcagggtgcccggcagggagccggaaatggattcggcagccatcacggattccctggatgcgccaaggatgtcctggggcaggtaggatcctcgcagcgcgtccgtcaggccggtggtgtacgtaccggcctgcagcgaccccatgatgccgacgccgagcgtgccaccgagttcgcggatcgtgtcgttgacggcaatgcccatgccttcctcgccgaccggcacggccgtcatcagtgtgtcggtggcggtccctggacaagggcgatgcctgcggccatcactgccatgacggccgcgaacggcagtgtggcaatcgccatctcgagcgccgaacacccacgcagcgcctggaaccattaggtcgtgaggaagatgaaaccgaacaggcacaggaaggcggcgccaatggccaacgtgccgatgacggcgcacaacccagaacacgctatcccatgcgaaccgttgcagcaggatgccgccgatgaccgggccgagcgctatgcccaccccggatgtgccgacccgcagtccgacggccagcccacgcataggcgatccgtcgaacaacccgatgatggatggcagcgtggctcccatcaagttgtgtataaatataacatatttatgaaacattgatatacatcatgtcgggaacaggcatccgcatcgaaaacaccgacctacaacacaatcaggcccgacgaccatcaaaggtcgtcgggcctgattcatacgcgctgtcggactaacggcgtccagacttcatacggaatggcgcattattgcgattcttcttggaatggcggtggttcgggccttccgtgttgccgtatttggcgatcatgcggcgttcgtgacgcttggcaccttctgaacgctcgtcgcgtacgatgcggttctcgttcttgcgatggatgcgcttgtcgaattttccgcccttgccgtaccgatcattgcgacggttcttgccgtactcgttgcggccatcgtcctggcgctcgtcgtaacggtttttgccgtatccgccgcgacggccgcccttacggcggtcatcgccatgctcgaacagatagtcgcggcgctcggcctcggggttgctcatgccggcgcggcgttccgcacggttgcggttcttcttcacggccttcttgctggccttgtcgccgtgcttgcgctgcggctcgccttcggcaacaaactcgccgcctgcgttctcgtgctggaatccggtctcggcaacgttctgctcggcgcggtcgcgattgcgattgtgcttgcgcctgccgctgcggccggactcatcgcccgccgcgttcttggcgcccctgttcttgcccttgcgcgggttgcccacgggctgcgacttgtcgaggctccaaccatccacgcgctcggcgcggtcgcccacaagctcaagcacttcgggcgaatcgtgggtcacttcgatcatcttggttttgatgccggcctggttcagcaagcggcgcgcctcgcggcgctgttcgggtagcacgagggtgaccacgtcgcccgccttgccggcgcgggcggtacggccggagcggtgcacaaaggacttcgggtcagccggcggctcgacctgcaccacgagctccacgccgccgacgtctatgccacgggcggccacgtcagtggccaccatgacgcgcacgtcgccggaatcgaatgcggcgaggttgcgatcacgctggttctggttcaggttgccgtgcagctcggcggccggaatgccgttctgcgtcaggttcttggcgagcttcttggcctggaacttggtgcgggtgaacaggatgcgacggccttcgcccgaggcgagcacgcgcacgagttcgtgcttgtcgccgcgcgtggtctcgaacacgtggtgggtcatcaggtcaggttcggtggtggccgaatcgacctcgtgcaccttgggatcatgcaggaaggtgttcaccacttcatccacgccgtgatcgagcgtggcggagaacagcatgtgctgggcgtcgggcgaaatctgctcaagcagtcgcttgaccggcggcaggaagcccatatcggccatttcatcggcctcatcgatgaccacgacttcgacggacgagagcgtgagcgcctgctggcgcagcaggtcctcaaggcggcccgggcaggcgaccacgatatcggcgccggccttcagatcgcggatctggtggatgtacttgacgccgccgtacaccgtggtggtgttcatgccgaacgtgtgggccagcggcatcagcacgtcgttgatctggttcgcgagctcgcgggtgggggccagcaccaggccgcgcgggtgcggcaggaaatcgtcagcgcggcgctcttccaagctggccttcttgcggcgcttgatttccttgcggaactcctccatcgcgatttcgccaagcgaatcataggagccaagccgggtgaccagcggaatggagaaggcgagggttttgccggagccggtgcgccctcggccgagaatgtcgcggccggccagtgaatcgggcagggtgtcggcctgaatggggaatgcggtcttcttgtcatctgccgcaagtacgcgcaccagcggtccgggtacgccaagttcgccaaaggtaagggggcgggattccgcgctgtcgttcatctggaaatcagcggaatcgtcacgatcatcgaaattattacggggcacagtggcctttcatgtcaaaggttacgcaaattacgcaagctttccgagcttagcgtaagccccctactttgcttgatgctcgccacgctgtcattccactctttacttatgaccccatggggcggtaactcgcccatgaggcggtaactcgcccatgaggcggtaactcgcccatggggcggtttgaagaaattgtgaaaccgcagaataaagccattttcacctaccgccccatgagggttttaccgccccatgggatgtttgccgccccatgggccaattaccgccccatgggttctaccaccacgtaaggcgagcaccgccccatggaacacgcaaatggcccctacccgtgaaggtagaagccattgtgcaaaagggctgagccacaatacggcccagtagccctaaaacacactacaaaatatccggatcgtctttggcgatagtgccggttgccttgccaatggccttcaggccgtggtaggccacaagaatcacgatcgtgccaatggcaatgccgttgaaggaaatgccaccaacagtgaacgcgaattggccgatggcaataatcatggtgatggctgccaccatgatgttcagcggcttgtcgaagttgaccttgttctcaacccagatgcggatgccgatcatgccgatcatgccgtacagcagcgtggtcacgccgccgagcactccggcggggatcgtgttgatcacggcgccgaacttcgggcacaggctcaggatcagggcgaaggcggctgcacaccagtaggcggcggtggagtacaccttggtggcggccatcacgccgatgttctcgccgtaggtggtggtgccggagccgccgccgaagccggcgagcgtggtgcccaggccgtcggccatgagggcggtgccgatctggttgtcgtagtcgcggccggtcatctgggccacggacttgacatggccgacgttctcagccacaagcacgagcacaacagggacgaacatgggaaggatggaaaaatcggcctgcggcaggtggaacttcgggaagccgatccatgcggcgtcaccgatggcggagaagtcgacctggccgcggatgcaggcatatacatagccgatgattacgccgaccaaaatgttgaggcgacccagcaagcccttgaacagcacggccacgagcagcacggccagcagggtaaccagtgcggtgtccggcgcggcttggaagttggtccacacggaaggtgccagattgaaaccgatgatggccacaatcgcgccgttgaccacgggcggcatgatgatgtcgatccatttggagccggcgtaatgcacgagcacgccaatcagggccagcagaataccggtgaccatgatgccgaagctggcgaccgcaatgcccttgttggcggtggtgaccgcggtgatcggtgcgatgaagccgaaggacgagcccaaatagctcggcagcacgttcctgttgataagcaggaacagtgcggtggacatagccgtgaagaacagggtggtggacgggtcgaagcccgtcagaatcggcaccaggaaggtggcaccgaacatggcgatgacgtgctgtgcgccgataccggcggtgcgcacccaagtcagacgttcatcgggctcgacgacctcgccgggcgccagcgtcttgccgtcgccatgcaattgccattggaagatattggacattactactctcctcgctctcgcttggggcacggcattcacaaccagccgcactacgcgccattctagctcacgaagattttgtgaagtctctcttccgggaaaggctatttgccgtaatactccagcaggtgcggatcgacggcctgcaccacatccaccaaatcgccattggacaggtacgggcgcttgaattcgcgccacggctccaccttgacctcccagcggccggtcgtctcgtcgagcacgggccgggcggtctgctcccagcgcacacgcttggaggtgcggccggtttccgggtcgcggcgcgtgtagtgcaggcaggtgcagttggtgatcttccagtcgtccgagtcggcgcgatgcaggaattcctcgtcggccagatcctcgatggtgagcatcagggcgagcatgaagtcgccgtgggtgaccatgaccacggattccgaatcggatttgcggctcagcgaggtcaggatgttatgcacacggtcctcggccacatcggcaatcgactcgcctgccggcggacgccagtacagcggatcggtattcttgaagttccagttgcgtgcgtagttgtttttgaattcgtccttggtgatggtgttgatttcaccccaagaacgttcgcgcagcacacggttctcctcccatttggccttgggcagggccatggtggctgcggtttcgcgggtgcgcacgtatggcgagaccatgtaacggtcgaacagctgctgctggctgacgagccagcgtccgatgcagtcggcctgcttgcgtccggtggcggtgagtctccaggagcggtcgggtacggtgacgttgtcctgcgtatacagggagttgtcgccctgttcgcccgcctggacgatgacgttcgcttcggattcgccatgccggattacgtatagatcgagcggcatgctcatatggattcctctttcgttattggttacgttgtgttgttttctgctgtttcctacttgacctgcgtaatggtgttccccttgaccatgaacgcatgccgggccatgtcgatcatcggctgatcgaacttggagtcggtgtagaactcgtcgatgacggcgtccggaccgtacagttcgcggaaccgtttggtcttgttggtgttgaagttgaggtacgtgaccttcatcgtctccacatccacctcgctggccacgagattcctcacgccgagtctgcggcaggcctcccccaccgtcagaccgaaggatgcggtgaggatcacatcgtccgactcaggctggtaccaaggcttgatacgtgcgtaatatcggtcccagaaatcgtccacgagctgttcgacgctcgccacccgtttggatcggctcagttccgtgagatagccttcggtcatcttgcccacgccgtattccatttgttcaagcgtggcccggccaagcttgtatttgaccgcgtaccgcagcacgggggcgatatagcggaacactttcgggtcgtggcgggcggaatacaggtacaagtcgaacaggctttcgccatcatagatggttccgtcgaaatcgaatacgcgcataccttctgcttctactctgttattccttgtctaaggctaatctcggtaagccggcgaaagcgcaaatacgcagtgaatttcacatgaacactgttttttggattgatttcggtacaggtaacgtacactggtgacagcgtggaaggaggtgcgtaatggcgacgtctgaaatcgaacaatggtggattgataagtttcaggagaacctgggtccgattcgcaaggtagccggatggacgactcagcaactggccgacgagctgggagtcgcgcgacagacggtgtctaacttggagaccggcaaaagcccgatgaccaagctgcagtatctcgctttacgtacggtgttcagcgccgagatcgcacgtcgtgaagaccgcgatctggcacgcatcatcaagactttggtcgacgatcccattgagcaacgcattcgcgaacggcgcgcccaagagcaggacggcgaggccgttgccgacaatgccccaatcaatacggacggtggcaacgttgccgacaacgccgccaccgagaaatgcaagcccagtgccgccacattgaaggcttcaaagactgccgcaacgggcaagcccacgctcagcacggcgatgcaggctctcgccgtcatcaccggcgcattggccagtggaaccgccgccggcatcatcacctacttgatgttcccggacggcggcccgaacaagcgctgagtcgccgaaatatcgaatccgttactcgcaggccacgccatcgtgatcgcggtccaacttgccgttgtatccaggctgcccttgatacaacggagcagcaccagccgcacggacttcagagcaattcgcataatgcacgttttgctgcgcttgctgttgctgctgtgcctgtcgagcggcctcctcagcttgccgctgggcctcggcctgcgcggcagcctgttcttcagcggcctttcttgcagcctcttcttcagctgccttcttggcggccgatatatcgcaccagcgtttccttcattatcaactatttcgagttgcatgaatgcgccgtttataggccgagaatttcgtgcttttttgcatcaaattcttcttgggagagaatgccgatatcaaccaattccttcaattttttcatcgcctcgacttgttcttccacagacatggatgccgtgtgagaggcgggggcagcggcttccggtgccggcgcaggcgccggcgcttgaaccggggcggccgtcataggattaatggcttgtgccatattcatgcccagcaacatgccaccatcgccaaagccgttgtcttggatgccttgcgcaatgcgctgctgggcagccatattgccagcttgctgggaaacgccctcgtatgcggcaacattcatcttattcgaggcgaactgctgcacgagttgacgtgattgctcggtgaactcgatactttcgatgcccacactggacacttcaaagccaaaacgatcattccacgtacccgcattggcccgatcgccacgcacgcatgctgcgatgtcattcgtcttgccgggcaattgcgaaatacgatattcattggacagcaaattgatggccacaataaacgactgtacgaattcagacagaatctgcctacgtggcccttcatcatcgaatgaatacgacacggtagtggcaggcacaaagttacgaacgaatcgaactggatcagtgacctttagcgacatggatccgcgtgcgcgaatttccaaatcgacgccatagaaccggtcgttatacaccagcggcgcagaagtgccgaatttgatgccacgaatctcacgcaggttgacgaaggccacatatttggtgcggccaggctggcctccgaaggtgaatcgatcggcaacctgattgaagaacgatccgatgccgtctccggcgagcacactctgctccccgttgcgatattcataaccgcccgactcggtgatgacgttttcgatacctgtttcagagaaaatgaacgccgcagtattctctggcacatagatacgcgaaccattggtgattattccctcggaaccgtattcattcgaaccgcgatcgttgttgcttccgcggggaatgcccggcacaacgacggtgtgttccgtgaacggaccagcggtgatgatatcacgccacaggtccgcgaatgtaccgccgagcgcgccggcgaacgccttaataactgccatctgttttttcctcgatatctcatgcatatggccgatcttgcgactatgcaatcgcaagaccggccgttatgctggcatgttggttatagctgcgtttcgcgatcgcagtattcgcatcgaacgacttctttgcgatgaccggaaagcggagcgccacaaccttcgcaattcaccgaaaccacgggttcggtaataccaagcccactacggaatgcgccaaaagtgtccttcagcgccccggccagagcctccgttccggggatggccttgttgaaggccggctcatccattggcgtatactgtctgccgcgtatacccatataccgtcatcgttcctttcttggaaaaccgttacctcgatacgccagtctgatcactggcccaccgatgcgagcttctgcatgcatcgagtcatgacctcggtgtagtaggccgaatcctcactgctgagggagttttcgtcaatggcgtctaccttctgggagaactcagagtaacgcttcatcatgctggcatagtcggtagccatgctgaccacgttgtcggatttctgatatttgttcatgaaggcaacatactcatcgataaaggcctcgtagctgtccatcgtggccttgaagtcagcactgtcattggtgttctgctgcgccttctgatccgaagactggtcgctctgcttgttggcatcgctggaatcagtgcccgtatcagtgctcttatcatcctgcttcgcggcgtcgccgtccgtagacgtatcttccttcttttccggaacctggatagtgatggacatgatggtctcatcgtcagtgttacgagaaacgctcacactgtatccatcggcgttcttggcattgaaactgtcagcggacttgctatagtccacggtgaaaccgttgtcttgcacggacttgacgtagtcggcatactgcttggcgtcggtaccgcacacctcgatggagaaatagtccgaagactcgcttctaatttcaccctttgtggatttcggctgcggcagcagcgccgcgatatccgactccggccatgaatatgcttcgcacttggtggcgagcgatgcttccaattccgcccgatcagccttggccttcgcatcgtcacgaattacgaacacgccaccgattaccagacccacaacggtgataccgactgccacccaggccagcactcggccttgcaccttgccactcgggcgggtcacgtatacggcgaagcctgagagcagtgccggaatcaccgtggcgaacagcagtccgccccaggatcggccagaaacatccacaaattgggcgagtacgaacaacactccccaaataatggcgaacacagccagcttggaagtcttcttcaccccttgtgcattcggagcaagcacggcaggcgcagcggcaccagcaaaaccagtggcagcaccggcaccatgtgtggcgggtgcaggagccacaccaatacgcttgtccagagcggcgaggaactcatcaacgcgcttggcgctttcgtttccagtcgcctccagacgaatggcggcccctgccgcaccctgcgggactacggttagcgtgcagttcaccccatcataggagtggaaggaaaacgctccggtctgggtgttttcgttatccaaggtaaacgtggcgccagtagtcagctggtcgtgaataacttggaacagctgttgcggactgaccgcatatacacgatcaaatggcgcgccggcgggccgctgcgatgccgtagccggagtcatcggagtggtggtagcaccatcagacgctacgttcggttggccagccggtacagtattcggcacggtaggcgcattcgcgcgatcttccggtgcgtcattcgtgccttcggacggtggaaccggctgaggttgttgatcaaatggcgttgtcatgatgcccttctttccttaagcagcagcattaccagcacagaagaggcaagcccggcaaccgttacggtcaatccgactgccatggcaagccggtatcgttcgctcatcattgcgtcccttcttattgctcgctttgctctgcgatacatcgaaccagtgtatggcgttgttattatgtacgcaaattagcattttgtatgcatgttagctttattgtcgatgcttgataccgcgcatgaacatcctttccgccaccgcacctacacggatggcatcgaccattgtcggcgacacgcgcgggccatacatcagctgacaactgaatttttcggcgtgtttccgaaaagtcggcgtcctgtacgctgggaatcgagcaaccgcgtacgatggcgcagcacagcacccgcaacacagcgacaaggagcatgggcaatggcagacatccccgaagaacatttgaccgaggaactgttggatcggctgctcgccagcgccagcattgagcagtatctcgatgagagactcgtcagcgcacgcacgctgaccgactatctgttcgaccgtatggaagcccatgacctgagacgagccgacgtggtgcgggcatccggcctcaacgccacagtggtttatgacattttctccggcaaaagccgccccggccgagatcacgccattatgctggcttttggtctcaagtgcacattacgtgaaacccaacggctacttcgtcttgcaggcgtttccgaactgtggtgcaaacagcgacgcgacgcgattatcatctggtgtatacgcaatggattcgaccgcatcgccacggacgacgagttgtatcgtatgggagaggcgacgttgctaccggccgattgacgacattcggcccaacaacactcaccagtgagacgcaagtaagagggcatcaaggagagacatggacgataagcaggcgatgcatgcgatgagcatcgacgatgcgtaccatgtcgagcgtacgctcgctcgcggaccttccggcgtcaccgaactggtgagcattgacggcaacggcccgttcgtacgcaagaagattccctctcccctagcgcaacgcaatgtgtgggcggcgctcagcgcctgccagagtaatcgtctgccgcgtgtggaagcgacgtacgagctgcccgaccggttcgtcatcgtctacgattacgtgccgggcagcacgcttgcgcaaattgcggaggaaaacgggcggcttgcaccgaatgtggccgtgcagcttatcgaccaaatttgcgaagccgtgcaggagcttcaccagcacggcgttatccaccgcgacatcacgccggccaacgtcatcgtggcccaggatggcgcgcatctcatcgatttcggcatcgcgcgcatccggtcagaggcaagcaaccgttcacgggataccacggcgcttggcacctacggattcgcctcgcctgagcaatatggctttgccaaaaccgacgcgcgttccgacgtattctcgctgggccggctactcggattcatgctgaccggcgtatatcccgatgccagcgactacgagcagcgacttgccgatgatgccgcagtaccggctcgactacgcgccgtcatcggctatgcgtgcgcattcgagcccagcaaacggccacagagcgtccaagagtttcgccaggcgctgttctcccagtccaatccgcccataccgaacgcatcatcggcaaatccgccatcaacgagaacaacgaacggcagcgcgtcggcgtctcgactattccggcgtctgcacttgagcaaacgcgccatcgtgctgtggtccattgccggagcggcactgataatcgccgccattgcgggaggcattgtgttggcaggccaacttggcattatcgggtcggcaacatcacccgattcctcgacacaatccagcagccaatcaaccgataaggccgatggcgggcactcctcgaacgggtcaggaaccgacaatgccaatggcacgggcggagtaggcggcactgacggcgctgatggagacaatcaagacaccgtcaccgacaatcctctgaaaatagtggaatccggctggtcggcggaccagcaagggtatgtccactacgctttcgccctgcgcaacaccagtaagacccagcaggtgcagtatccgcagattaccattacggggcgggccaaagacggttccatcgtgttctcgcagacgcaagcactgaatatggcattcccgaatcagactgtatatgacgccggtcaagcaggcgaaggcaccgccccagaaacggttgattttactgtgctcaatccggatacatacaacgtcgccaaggctcagggaaccgccgccttccccatcagcggaatatccaaaatagacaacagggacggcggcacgacgttcaatggcgaggtccgcgccgtggcagatggattcaagccatctgatggacagcaaatcaagatttccctagtactgcgtaacgcacagaacgcaatcatctatggagatatcgcattcgtggattggccgggcaatggccgatccacgccattctcgattaccgtctacgatctgccgaagtatgtgtcttacgatctgtatgcgcaaatctggtagttgactttacgtctggcaggtggccgtcaggtgcctgtcaggccgctgttcgcgtcacctgcgcactgacgttacggcgcgcctggccgaacagatagatgccgatgggcagggtcagaacaccgccgatgatgaacaccagcgaaatcgggatcacgtcggccagtggcgcgaagatcaacatgccgagcggcattccgagcgtgctcagggtggtgtcaaggccgaatacacggcccaccatcttctcatcggcctcggtctggatgatggtgcgcatcgggcccacgcagatggccgaagccaaaccgttcaccacatcaatcagcaaatacgccagcagattgtgaaccacgccaagaccaacgacggagacgcccaccagagcgatgccgaaggcgaccacgcgcatgttgttgcggatgagcttggcaccgatggtagacatcagcgcgccgccgagcagcataccgatgctccatcccagctcgttggcggcgagtttatcggaggcggtggtcaggttgatgaatccgagattcaaatcgatgccctcatattcgcgggtcatgagcaacagcgtaaggttcatcggcgccacggccacgaagcacaccaaggcgccaccgagcaccacgttgcgcaggttcgcccggcgccatgtgtagctgaaaccatctttcaagtcagcaaacacacgacggacgctggcaatcagcgaacgatcagcattggcatccgacatcggttcgagtgtgggttgcccgctattctccgcttcagccatacgcctcgcaacatgttccgcgctcttcttcggcgctttgatcaacgccacaaagccgacgccgataatggccgtggtcacatcgactaacagaatcgaccacagcggcactgtgttgataagcacagcagccaccgcaggtgccacaatcatattcgccgaattaatcacgccgtatattgagttgacgcgcaatagtttgcccgagggaacaacatccggtatgaacgactgcacagcgggcgtctgcaccccgcctcccgccgaacgaatgaacagcaccacgaaaatcatggtcagactcgcccatcccatcgcgaagctcagcgacagcacgacggtgaccacagcaatcaccatatccggcagcataatcagcaacttgcgactgtgacggtcggcccaggagccgccgaaaatcgagacgatggcctgcggcaccacgccaaacaacgtggccagcagcatggccgaaccggttttagtctgcaatacgatccaccaccagatggcatattgcacaatattggagcccagcagcgagaacgcctggccggtgagtagaagcactacacggcggatccacgcacgctcggattccccgttggccactgctgcggcataggcggcaccgggtttgttcgcgctatggaccgctgcgcgcgcattcgcattgtcatcgccggaaacctcgggtgtttcgcgcacagttggttcagttgttgtactactagaagacatacgagtgttctcaattcttcaattccactacaaaggtcacatcacggcatacgcacgccgacgcgcgtatgcgtgcacgactccagcaacgagccgtacccgccgttagatggcaggcttcagtatcgtgacgccatgcgttagcgtcac

SEQ ID NO: 4 - DNA, 21682 bp, Unknown
  R30_18m  MAG No. k141_489
ctgggtttgagccgtgaggaatccaagcgcaacatcatgcacctgtcgggcggccagcgtcaacgggtggcggtcggccgcgcgctggtcgccccgggccgcgcgatcctcgcggacgagccgacgggcagcctcgacccggagatgaccgacgaggtgattcatctgctgcagcatgccgcccatcagctcggcaaatgcgtaatcgtggtgacgcattccaagcgtgtcgccgactccgccgatgtcgtgctgcgtctcaggagcaagaaactgacccgggcgtgacccacctgggccgggcggcacccatacaccgcttcggcatttcggcaccccggcgaccgggcactccggtatcccggcccttcggcattctggcacccccgcgctccggcaccccggcgacccactcgcgttgccggggtgccgtattcgctctgcgccataatgtgcgtgataatggaatcatgccagtgatgaatgatgaagtgcccggcgaggttgaaccgcaccccgattgttggactggagtaatccagattcgatgatcggaggtgcggttcaaaaggcccttttttgtgtcggattacgaaccgcgcgtttcaccgcttgccgttgtagatctcgttgtcgatcacatcggcgaacacgcggttgacggccgggcgcactaccttcagcgacggcgtcaggcacttgttctcctgcgtgaactgcgtgcccagcacggcgaacttgcgcacggattcggcacgcgagaccgtcgcattcgccttgtccacgtactgctggatctcctcgcgcaccgcggcgttcgtggcgagccggtcgaccggcgtctccgtggacaggccgtgcgcgggcagccaaatggccagcgactccgggtcaagtgtcaccagcgcgccgatgaacgggcgctggtcgcccaccaccacgcagtgctccacgatcgggcacttgacgatctcctcctccagcggaatgggggagacgttcttgccgccggcggtaataataatgtccttgattcgaccggtgatgatgatgcggccggcgtcatcgatctcggccaagtcgccggtcctgagccagccgtcggcggtgaacgcctcggccgtcttctccggcagattgtggtagccgcggaacacgttcgggcccttgacctgcagttcgccttcgtcggaaatgcgaatcgaggagccgggcgcgggctggcctacggtgccgatcacattgtcggtcacgcgcgtggcggcgaacggggcggcggtttcggtcatgccataaccctgaatcatcggcagaccgatgccgttgtagaaatgcgccagatcaagcgaaagtggtgcgccgccgcaggccacatacttgatcttcgggcccagagcaccgcgcaccgtgcggtagacgagcgtttcatacttggcgcgctcggcgatttcggcaaacgtgtgctgctcgccggcctgctccttgcggctccagacgcgcgcagcctcggcggccttgacaaacaggcggcccttccagccggcaccggccttgtgcgaggcggcgttgtacaccttctcgaacacgcgcggcacgcccagcaggtaggtcggttcaaacgaacgcaggtccggcagcagggacttggtgtccggcagataaccgaccacgccgtcatcggaggcgatggaggcgtactggataaatcgtgcgaagcagtgggccagcggcaggaagagcagcaggcgcggatggtcgtcgagaaccacctcatgcaacgcctgcgaggcggcgatggtgatggacacgaagttcttatgggtcagttcggcacccttcgggttgccggtggagcccgaggtgtagacgatggtggccagatcgtccgtgcgcacggtggccacgcgctcgttcagttcctcgtccgaaacagccacgcccagaccttcgagcgcgcccagtgcgttgccctcgatcatgagaatctgcttcaaggcagggcagtggtccttgaccgagtcgagccggtcgaagcgctcgcgattgtcggcaaaggccagcttgaccaccgaatcgttcatgatgcgctgggcctgcggggcggagtcggtgtcatagatcggcacgcttaccgcgcccaccgcggccagtgcgaaatcgagaatgccccattctagacgggtggaggaaaagatggtcaccgcgtcgcccctggcgatgccgagcgcgatcaggcccttggcggccgagaccacgcgctcgtggaattcgccggtggtgacgttctgccagcggccggggccgattttcttggcggcgattaccgtgtccgcgccggtgcgggcaaggcgatcggtaagtagggagtagatggtctggttgtcgcggatttcgatggattcgccaggcgtggtgtagtggtcaagcataagcgggccgtgtccttacgtgcgttgcgtgatggctgttgacaaaatcgagccattctgacaagttaggttacgctggcgtaaggttgcgcgcgttgtgggcaatggagaagttgtctgtctggttttgtggattgtatacaacgccgtgtctaaccggtttgctctacggttatgacaccgtgtccatttcgggagccatcgacttcctgcaggacaagtacgcgctgagcccggccctgcagggtctggtcatcagctccatcatgatcggcggcgtgatcggcgccggcttctccggcttcctgtccgataagtacggccgccgccgaagcactggtcgccgcgcaaaaagcagcactaggccgcgtttgctgcgtctattggcgaattgatcatatgggtcgtctgcgtgcagacgacccttttgcgttccgtcggcttctgacaccgtagaaacgtgctttctcggcttcgaggggctgattttgccttatctggaagtctacttccacttcgaggggctgatgcccaagtagacacggccctaaaacggcggaatgacgttgacgtgtagccgtttatacttccgattacatggatgaggagcccctcgaagcggagatagacttccggcaaatgcgaaatcagccccttgaaacggaagtaggcctccggcaaacgcaaaaattagcctcctcgaaacggataaatgcacgtattgggtgtagtggatgcttcagcccctgatatcgaagcatattttttctggttggcgcgtctagcatgcgcactccgcaatcgataattctgtggcctctctcactttaaaagtctggcgtgtgcgagggcgttcgcttaaggtgaatgggattgcgaggaatgtggagcgcagggtcatgaccatgcgcgtgctgcagatccagctgcgctcgctgaccgccatggatatcgtggcctacggcggtgcggcggccggcattggtgtggctctatggcagtatgcgcataccaccgcagccgccgcaggagccagcaccgccggctggtcgccgatcatgctcgccgcccacctgcccggcgcattcgcctacctggcctacggcctgcaatacctgatgccgttcggtgcgggcttcccgctcaccctcgccggactgctgctgattgtgctgctgtccgccgaattctttattcccatgcgtcagcttggctcgttcttccacgtggcgatgaacggcatgacctccaccaagcgtatcttcgctctgctggacaccccggagcccgagcatggcacggcgaccctgccggccaacgattccgattccgctgacgacggtctgacggtccgcttcgaccacgtcggctattcctatgatgatgccgggcacggcgactccaagtccgcatccgcaaagaccgataagcaaggtgaaaccagccccaattccgccgtcgctcctgcgctcaccaacatcaccttcgccgcacggcccggtcagttcaccgccattgttggcatctccggttccggcaagtccacggccgcctcgctgctcgccggtacactggccggttaccgaggttcgctcacgctgaacggcgtcgaggtatccgatttgtcaggcgaaacactggccggagccgtcactgtgattggtgccagcagccatctgtttgcgggcgcattgcgcgagaatcttctgatggccttgcccgatgacgagattcctgattcgccggattccgtggactcccgtctgtggtccgcgctcgagcaggcgcgcattgccgacttcgtgcacgcacagccgaacggactgggcatgccgattgagtccgatgccgccaacctgtccggcggccaacgccagcgcatcgccatcgcccgcgcgctcctgcatgattcgccggtatttgtgttcgatgaggcgaccagcagcgttgacatggaatccgaagagctgatcctggatacaattcgcgaattggcgcaatcccgcggcaagacggttattatgatcacccatcgcatggccaacgccgaacacgctgatcaagtggtggtgctcgaacacggcaagtcggttgagaggggcacccataccgagctgatgacggcggacggcgtctacgccaagctgtttaccacgcaggcagatattgagaacttcggagaaggccatgctcggcgtgtgctgcaggttggttcccgcaagcaggagctgtccgacgacagtcggactgagggtggcgcagcgcgcgtaagcgcagaggcgggtatgacggttgaccgcctgcagtcagctttgccgacggcttccgttggcgggagtgagcaggcctcggctgagactccggctggtgttgcaaatagcgattcgtcttccaaaatgagcacattccaagtgatcaggcgactgcttaaggaagcccgacctctggcaggactgatggcagcggcctccaccgccggcaccatcggccatctttcggccactttcctgcccgtgttcggcattatcgcggcatttgcacttaccggtaatccggtgtggggcatgggtgttgcgcccgccgtcatcatgatgattatctgtgctcttctgcgtggcatcacccgatacattgaacaatatctgaaccacaatgtggcattccatctgctcgcactcttccgttccaaggcgttcgccgcgttgcgcagactggcgccggccaagctcgcgggcaaaggtaagggcaaccttatcgccatgctgaccaccgatgtggaactgcttgagatcttctttgcccacaccatcagtccggtggccatcgcggtaacctccaccatcatctacacgattgtggccgccgccctaagcccatggatggcgctggcgttgattgccgcccacctggttatcggcatccttgtgccgcgattttttgccaccggcgtacgtaaccttggccctgccatccgtggcgctgccggagaactcgacgatgtgatactcgatgacatgcgcggcctggacgaaatcatccgatttggccgcggcgaggaacgtgcgcaggccatcgaggaccgtacccatgcgttgtggaaggatcacaccaaactcagcaaggtcaacggccgtttcaccggaatcagcggactcttggtggctgtgctcacagcggcttcggtcgccgtggctattgcctgtgccggcgcgaacccgcagagcattccggctctgattgccgccttcgtgctgttcgccagctcgttcgaaccgactttggcgctcgccgccttgcccgctaacctgactcagaccttcgcgtccgctagccgactgttcggactgatggacgaggtgcccgctgtgaccgagaacggcactgttgtgccgcaggagtatatggacatgcgtcttgatgacgtcacctttgcatatgcgggggagcatgaagtcctgtccgacttctcgcttgacgtgccgcagcatggcgtgctgggtatccaggggccgtccggccgaggcaagtccaccatgctcaagctgctgctgcgctactgggatccgcagcgcggtcaggtgacgttgtccggcacgccgttgcccgaggtcgatgtgcatgctcgccgacgtattcaggccatgatgagccaggaaacccacctgtttgatggctctatccgagacaatctgctgattgctttgcctgagtccgaggttgaagctgcaaatgttgcaggcaatggggaagtgggtgccaagaccgttgattcccgacagcagcagttggcggcgcaatcggcagagggcgatgccgttcaggtggcagcagctgacggtctcgatgctcgtttgcgtcaggctctcgccaaggcctccgtgcttgatctcatcgattccctgcccgatggccttgatactcaggtaggcgagttgggcgaccgtctatccgaaggtgaacgccagcgtatcggtttggctcgtgtgttcctgcgcaatgctgatctggtgcttttcgacgagccgaccagccgtttggatgctttgaacgaggctattattctacgttccattcacgctatggccgtgggtgagcagcatgcagacaaggagcgcggcgcggctgtggtgctggtctcccaccgcgaatccgccatgcgcattgctgatgcggtactcaatctgtaactgcctgtaactacgcgggaatcgcatcgcattgcgttacgttaccgcgttgcattgcggttcctcgcgggtggcggcgatgccatctccggtcgtcattgcgttgctgcgtttgtgttgcgatatgtgatgcggcaacgcagcaatgcggcaatgcaatgtgatgtggcaacgtggcaacgtagcgatgcaataacgcggtaacatggcaacatggcaatgcagtaacgcaacgcagcattcacgccttgatcaaagcgccgatgacgctgtcgaacgcagtgagactgaggggagccaaagcccaaaaccggcaaacacagcaccggccatgagccgatacaataaaggatttgattaatatgactactcatagagcatttaggtggccgtccctgctgacggaatccggccgcggcatcgcgttcggcggcgactacaacccggaccagtggcccgaggagacgctggacgaggatatccgtctcatgggtgaggccggcgtgaacgtcgtatcgctggcaattttcagctgggacaagatcgagccggtcgagggcgcgttcacgttcgagtggctcgaccatgtgatcgacaggctcggcagagccggcatcgccgtggacttggcctccgccacagccgccgcgccgctgtggctgtacgaatcccatccagaggtgctgccggtagaccggtatggtcataccgtcaacgcgggctcacgccagtcgtggcagcccacaagcccggtgttcaaggaatacgcgctgcgcctgtgccgcaaacttgccgaacactacaaggacaacccgtatgtgaccgcctggcacatgggcaacgaatacggctggaacaaccgctacgactactccgacaacgccttggccgcgttccgcacgtggtgcgaggccaagtacggtaccatcgacgcgttgaacgaggcgtggggcacggccttctggtcgcagcacgtgaacagtttcgacgaggtgctgctgccacgtcacatgggcggcgacgccatggtcaacccgtcgcagcagttggattacgagcggttcggcaacgacatgctgctcgacttctacaaagccgaacgcgacgccatcgagcagatctgccccgacaagccgttcaccacgaacttcatggtctccaccgaccagtgcgtcatgaactacgccaaatgggcggatgaggtggacttcgtgtccaacgatcactacttccatgagggcgaatcccacctggacgaactcgcctgctcggacgcgctcatggactccctcgcgctgggcaagccgtggtacgtgatggagcactccacttcagccgtgcagtggaagccgctgaacacacgcaaacgggccggcgaactcatgcgcgactccctggcccacgtggccatgggcgccgacgccatctgctttttccaatggcggcaatccaagtcgggcgccgaggcgttccactccgccatgctgccccacacgggcgccgattccaaggtcttccgcggcgtatgcgagctcggtaaggcgctgaagaccctctccgacgccgggctgcagggcactgagctcgagcgtgccggcacggcgatcctgttcagcgcggaatccgaatgggccacacgctccgaaaccctgcccagcatgaaactcaaccactggcacgacgtgcgcgactggtaccgcggcttcctggatgccgggctgcgcgcggacgtggtgccgctcgcctacgactggaccggctacaaaaccatcgtgctgcccaccgtgctcagcctgtccgacgaagacgttctccgtatcgccgacttcgcgaaggccggcggaaccgtcatcgtcggctatgccgccggcctgatcgacgagcacttccacatcggcctcggcggctaccccggcgccggcaacgggctcctacgcgacatgctcggcatccgctccgaagaattcaacatcctcggtgaagaagccgaaggcgagcccagcgaaatcagcctgtccaatggtctgacgacccgcctgtggcagaacgacgtgacttccgtagccgcggacaccgcagtgcttgcctcttacgcaggtgagtccgccgccgactgggagctggagcgcacccccgccatcaccagccgcccctatggcaacggtaccgccatctacgtgggctgcgacctcaaccgtcacgacattgcccagttgctcaaagcacttggctcccgatggcaggagttgtcggcgcagccgactgagagtggtcaaactccaacctatcccaccacagatccccgcatcctgcacaccatccgccgatccgcagacggctccacccgcttcgatttctacctcaaccgctcaaaccagcccgtcgccatcaacggtgtggaaggtgatcccatcatcgcacaccgttgcgagactgacgccgttggatatacgctgaaccgcaacgccattcttatcgctaaaacgtcctgctagaccgcgctagaatggcaatgttgtccggatagaggagtgcggcatgagcgacgagaaaacagccaagcgtcgagtgacgctacgcgatgtcgctcaggccgccggtgtatcgctcaaaactgcgtcgaacgtgatcaatggctccgggcgtatgacagatgagacccgtgccaaggtcgagtcggtcattaaggacctcgactaccgagtcaacgtggccgcccgcaacctcaaccgcgatcacaccggcttcatcaccctcgccgtgccttcgctgattccgccatatctggccgagctcgccaaccgcaccatcgaggccgcccgtcagcgcgactattccgtatacgtcaccacgtatgcggaaggctccgcgaaaggcgcgcgcgatctgctgaagaagttcaactccacggtgtccgatggcatgatcctttccatgagcgaggtggaaaacatttcgcccgatgatctgaaggttgattttccgctggtcatcgttggcgcgcgtaccacgtggggcattgtggatcacgtgaccccagacgatgtatccgcagccgccatggccgcaggctacctgtatgaccgcggttccaccagacttgcagtgatcggtgcccgtgacgtttacgacgaagatgcattgctgaatgccgtagaaggcaacgcgcagctgcgtctgcgcggcatcatcgaagagacccgtaggcgtgggctctccttggatccgcagctgattggcaacaccgatcaggattggaccatcggagccggtgcccgtgtgacccagcggctcattgattccggcgtgccattcgacggtgtgattgccttgaacgatcagttggccatcggcgcattgaccgctctgcgcaccgctggttatgaggtgcccgtgcaggtgcaggtcatcggcttcgataacaacgaggaagccccctacctgcagattccgctgaccaccatggattcccgccttgactggacggctcccacggcagtggatcgcatcctcggacgcatcgacggcagcatcaccaagtccgaactgctcaccaccgaatcccaggtcatcgcccgcgcctccacacgctgaacgacattgctgtaatgctggtgttgctgtactgggccgtacgaggcgttgatacaccggttgaccaacacggcataaagtgctaaggtgacgattgagtggtacacagctgtaccgcgtggtgtataaggaaaggaagcgccaagcatcactgggcgttcgttctgagcgttcaccattcaaaggagaaaaagcatgcgccgaaataccgcgcttactcgcattatggcatccggcgtggccgccataatgctctgcgcaggaggcacgttcactgtaaacgccgccgaagaagaaccagttaaagccgacgtctcggtcaaggccatccaaggcttaagcgatgatttcatcggcggtatggacgtctcatccatgctctcgctggaagaaagcggcgtcacgttcaagaacgccaatggcgaggtcgaggatttgttcacgttgctcaaggaatccggcgtgaactatgtgcgtctgcgtgtgtggaacgatccgttcaccgcagacggccaaggatatggcggcggcaacgtcaacgccgatcgcgcactgaccatggccaagcgagccacggcagcagggctgaaagtgctggtcgacttccattactccgatttctgggccgaccccagcaagcagcaggtgcccaaggcgtggaaatcctttgaaggcgacgcggacaaaaccgccgacaccgtatacgactacaccaagcagactctgaccacgttcaaacaagccggcgtggacgtcggcatggtgcaggtcggcaacgaaaccactgcgaaaatcgccggcatctccggctgggacggcatgtccaaagtattctccgcaggttccaaagccatacgcgaagtgctccccgaagccaaggtcgtcattcatttcaccaacccggagaaagccggcacctacgccacttacgccaaacagttgagcaaccacaatgtggattacgatgtgttcgccagctcctactacccgttctggcatggcaccaccgaaaacctcaccagcgtgctcaagaacgtggcctccacttataagaaagatgtgatggtggcggaaacgtcgtgggcatacaccttggatgatggcgacgacgattccaacacagtgcccagtaaagtaaccgccgataacctcaagaaatacgacatcagcccgcaaggccaggccgatgagattcgcgcggtcgccgaggccgtgaacaatatcggcgacaatgatggcgatggcgaaaacgacggcctgggtgtgttctactgggagcccgcatgggtgcccgtgggcaccggcggcaaggataacgccgaactggtggatacgtggaacaagtacggtggcggctgggccactgaagcggccggcgaatacgatcccaatgacgccggcctgtactggggcggctcgggtgtcgataaccaagctttgttcgatttcgatggcaaggcgctcgcctctctgccgacgttcaagtacattcacaccggtgccgtcaccgatcatgtgttcaccaagatagatccagtggagattaccgcgactgactcggattccatcgacgcgattaaagcgcaattgccgagtgaggtggccgcacactatcaggatggggtggacgagaccgaaaccgtgacctggcaatccgctgcgcttgactggattcgtggcgcaggcacatacaccatcaccggcaccaccaacgctggccacgacgtgaccgtcaccgtcaccgtcaccgccactcccgccaaggattacgtaacggacggcagcttcgagaacgctgagaacgataagaactggaccattgccggcaccggtgcgtccatcaccgaagacggtggcaacgccgccgacggcaagcgcgcgctgaagttttgggcatccgatgcctacagtttctccgccacgcagaccatcaccggactcgagcctggcgaatacgtgctgaccgccatgagccaaggcgcggcagcggacaacgccgctattaccgatggtgtggccctctccgccacaacgggtggcaagaccacgtccgatgcgctggaactcaacggttgggttaagttcgataccgccaccgtgcctgtcaccgtgggtgctgatggcacagcgaccatcaccatcacgggcaacctgcctgccgacgcatggggcaatgtggacaaggtctcactcgtcaaaaagaccgaaactccggtgaagccatccacggagaacctggacaaggccgtggccgaagccgggaaaatcaatcgcgatgagtacaccaacgagtcgctcgccaaactcgatcaggcgcttgccgccgctgacgtgctgcttgccggcagcacctacaccgagcaggacgtgaacgatgtgatcaagcttgttgccgatgccattgccggcctcgcccaaaaggaggtctccagtctgaccgtcacgccaagcaaaaccacctatcaggtgggcgatgccatcgatgccgaccatgatctcaaggtcgtgggcaactattccgcaggcatgggcaacgtgacgctttccgccgaccagttcacgctcgattacgatttctccgctcccgctgatgcggcgaaggttaccgtaacgctcaagtcgaatccgaatgtcaccgaaacctatacggttgcggttaccgctcgggccgaaggtggttccggcaacggctcggacggtgcgggtaatggcggggctactatcaatcccgatacgggcgagggcgataagaccaacggtgcgaatggcgacaagatcactggtgtgctgagcaataccggtagcgcggtgactgccgtgggtcttgcggttgtcgttctcggcgtggccggcggggtctcgcttgctttgcgtcgtaagcgctcctgatagagactgatgcggcattatgatgcggttgccggcagccggcaaccggctgccagatgccatctgtcggctgtcgtttatcggttgtcggctgtcagatgcgtctgtctcggcgcagcgatgcgattctgtcccggttcgtgcatcaatcgtttgatgtgggtaccaggacagaaatcactgtcctggtttgcgaaaacgggtgtttttcgcgtaccgggacaattcccgttgccccggtttgcacgtcaatcgttctacgtgagaaccgggacagtatgttgatttcgggattggctgtattccgccgattctgtttgtcggggtatgtggactttggggattgtcttgtcctggttctcgaaaatggcccgaaattgcgtaccgggacaacgatttctgccccggtgcaaacgtcaatcgattgacgcctgtaccggggcaaattcgcgcccgggaacaatagggcgagggccggtcgcaggagtagagcgtgatgttgtcatgattgcgcccggctctcccacacggaaggccgggcgcaatcatgccgtttggttgcagcacccgcacatcgcctgcataaccgtgtacagtggcgtgtagttgcagtacatgaaggagcatcacaagccatgaccaacggacacatcaatcccgccaacgtgccggacatcgccttgaaagacggccattccattccgcaggtcggccttggcatgctacgtatcgatgacgagggcgtggcccctgtcgtcgaatctgcgctggaagccggataccgccacatcgatggcgccgccggatacaacaacgaggccggcgtgggtcgtgcgctcgccgcttccggatacaacaccggcgccaagcgcgagaccctgtgggtcaccaccaagctgcgcgactccgagcagggctacgactccgcgctcaaggcattcgacaactccctgaaactcctccagctcgattacgtggacatgtacatgatccattggcccacgccgttcgactggcgcagcaccgacacctggaaggcgttcgtcaagctgcgcgacgaaggcatggcacgcacgctcggcgtatgcaacttcatgcccgccgatctgaagcgtctgcacggggagaccggcgcatggccggccgtcaatcagattgagctgcaccccacgtggcagcagcgcgaagtggtggcgttctgcaagaagcacggcatcgccgtggaggcctactcgccgatggcgcgtggcgccgacctcaacgccggcgacggcaccatcgagaagatcgccgccgcccatgaggtcagcccggcccaggtgattctgcgctggcacatcgaaaacggcacgatcatcatccccaagtccgtgcatgccgaccgtcagagggagaatctcgacctgttcggcttcgccctgaccgccgatgaacacgctgccatcgacgccctcgacggccccacccgcgccggccacgaccccctcaccttcacctatgcgtgattgatggcacgtcgtaacgcccacttccgccgtcgtttcaacgcctctggaccgctggaacgcgtgctgattctcatcgttctcgccgtagcaatcggcgtgaccatcggcctgttactgccgcaggtcagctccgacgtggccaaaatcaccggtggctacactgccaccggttcagccgccgacactttgaacgcgctcgccgtagacgacaaccaaagctcctccggctacgaccgcgattccttcggtttccgcaccaccgacgtcgacggcaatggctgcgacgtacgcgacgacgtgctcgcccgcgatctcacggacatcacctacaaatacgccggttcctgtgtggtcgagtccggcacactggccgatccgtacaccgcccagaccatccatttcgtacgtggccgcgccaccagcgccaaagtgcagatcgaccatgtggtggcccttgaaaacgcttggcaatccggtgcgcacgactggtccactgccaaacgccatgaattcggcaatgacccctataacctgctggccgtcgacggtccggccaatcaggagaagggttcggcttccgccgcctactggctacccaccaacgccgactaccgttgcgactacgtggcccgccagattggcgtcaaagacaagtaccagctcaccgtcacctcccaagaaaaggatgccatgctcgccgtcctccatacctgcccgggccaggccgtgcccgcagacgaataggggctaccgctcaggattgttgagcataggtgcctgcccctcgtcataagcgcgcaggagccgtcggagcaaaaatgtggtgaagtatggtgcggtgaacacgtgttcgctgctaccgatattgccggcggatagtttcacgccgaactgaatttccggataagaatccgaagcgattagcgtccgcatggatttggcggtgccttttttcgatttcacctccaccggcaccagccattcgcgcgtgcggacgaagaaatcctgttccagtgtggaatcctcttttttgtagtagtacaggtcatagccggatttccgtagcgcttcagagacgatgctctcgtacatagcacccttatagacaccaagattacgattggcccgcagatcatcactggcctcgtcgtcaagcatcgctacgaacagaccggtatcgccgaaatatatcttgaacttgttttcgtcataattgcctttcaacggcagttcaggataggacatacatcggcagatattcaccattcccgaggtttcaagccattccacgcatcctcgatagtctttgaaacgcgctccgctggcaaccttgctgatttggaacttcttgttttccttggcgagttgcacgggaatatggttgaacacgttgagaattcgtgcctgatcgggtccttgcgtgtatttgcggatatcctcctggtagtccaaaataagctggcgctgcaattgcagtgttccctcgaacgtgccagtgcgtatatgggaggcgacaaccgcaggcatgccgccaagcacgcagtaatccataaatgccgtggagaagacgttcatttccacttcagagaatggcgtagcatcacacaggtgggtgaacatgctttcgatgacggcctcatcgtatccgcgagcccacagaaattcttcgaagtccaacgatcgcatttcgtagtcggtcttatatcccacgctattgctttcgatttgcttatagctgatgcccaacattgaaccgctgcaaatcacatcatatttgccgtcgattttaaagaacttcagtgcagtggcgatatcaggatgggcctggatttcgtcgaaaaagatgagcgtatcgcccggaatgaactttttggctgggtcgatcagggaaatattgcggacgatggtattcgcgccataaccgtccgcagtgattgcacgatatttcggttcctcaacgaagttgatttccactaccgaacggtagttgtgtgcggcaaagtaatcgatagtctctgtcttgcctacttgacgagggcccttgatgattagcggggagcgattcgggtcggatttccatgcattgagataggaatcggctttgcgtttgagatacatgaggagcccctttccgaattactgctatatcaatgattttacactttcatgagcgagttttctaccgtctggcacatttcatgagcgagttttcggcggtttttcacatttcatgagcgagatggcgggaaatgccagctgccagtccgccggtcatccatcaatcgtccgcagattgtccgtctgttgactcgggaaacatgcctgcgctataactgtgcgcggtatgaagggaacaggtacaaacaatatggcagtaacacacaccgtggcagataccactgcggcaaccactatgacgaacgctgtggcagacatcgaacaggaaacaccggaaatcgagaaggaacgccagcttgccggagtcggaaccggggccggagcagggacgaacaacaagaaaaagccgcatgaccatgcgctggccagcatccttggccccgcgttcgtggcggccgtggcctacgtcgatcctggtaatgtggcggccaacatcacctccggtgcgaggtacggctacctgttggtatgggtgctggtgctcgccaatgccatgagcgtgcttatccagtatcagtccgccaaactcggcatcgtgaccaacaaatccttgccggaactgctgggtgagcgtatgagcgatgccggccgattcatgttctttatgcaggctgaagtcatcgccatcgccactgatctggccgaggtgatcggcggtgccatcgccctgaacctgctattcggattgccgctgttcatcggcggtttggtgattggcacaatctccacggtgatgctgtggttccaaggtggcaagacgcaaaccacgttcgagcgcatcatcatcgtgatgctgctggtgattacgttcggcttcatcgcaggcctgttcgtagccccgccgaaccccggcgaagtggtcaaaggcatgattccacgcttccaaggcgccgactcggtgttgatggccgcctcgattctgggcgccaccgtgatgccgcacgccatctacctgcactccacgctggtgaacgaccattacgcaggcggcgaaaagccgccgatcaaaacgcaactgaaaggctcgaaaatcgatgtggcctgggcgctgttgctggccggcaccgtgaatctggcgatgctggtgctcgccgccaactcgctgcatggcatgtctggcacggactccatcgacggcgcacagcgggcgatcacgcaggtgctcggcccggtgatcggcacgatcttttccatcggcctgctggcttcgtcgctgagctccacatcggtcggcacgtacgccggctcggaaatcatgcacggtctgctgcacgttaacgccccgatgtgggcctgccgcgtggtcacgctggtgccggcactgattgtgctgtggttcgccaaggacccgactcaggcgctggtcatcggccaggtggtgctttccatcggcatcccgttcgccgtgattccgctgatgcggtacacgcataacaaggaactcatgggcaagtgggctgatggaaccgtcaagcacgtgatctttatgatcgtcgtggcgctgattgtggcgttgaacgtgctgctgattgtcctgacgctgatgggcagggcgtaatagactccagctgaaatcctgcgatagcacaacagaagccccggtgttggaaaccggggtttcttattatgttaagaatggttgaatctgccgtcagttcgcagccatacgccgcgcacgccgttcgcgcagcgcgcgcaaggaaataatgtctcgcgtacgaccggcaccgtcgcccttgacgccgaagaacaccataagcaccatcgcgaagcacagcagcgcggagaatcgcagcgcccactggatgccgaagatggaagccgcaacggctgagactcccgcctgatgcctccatgcggcgaacgtttccataagaattaccagcacaggtgcacccacggcgcccgcgatctgccgcgcggtgttcgtgaccgacgatccggcagacacctcatccggcccgttcaggcagttcagcgaccatgtggtaatcggcataagcaggaatcccatgccgatctggcgcgtgaactggcagatcgacacccaccaaatccatgtatccatagacaccaaagacatgccgatcgtaccgacggtcagcacaatcgagccgcacaacgccacgggccgcgcgccgaaacgatccatcgcacgaccgccaaagaattgggaaacacactggcctatggcgcccggcagcatgatcaggccgctcatggtggccgagtaaccacggtcggtctggatgtacagcggcatgatgaccagaatcgagctgaacgcaaagaacgccaaagacgccgtgatggtgccgacggtaaaggaccgattcttcaacacctcaaggtccagcagcggaggctgggggagtgcggccggctccgctcccgactgcgccgccttggcttcgcgataccgccgaccgtgacgcaggttgcgcatcacaaaccacacgatgccgaccagtcccacaaccatcggcccccacgtgaccggtgccgcaaatccataggtctccgaattggtgaagccgaacatcagcccaccaaagccaatcaccgacaggctcaccgagaaaaagtccgtgcgggcagacgggtcatgcgagccgaaattatgtagtccgaacatggccgccacgagcgagattacgccgatcacggtcatagtcagaaagatggaacgccagccgttcgcatcggtttgccagccgcccagcgtgggtccaatggccggcgccacgctcatggccatgcccaccgtgcccatggcgaacccgcggcgagacaggggataaatggagaatacggtgatctgcagcaccggccacatcacacccgtgcccgcagcctcaagcacgcgcccgagcagcacccagatgaagctcggcccgacccaagccatcagcgatccgaccgtgaacaccgccattgagcagatcacgatttggcgggtggagaagcgccgggtcaggaacgcggtcagcggcaccataacgcccatgaccagctggaacacggaggtgagccactgcccggtggttacggagatgtggaattcggaaacgataatcggcagcgcggaactcagctgcagctgcgtgaagttgcccacgaaggtaataaaggtcaatatcgcgatggagatgaacgccgcccggctgagtttgccgtctacatatgattcctcgcggctcagcacccgctgcaattcgccgcgacgattcttgattccctgagctccgttcacgcactcccccacttctgttgctcggcctgttgccttggcggtgtcggtggcgtatctgttcagtgatatatgcgcctcgcatatcaatgcgtattcgatgtattcggcgaccgtcgtcttcgcgtgcttggccgagcagcctctcaaagcaccccaatacgctatacccaggggtggtccagtcggttcggaatatgtgcagaagcgggggacgaacacgctttgtgcacaagaccggggcataataggcggttggttattgcaagaggttacaagtcaataagaccagtttggaagttagtatgagcgttcatagggcaagtcacgcaacaagtattccacgcagaaggcaccgcatctggccgtgagtggtgttgattctggcgctacttgtggtgctgctaggcgtgagcggattcttcggtttgaagctgtattccgaagccaagcaggtaaaggcgcatgaggaacaggcgatgcagctgctgggcggtgtgaccgacctcagtaacctcgacaacctcgatacggtgagccagcagatcagccaggcaaagaccgagaccgcggctgcgaacgagattgcgcacggcacgctgtggaacatcgcctcgaaggcgccggtgtacggcggtgacatcaccacagtgcagggtatgacttcggtgggggattcgctggtcagtgattcggtgccgcagttcatggacgtgctttccacgctgaagagcgcacagctcagctcaggcgacggtcagctgaatctgcagccgattctggaagcccagaagaatattgccaccgcgaaccagtcactgcagcagcaggtgcagaagtatcagcagctgccgaaggcccatatcggcatggtgaagaacgcctatgccgccggcaatacgcagctgaccaagatggcggacaaggtcaatcagctatccggcacgttccagattctgccggacttcctcggttccgatcagccgcgcacgtatgcgttgatggctatgaccacttcggaggaacgttcgtccggcggtctgatcggttccgcaggtgtggtaactactgacaacggcaaaatcaatattggcgatttccgttcgaatggtgaatatattccatatggtgctggtgatcctacgggagacgagcagcgcatcttccggcagtggggaccattgaacatgtcgttcgatatacgagatttggccgtataccctgatacttcacgcagtgccgaaggtatgcgcgcgatttggcagcgcacgccgtgggggagcaatactcagctggatggcgtgctcatggttgatcctgtatttttgcaggaacttacgaaaatcagtggtaatgtcactattcctgatggaacggtgcttacgggagataacactgctgagtttttgttgaacaaggtgtatgtcgattacccagtctccatgcaggacgccctatttgctcaagtcgcagaacaaacagtcggtagtatgttcagcaatgttgatttgacgttgataatggttatgccggtttctgatcggtgataatggtggatgacggcttgggcggtgaccccacatttgactgacgccatcggttccggtggctgtccttattttgatttgtcccgcccatggccgccga

SEQ ID NO: 5 - DNA, 102103 bp, Unknown
  R30_18m - MAG No. k141_952
cttgcctgccgcctcaaaatcctcgcgtgggcttctcatagacaccaatataggccatacgcctcattttcttggctcccctccataagaggcacgatgcatataggtttgatgccacatactggctcccctcagggagggaagtcacatcacttggatattcggcgatgcacgccggagagtaataagagcattaggggagcaccatggatgagaaacccatatacgaaaaatggcatatcggtgacgaatatagaaaactcatcaagggggctttggtgaatcatcatcgaaatgatcgattcatcgaatctcctatgcgtatgcgagaagtcatgcacgagttcgtggcaaaccgttccatcactgaagtcgccaacgatgccggtgtgaacgaaaccatcgtacagaagctcatcaatgatggcgtggccccatatccggacaccagacgagtgatgaaagccttaaaaattaatgcgacagctttgcctgcggaatgcgtgacggcatgaagaaaggcgacaggctcaatgtctggatgaacggccgacatgttggcgtatttacggcactcaagaacagtgtcggtttcgaatacgacccggatgcgccgcgaatcagcttcagcctgccgaaagacggtaactggaggaaagatgctccggaaaatttcctgctcaacctgcttcccgaatccggtgcggcaaaatacgccatgatgcaatccatcggagcaaaatcccaagaaccttttgatctgctcgacaatgtagattccgctggcgctctagtgttctcccgtagcgacgaacagccatccctattgtccacctccgtagcggaggcaacggattcggacatagcggcaagaataacggcagtcagacattctccggactcatggttcttcaaagacaaggatgcgcgattctctcttgctggagctcaaggcaagttcacgctctcacgcttcgatgacggctgggtatgacctaacggtgtcataccttccacgcacattctgaagccgtcgagtttccacgattccgatgatgttgagcatgcgactatgctgctctccaaaatggtcgggatcgaaacccctgagtcggatatacaggaattcaacggccagcagacctatattgtggaacggttcgaccggcgtatcgagaatggtatgccggttcgtcttccgatggaggacatggtgcaggcgttgggtttaccttcgtctgataagtacaaggttagtgccatcgatactttgattacattacggaagatggatacgtccggcaagctgggggaggagtggctacgtcgtctggctttcaacgttgctgtcgataactgtgatgcgcatgcgcgcaactattcagtcatgcccacttcgcctgacggtgaatcctggaagttgagtcccgcatatgatgtgatgaccacgacggtatggccgggatcgacggacaagctcgcgatgccattctcaggagcggagcatactagtgaagtgacgccggaccattacgcgcgattggccgattattgtggattcgatcctgatgtcgcacgagacgaggctatccgcatcagcgacttggtacggttaaatgcgcgtactgcctatatggatctggagccggaactacgagacaaattgctagacaagattcgtgtcgcgaacagtggcatgccaagcccgcaacgcttcatcctgcccgacaacggcatggtgcatgtcgtctcccacgatcgtgatgggcatccggtgcatgactattggcggcgcaaaccatccagataggacaatgcggccactgctggtgttgatttgcttgccggtgaattctgtcacagaataaggtcaggcaaacgaagcaatgcaactgcatataacagaacgctgagcatggattggaggtggtcgcaatgcttaccttgctggcaatgattggactttttcttctcgttcttggattggtgatagtcctgttgatgggaatgttcttcagcagcgacatgggcggcatattcgtgaacgtgttcaactatgcgacttccactgggatcgctgatctggtgaccgttggggtcatgctcatcatcctgtttgcggctttcgcggtacaagccgttatctggttcttcgtcaccgagaggatgttggattctgcgctcccgctgatcgtccaaatgatcatcgaactgattgttttcatcccgattcctacgttcttcttcatggcttggggcttggagtatcgttgggctggtgtcctatgtgttcttatcttcgcattgccggccgtgtacgacctgggttcgaacgtgtacatcaaacttgaggagatcaaggaaaacaagaactcgaaggttgattgatccttcgcccgaaaaacctttctctcagtggacagaatgcctccgattcggataatcggaggcattcgctttcctgggaaggatacgctggaaccacacgttcacaatccgatggtcggaataagcccggccagggccggcatgcacggtaaaccatagagagtattaggaagggaaaggggacatcgatgtctgacaaggataaagacaagaatgttgtcgagcaattgcttgattcagtgataacaagttcggcctttcgctgtttggtgtgggtgagtgggtcggggggtggtggtgctggtcgggtagtttgggggtatggataccacgtcgttgttcaccgccgccctgcaactgcctgacccgtggagggtgtcgggcgtggagttccgtgacgaggaggacggcagacgggaactgcatatcgcgatcgggttcgcggcgggttcgcggttcccctgcccggaaccggggtgcggcgaggccgcgtgtccggtgcatgacgcgagggagcgcgtgtggcggcatctgaacttcttccagtacaaggcgttcattcacgcgggcgtgccgcgcgtgacgtgccccgcccacggcgtgcacgcggtcccggtgccgtgggcgaggccgggaagcgggttcacgctcctgttcgaggcgatggtcgtggagctggccaaaagccagccggtcgcggacatcgccgagcaggtcggcgaacatgacacccgcctgtggcggttcatccgccattacgtggacgaggcgaggctttacgaggactacacgggcgtggaggccataggcatcgacgagaccagccggaagggccaccggtacatcaccgtggtcgccgacctggtggagcgcaacgtaatctgcgtggtcccgggcaaggactcgaccacgatcaaacggttcgcgcgggatttcatggaccacaacggcgatcccgaccgggtgcgtctggttgcctgcgacatgagcctggggttcgccaagggcatccgcgagcggctgcccaacgcggcgagaatcatcgacaagttccacgtgatcaaacacgccaacgaggccgtcgacaaggtccgcaaacaggaggcccgcggcaacgcgccgctcaagcggaccaagtacctgtggttgaggaacgaatcgaacctgaccggcctgcaattggaaaccaagcgcagcctgcaacggcgacgattgaaaaccggacgcgcctgtcagatgcgcgagaccctccaggacatctacgacaccagcgccgatcgagccgaggccgagacggccctcaagcgtctgtgctcgtggatgacgcgctcccgactcgaacccatgaaagagttcgcccgccagatacgccgccactggcgggacatcctcgcctacttcgaccacccctacaccaacgcgatcctcgaaggactcaacagtgtcatccagaacgtcaagacccgagcccgcggattcaagaacatggactacttcagcaccatgatctacctgacctgcggcaaactcgacctcagcaacgtcaccacctgacagacccacccacaccaaacagcgaaaggccacaagttctgattccaatataggtcccattgagcagcgtctcaatgagattgccaagagcccgaactgggagttacagggaaatattctgtctgttgataatgctgaacaagcagaacaagcagtgaaacatgtggttgaacgtgtatccgatactgatgttttctctggtcaaactgcgcttagtgcaaaacagcatggagaagatttgcttgccgtaaattatgcggatggcctatccagtcaaattgaagtgatgcagcgcatcattgataacgccaatgatgctcttgagtatgtgaggaagcaaagggagtcattgccggggaaccagcttgatgctgtttcatctactgcgatacgtatagcagatgtgggtgcgactgttctcttgccttttccgcttgctgctggtaaagcaactattcgtcgtcacgggtcagtcggtagccggcatacaccagagtcggatcgaacacacctagtttcttggcgatatcaggcagcagttcagctaccggaagtgtcgacggaacattgagtttcgcggagcgtttgccatacaccacagtgatggccacgcgcggggatgatgcggaaggcgagggctgattggctggcactcccatcgcaatcgaaggtacgggcgttggcgccggaacgtgtggtgctatgcgcggcggtgccggcatcatggacggtccggcgggcgtgtggcgatgcgacgatgccatagggtgcttcctcttctcaataaactcccaaaggtctactgtattcttgtattctctcacacattgcgggtatcgggaatgccattgtctggtcctagagcagattccgtggcgttttttgccgagtcgggtcctagggtggagcacaacgactacgatggtgcgggtaacgcgatacaaggagtggaacttcatatgccgaagatgtttggaaccgatggtgttcgaggactggccaatagggatttgaccgcacgtctggcgttggatttgggcgatgccgccgtgcgtgtgctcggtgacgccggcacccaagacgatcagcctgagggacgccgccgcgcgctcgtgggccgtgacacccgtgtgtccggtgattttctggcttccgccctgtccgcgggcatggccgccggcggcttcgacgtgatcgatgccggcatcatccccactcctggcgtggcctacctgacctccgtgctcaacgtcgaaatgggtgccgtgatctccgcctcccacaacccgatgcccgacaacggcatcaagttcttcgcacgcggcggcttcaagctgcccgaccagaaggaagacgacatcgaggccgtgctcggccaggactgggaccgcccgaccggtgccggcgtgggccgcgtgagccacgaccagaccaccgccaccaacctgtacatcgatcatctggtggccaccatcgctccgctgaacgatgacaaaacccagcccaagccgctcaagggcctgaagatcgtggccgactgcgccaacggcgccacttccgtggtggctcccgaagccctgcgccgtgccggtgcggatgtaatcgtgatcaacgcctcgccggacggctacaacatcaacaagaacgctggttccacccaccccgagcagctgcaggccatggtcaaggccaccgatgccgtgatgggcgtggccttcgacggcgacgccgaccgttgcctcgccgtggacgaagacggcaacatgatcaacggcgaccagatcatgggcattctggcccgtgccaagcagcgcgaaggcaagctcaaccacgacaccctcgtggtcaccgtgatgagcaacctcggtctgaagctcgccctgaaagacatgggcatcaagaccgtggaaaccgccgtgggcgatcgttacgtgcttgaggaaatgctcaagggcgattactcgcttggcggcgagcagtccggccacgtgatcaaccgcgaattcgccaccaccggcgacggcaccctgaccgcactgaccctgtgcaacgaggtcgtcaagtccggcaagagcctgaaggagctcgccgccgacttcccgcagctgccgcagaccctcatcaacgtgccgaacgtggacaagaaagccgccgccaccaacaagcgcatccaggatgccgtggcccgcgaggaggaactgctgggagacaccggccgtgtgctgctgcgcccctccggcaccgaaccgctcgtacgcgtgatggccgaagccgccacccaggcctacgccgacgaagtctgcacccgcctcgccaagatcgtcgccgaagaactcgcgctgtagcacccttccctaaggaaaagcaatgtttggaaagaacgccaaagtcgacctcgaactcaaccgtgatgtcgaacaactcatcaaaaccggcggcaaggagaagctcctgcccatcgtgcaggccggcgaaccagtgttgcgccaacggacggtggcctaccatggccagctttccaagcgtacgctcgccaaactcatcgatacgatgcacaccaccatgctggaggcgcccggcgtggggctcgccgccacccagatcggcttggggctcgcgctcgccgtggtcgaagaccacgtgcgcgacgacgaggatgatccgcgcgaaatcgcggaattccccttccacgtgatcatcaatccgagctacaaacccaccagcgacaaaaccgcctcgttctacgaaggctgcctgagcttcgacggataccaggccgtgcgcaagcgttggctcgacatcaccgccgaatgggatgatgaagacggcaagcaccacagcgagccgttgcacggctggcccgcacgcatcttccagcacgagaccgatcatttgagcggcgaactgtatatcgatcgcgccgaaatccgttcgctgaccaccaccgaaaacctcgaggattattggtgcgacgacccggtacccaccgaggccgccgaagaactcggcttcgcattatgatcgaccgcacatggctggacgccgccaagggagacattccccaatgggcggcgtccatgcccaaagacgccgacggcaccaccattgactgggactgggtgcgttcgctggacctgatgcatggcatcagcgtattgctggcgcttgctgcagatggtgagcaatatggcgaaaccgcagcacagcctcagctcgggttggaccaaccggaactgacgccacaagctatccacgacgcattgaaggtcgattacgccacacgcgagcatctggaatcaatcatcgcccaatgcaacagcacattcatgaccgattacgatcgattcatcggctcctatcgtctgcctcgcgcgctcgcctacgccaatcgtcggctcaacgacaacatcaacacgctgttgcatctgggcgaacagcaacacctatgggtggtcagtcgcgaacggcgggggaggactaccgttgccgtgctcaggccgtactccggcagccgcccatcgaacgatgaccaaggcatgctgaatctgagcggtgaaaccggtgacgcatctgccggaaacactgctgccgaaaacagcgatgtcaagttccccacaacagtcgccttggacgatatccaagaccgtacggcggcgattcttgacgcacgcgccgaacgacgtaaggcccagcgcttccaggagcgtgcgggcgatgcggcgatggcccgcgccaatctctccggcgcgacttcgccgggtggtgccgcctcgtctggcaacgctaccggccaccatcccaagcccgactggcgcgacgcctatctgcccggccgcgacgtggacgcggtgatgggcatcgacatcgaaaccaccggcatcgatccggcgcgtgactacatcatcgacgtcggcttcgagttcatgaacatggccagtccgcgcccggccggcgaacctgagacatacgcctatgagcagggctattacgccgccggcgacgcctacggccagtcccgtctcgcttttggcgtgccgccggaaaacgcggcgctcggcaacgccctcatcgccaaactcaccggcatcgatgtacgcggccgcagcagcgaggccgggtaccgactcttcgacgaatggccccaagcccaggccggcctgctcgcgcggcttacccagcagccgtacgtggcgcataacgccaccttcgaacatagctggttcatgctgaacgtcgccggatacgcggaaagctaccgtgccgggcgcatcaccatcatcgataccctgccgatgagccggcagtgggaccccggcgcggtacccaccaacgagcatccttacggagacaacacgctcgacgcctacgccaaacgtcagggcgcgcttgattccgcccacaacgaacgccacttgggccttgaggattcgcacatcatgctggtggccatgaaacaccatctggcggcgctgaaagcgcaaaggaaagggccgtgggggcccgccggcagggctggcgtcggcggcaagtcctgcggtcgtaagcggtgagtacactattggtctcgtgagtaactatcaggacggccgacagcagcgtgagaaccgccgccgcaccatcgtgcgtgtggtgtgtgtcgtcatagctgtggccatgctcggctccctgatcatcccggcgatttacgcggggctttgacgttgccttcgcatattcgtgcccgcagttgaacacgtctgatgcgagggatttgtgaggtcgcccggccggctatcggcaaggcaggcccggaaccttctggcagcatggattgcaggcggatgcgtgtgtggcgcggcaatgcccgccaacgccagaggaatgtgcgaaggctgtcaacaaggacgtgacttcccaaagaatctcaaagaatcaacagtaaggtaaaccacgatggcagaatttgactttacccaggcgatcggcgaagcccgcgccaaatacgaatccatcgccaaggcgctggacgtcgaccggctcaaggccgatatcaaggatctcgaaacgcaggccgcggccccgggcctgtgggatgatccggaaaacgcccagaagatcaccagccggctgtccgccgcggaatcgcagctgaagcgtctgaactccgcctcccaacgcatcgacgatgtggaaacgctcgttgaactcggccacgaggagggcgaccaggactctctggacgaggcgcaaagcgaaatcggcgagattcagaaggatctcgaccagatggagattcagaccctgctcgatggcgaatacgacgaacgttccgccgtggtgaccatccgctccggtgccggcggcgtcgacgcggccgacttcgcgcagatgctgttgcgcatgtacctgcgctactgcgagcgtaacggcttcaaggccaaggtcatggacacctcctacgccgaagaggcgggcatcaagtccgccaccttccaggtggacgccccctacgcttacggccgtctgtccgtggagggcggcacccaccgtctggtacgtatctccccgttcgacaaccagggccgccgccagaccagcttcgccgccgtggaagtggtgccgctggtcgaggccaccgaccatatcgacattccggatacggacatccgcgtggacacctactgttcctccggccccggcggccagggcgtgaacaccacgtactcggccgtgcgcatcacccaccttcccaccggcatcgtggtgaccatgcaggatgagcgttcgcagattcagaaccgtgcctccgccatggccgtgctccagtcccgactgctcgtgctgcgccacgaggaggaggccaagaagaagaaggagctcgccggcgacatcaaggccagctggggcgatcagatgcgctcctacgtgctgcacccctaccagatggtcaaggacctgcgcaccggctacgaaaccagccagacccaggccgtgttcgacggcgacatcaacgcgttcatcgaggccggcatccgctggcgccatgaacagcgccgcgccgccgaaaccgaggagtaaacagcattatggcactgatctcactggacaatgtgtccaagatctatcccaaaggcacccgaccggcgcttgacgacatcaacctcgatatcgaacgcggtgatttcgtgttccttgtgggtgcgtccggctccggcaagaccacgctcttgagcctgctgttgcgcgaggaggaggccaccagcggcgagattcgcgtggccggcaacgatctgcggcgcatcaccaaccgtcaagtgccgcagtaccgccgttcgctgggcttcgtgttccaggattacaagctgctcaataacaaaaccgtatgggagaacgtggcgttcgcccttgaggtgatcggcacgcggcggtccaccatcaaatcgttggtgcccaaggtgctgaataccgtggggctcaccggcaaggaaaagaactatccgcatgagctctccggtggcgagcagcagcgtgtggccatcgcccgcgcctacgtgaatcacccgcagattctgctggccgacgagcccactggcaacctcgacccgaccacgtcgctgggcatcatggaagtgctggacgccatcaaccgcaccggcaccaccatcgtcatggccacgcataacgaagagatcgtcaactcgatgcgcaagcgcgtggtcgaactgcacaacggcaagatcgtgcgtgacgaggctcatggctcctacgattccgccctgttcttcccggatgccgaagtcgaagccaagtccgacaccgcccatcatgtgctggcggcggcgaccaaggccatcgagggcagtgacgagccgtctgaaggcatcgcccgtttggccaattccgtgcattccggccgcaccggccgctatggcgagacgtttgcgccgctggaagacacgctgacctggggcaagggcatttcgttggatgagcaggccgccgccctggaaagcacccaggcgttcgacccgttcaaggacgagtccgccgcgaccgccgcggttgccgatacgtccgtgtcatccgccgccgagccgccggccccgccggagccgcccgcaccgccggaaccgcccgcaccgccggccaacgagcagtccgccgccgagcagcctgctgacgagcagcctgctgacgagcagtccgccgcagaccaaacatccgacgatcaacccgctgagggcgcgaaggagtaagggggatcatcatgcgagcacgattcattctgtccgaaacgtgggccaacctcacccgtaacctgtcgatgctgctgtcgctgacgctggtcaccttcatctcattcctgttcatcggcgcttcggtgcttactcaggcgcagatcaccaaagccaagggcgactggtacgacaaggtcgaggtcgtggtgtggctatgtcccgacggcaccagccagtccgcgaactgtgcttccggcaaatcgccctcagccaatgagatcacggcactgcagaaaaccattcgcgatgaactcaacgacgtggtctccaacatcgactatgtcagcaagcaggatttctacgacaacaccttcaccaagcagtacccgaacggtgaattccaaggccgtacgctgaccgcggacgatatgcaggactccctctggctcaagctcaaggaccccaccaaatatcaggtggtctccgaagtgctctctggcaaggagggtgtggaagacgttaccgatcagcgccagatcttcgacccggtgttcgccgtgctcaaccgagccacggcggttacggccgtgctcgccggcgtgatggtggtggtcgccatcctgctgaccggaaccaccattcgtatgtccgccgcatccagacgaaccgaaaccgaaatcatgaggtacgtgggtgcctcgaactggacgattcgtctgccgttcattctggagggcaccatcgcctcgctgattggctcggtgctctcgtgcctgatgctttcggctatcgtcaacgtgttcgtcaccggctggctggcgaaatccgttacatggattccttatgtgaatcagctcacggtactggtgatatcgccgttcctggttgtgggcgcgatactgctgtccatcatcgcttcaaccatctcgttgcggcgttatttgagggcgtaacgcgaccggcttacccgcgagaaatgtgatgacatcgtgtgcaagcctctcaggttcgcatgttatggtattggcttaagtgagcgaaaggactattcacatatgacgaacgtacgtgtgatcaagcccgcactggcggcactggtggccgccgcagcctgtgtgggaggtctggcgttcagctcggcacagcctgcccaggcagacacctattccgacctgatcaatgcgcagaaccagcacgccgcgtcggtacagcgcgaggccgaactcaagcagcagctggccggtgccagccaggacctggcgaataaggtacttgagctggacgatctgaccaacaacaagattgtcgccgcgcaggccaaggtcacgcaggccaacgaggatgccgccaccgctcaggacgaggccgacgccgcatccaaacgtctttccgccgcgcagaaagacaaggagacgctcgaggagcggatcaagcagaccggcaaggactacgatgacgcgcacgccgccgtggcccagctggcccgtgacgagatgcacggctcgaatgcttccgacgtgatgagcgtggtgacgggtgccaccagcacacaggacttcgtcaactccatgcagtcccgggacgcgttgtcccgcaacgaggcgaatgcggcttcctccgccgcgacctcactgagcacgtcgaagaaccgtggcgaacgtctggcggccatcgaaaagcagatcgctgtgctcaagacccagtccgatgagaaggccgcttccgcacagaccgccgccgaaaccgcgcaaagcgaacgtgacgctttggacaagctacgccaggagggcgaaacaaggcgtgacgaactgtcttccatgatcgacagtctggattcccaatccgccaagcaggcggcccagaccgtactgatcgcttcccaggtcgattcctacaatcgtcagtaccagaaggaacagcaggacgccgccaaccgggtggataccggtaaccagggcggtacgccgtctactccggtgacccccgctccggcgcccgctccggctccggctccggctccggctccggcgccggcccccgcccccagcgtcggcggccaaggcacgtcgaacggtgattacggcaacgcctatgccgccggccagtgcacgtattgggcgtatgaacgccgtaagcagatgggcattggcacgccgtcctatctcggcaatggcggcgactggtggcgcaacgccccctcgtacggcttgcgcgtggaccacaaccctcaggtcggtgcggcgctctccttcctgcctggtcaggatggtgccgacggtacctatggccatgttgccgtagtcgaagccgtgtatggcgacggcacattccagatctccgaaatgaactggggtggtccgtggaacatgcacgaccgcaccttgaccaatttgggtcagtactggttcgtccactgaccggttggttcggccgatatatgcggttgaagggttcctcttgaagaggaacccttttcgtattcgaggccggtccgtgatatcgtcggatgttgcgttgctacccacgagttgctactcacgagttattgcccacgaaaggaggagacatgcccaaggaaaccggtgagaaactcatcgtccagaacaagaaggcccggcatgactatgccatcgaagacaagtacgaggcagggctggccctgaccggcaccgaggtcaagtcgttgcgcgaaggccgcgcatcgctgtccgaggcgttcatctccatcgaccgccgtggcgagatgtggctggagggcgcgaacatccccgaatacctgaacggcacatggaacaaccatgcgcccaagcgcaagcgcaagctgctgctgcaccgactgcagatcaccaagctcgcccgcggcatcgaggccaagggatacacgattgtgccgctgagcctgtacttcaaggacggtcgcgtcaaggcggagatcgcactggcccgaggcaagaaggaattcgacaagcgccaggccctgcgcgaagagcaggacaagcgcgaagccctacgcgccatgcgctacgccaacatgcgccactagtcccgtcccttggctcccctccggaggggagccaagggtaggatgtccgcgttgtgggtcatttcgcccacgattaacgcttccgtagcattgcactcctacgctctggaaccatctgggaaacatacccgcccagctgactatccggagagaggaaatccaatgtctctaagcaagggaatacaatccgctgcggccgccgccctgagcgcggccatgctgatcgccgtggcggcctgtggcacgactgacggcaccgacaccgcatccaagagcggcgattcatccaaggactcgtccagcacttcgattcaaggcttcgacaccagcagcatccagaaggacgacgagattgccgcactgctgcccgattccgtggccggcgacggcacgctgaccgtcggcgccgatacttcctatgccccggccgagttcctggccgaggacggcaagaccccggtcggctttgatgtcgacctgtccaaggcgctggccgcagtgttcggactgaaggaaaacaccgtctcctccacgttcgattcgattatcccgtccgtcggctccaagtacgacatcggcatctcctccttcaccgtgaccaaggaacgcatggaggctgtggacttcgtgacctacttcaaggccggttccacgttcgtggtgcagaagggcaacccgaacaaggtcgactcctcgaacctgtgcggcgtgaaggtggctgtgcagaccggtaccacccaggaagaggaagtcaacaaggataacgagcagtgcaaggcggacggtaaggatgccatcgacatccagtcctccaagctgcagaccgatgtgactaccgccgtggcttccggtaaggctgatatcttctacgccgatacgccggttgccggctacgccatcaagcagaccggtgatacgctcgaggccctcggcgaggacgttggtgtgacccctgaggccgtggccgtcaagaagggcgattccaagaccgccgaggccgtacagaaggccatccagaagctgatggatgatggcacgtacaagaagatcctcgacacgtggggcgtctcttccggcgccgtcgacaaggccgagatcaacccgtccgtcgagtagtttcggttactatgaagactcccgttgccctgcggcgggagtctttttgtatatgtatgcactgtagtgtataaatatgcttaaccgttgatcgttgccgttgaagcggcgtaagagagaagaagaaacgattatgcagtccaccaaactgaagtccattatggccattgcactgagctcggccatgctgttcgccaccgccgcttgcggcgcctccgacaaggccgatgccggtacggattccgccaagggctccgatgccgccaccatcaccagctacgatgtcagctccgtggagaaggatgacaccatcgccgcactgctgcctgaatccgtgaccaaggacggcaagctcaccatcggcaccaacccctcctacgccccggctgaattcctcgacgccgacggcaagacccagatcggctacgacatggatctcgcccgcgccatgggcaacatcttcggtctcgagaccgaaatcgtctcctccaacttcgatacgatcattccggccatcggctccaagtacgatctgggcatcgccgcgttcaccatcaccaaggaacgtatgcagtccgtggacttcgtctcctacttcaccgccggtatgggctacgcggtggccaaaggcaaccccaagaacgtgaacccggatgacctgtgcggtctgaacgtcgccgtcgagaccggcaccgtcgaggaagaggccatcaacaagaccgccaagcagtgcaaggcggacggcaagaaagacatcaccatccagtcctccaagcagcagaccgacgccaccaccgctgtggtgaccggcaaggccgacgtcttcttcgccgattccccggttgtcggctacgccatcgcccagaccgatggtcagctggaacagctcggcaaggacttcgatgaagtgccgaacgccatcgccatcaagaagggcgattcccagaccgccgaagccgtgcagaaggccatgcaaaagctcatggacgacggcacctacactaagattctccagcactggggcgtcgaatccggcgcactggacaaggccgaaatcaacccggccgtcgaatagtcgacaagctgtcgcgaaaattcgaatggggcgcactgtttgtaacacagtcgccccattcgtgcactaaggttcaacgctagttgcaacttgcagttcaggctgcctaacacatccaaggaaccagattatggcgaagaaagaagtcgacggtgaggggctgaacatccccaaccgcatcaaggcgttgccggtcaagcgccccggcccgattgtggccgcagtgatcgtggtactgctcgccgcgatgctcattcaaggcttgattaccaatccgcgactggattggcccaccgtctggaagtacctgttcaacgagaacgtgcttgaaggcattcgctataccttggagcttaccgtgatctccatggtcgtggcgatcatcctgtcggtgattcttgccatcatgcgcaaatccatcaatccggtgctgcgcggcgtcagctggttcttcatctggttcttccgcggcacgcctgtgtacacgcagctcattttctggggtctgttcgccgtgctgattcctaagatcagcctcggcattccgttcacctcggtggagttctggagcatcgactccaacgtggtggtcaccgcattcaacgccgcatggattggtctggccctgaacgaggccgcctacctgtccgaaatcgtgcgtgccggccttgaagccgtggaccccggccagaccgaggcggccaaggcattgggcatgaaccgcacgctcatcatgcgccgcatcgtgctgccgcaggccatgcgcatcatcatcccgcccaccggcaacgagaccatcggcatgctgaagaccacctcgctggtcaccgccgtgccgttcaccctcgaactgcagttcgccaccaacgccatcgccaaccgtatctacaagccgattccgctgcttctcgtggcctgcttctggtacctgctgatcacctccattctgatggttgtgcagtcccgcctcgaggcgcacttcggcaagggcttcaacgcccgcccagtgggcaccaagggcaagcagacgccattgccgggtaagaccgacggtgaaccgaaggatgacgtggacaagctcaaccagaccacatttgtcggattgaatgcataaggcgggagcgcgattatgactacgaatgacatcaccagtgttgccccggtcgtgcgcaaggcggctgacggttccgtgattcctgctgtcaaggccgtgcaggtgcacaaggcgtttgggccgctgcatgtgctcaagggcatcgatctaaccgttatgcccggtactgtgaccgtgattctggggccctccggttccggcaagtccacgttcctgcgtctgatcaaccagctggaaaccctgaccggcggttccatcgaggtgtacggcgaactcatcggctacaagcacgtgaccaaaaacggccaggacatgctgcagaccctggacgataaggagatcgccgcacagcgctctcgcctcggcatggtgttccagcgcttcaacctgttcccacacatgaccgcgctggagaacgtgatggaagccccgatccacgtgcagcaccagtccaagaaagccgcccgtgacctggccgtggccgagcttcagcgcgtcggtctgggcgatcgcatggactattacccctcccagctgtcgggtggtcagcagcagcgcgtggccattgcccgtgctctggccatgaagccggagatcatgctcttcgatgagccgacctccgcccttgaccccgaactggtgggcgaagtgctcaacgtcatgcgttccttggccaaggaaggcatgaccatggtgtgcgtgacccacgaaatcggcttcgcccgcgaagtcgccgaccagatcgtgttcatggacggcggcgtagtcgtagaaaagggcggccccgacatcatcgaccaccccaccgagcctaggtttaaggacttcctacagcatgtgctgtaggaaggctgttatattgcctcagcactgtcgtgcttcggcgtcgcctacggggagcccactgggctccccgctttacggctccgcctacagcacgtgctgtaggaaggctcgttgttgcagctccaaaagcgtacgctgatgaactcagcgtacgcttttcacgaaggggcatgttccaatcctgcaaaggcggcgggttggattcgctttgcgcaataatcgtccgctaggctggtgagccatgtgtggaatcgttggatacgcgggaaatattgaaacggcatgcggcaagcctttggaggtctgcctgcaaggtctggaacgtctggaataccgaggctatgactcggccggtgtggcgctgaccgcgcccggcatggataaggtggtcgtgcgcaagaaggccggccgtttgaagaacctggtcgaagacatcgagcgcaagccgatgccgctcgccacggtgggcatcggccacacgcgctgggccaccaatggcgagccgagcgacgtgaatgcccacccgcacaccagcatggacggcaaggtggccatcatccataacggcatcatcgaaaacgcctctcagctgcgtttcgacctgcaagccgaaggctaccgattcgcctccgccaccgacactgaggtggccgctaagctgctcggcaagatcgtggacaagattatcgcggacgaaggcaagccagacttgttcaaggctgtgcgccgtatggcccgcatgcttgaaggcgcgttcaccattctggccaccgactgccgccagccggacatcgtggtcggagcccgccatgattcgccactggtcgtgggccttggcgagggggagaacttcctcggttccgacgtcgccgcattcgtggcctacaccaagcgcgccatggaagtcgaccaggatcaggccgtatgcgtgtccgccgacaaggtcatcgtcgccgatttcaacggcaacgtggtcgaaaacccgaagacctacaccgtggattgggatgcttcggccgccgaaaagggcggctgggattcctttatggacaaggagattcacgaagaccctgccgcagtgcagcgcaccctgcttggccgcttcgacacgaatggcgccatcacccttgatgaagtgcgtatcgacgaacacgacttcaaggccatcgacaaaatcatcgtcgtggcctgtggcaccgccagctacgccggccaggtagccaaatacgccatcgaacactgggtgcgtatccccgtggaaatcgaactcgcgcacgaattccgttaccgtgacccgattctgaccccgcgtacgctcgtggtggccatttctcagtccggcgaaaccatggatacgctgatggccctgcgccacgcgcgcgaacaggggtccaaggtgctggccatctgcaacacgcagggtgcctccattccgcgcgaatccgacgccgtgctctacacacacgccggcccggaagttgccgtggcatccaccaaggcgttcgtggcgcagattaccgccgcctacctgctgggcctgtatctggcgcaggtcaagggcgcgatgttccgcgatgagattcatcagatgctcgactccctgaaagacatgccgcgcaagattcagtgggtgctcgacacccagcccaagaccatccaggcggccgccgagcgcatggtgaacgccaactccttcttgttcctcggccgccacgtgggctacccggtggcgcttgagggcgcgttgaagctcaaggaaatcgcctacacgttcaccgagggcttcgcggccggcgagctcaagcatggaccgatcgcgctggtggatgagggtgagcccgtggtgttcatcgtgccgccgcagcgcggccgcaatgtgttgcacgccaaggtgatctctggtatcgaggaggtcaaggctcgtggcgcgtacatcatcgccgtggccgagcagggcgacccggatgtggaacggtacgctgacgtggtgttctggcgccccgcctgcccaacgctgatgagcccgctggttgacgtggtgccgctgcagctgttcgccatggacatggcaaagctcaagggctacgacgtggacaagccccgcaacctcgccaagtccgtgaccgttgagtaagccacatcggtatgtgattgacgagcctcatattccgtttgagatggacgtgctgtatgaggacgagcggatcatcgtggtggacaagccgcattttctggccaccatgccacgcggcatgtggtatcggcagaccgcgctgatccgattgcgtgagcggctgggggagccggacatcacgccagcgcaccgattggaccgcatgaccgccggcgtattggtgttcgtgcgggattcggcctgccgcggcgtgtatcagatgctgttccagaaccggcaggccgtcaagatctatgaatgcctggcaccctgccggccgatcagcggcccgcgattcggcacgatcatgcaggtcgaaccgccacgcccgttcccattgctgcgccgatcgcacatcaccaaggaacacggcacgatggccgcattcgaggaaccgggtttggccaacgccgaaaccctcatcgagcgcggcgacctctgtttccctcccgctggcgggaggtggcgcgaagcgccggagggtggtccccatccgggaaatcaccccatctgccgctacacactccacccgcgcaccggcaaaacccaccaattgcgcgtccacatgaattcgctcggcctgcccatcgtgggcgacgacttctacccgcgcatccagacacgcccctacgacgatttcagccagccgctgcaattagtggcgcgtgtgctacgattcaccgatccaataacaggcgagaagcgcgaattcgtttcccgtgtgccgcttaagatctgatttcttagggggggatggcgagaccaatccccacccgtccgaatcactgtccctttcgactggccatccagctcattgcatcgtcgtacaccatcatgatgcgcttgcgatagctatcgatgaattcctgcgcaccaatgctcgcgataacgtcgtgagcgggttgcacggtgctgtcgaatgcctccggcagcctatccaccaaggtgtggaatcgtaaaatcacggattcctcatctaatcccatccgctgtgcgaatcgttccagatgtttgcggcgtaattgaagaagatctcggcgtccgccgatgttcatcgccaaagtggcatttatgatctgcttgccatgccccaaataagggaacaccgaagcaaggtcatagagcggggcaagccgcacggacgcgccatcgagcaatagcgagtagttcttggcgtggctgtctgttgccccgacgagataactggcgaggatgccgtcggtgaaggctcggatattgctttcggcctgaccgggcagaccgtgcttgcgcaacatttccgcatatgcattggacgttgggccgttgtgttcctcgtatttcagcgatgagggaatgcccagcgcttgggtaaagtcttcttggtgcagggccgtcaccgtaccattggcggacactatacggtcataccgctcgctgatgatggctgggaccccatcaaagatgtgaaaagaggtgtgggccacgggtattcccatcgcctccacaatgcgcatggtgatgtgttcgttgaatgcttggtgtggaagggtcggtatgccgggcttgatgatatgagtcgtccgcgcgattccagtggtggagaaccatgatccattgcggttcctcagtgcgatcttgccctgctgtcccgcgaccgaccaatgctcgtttacgcttgcggactggatgcctgtgggggcggctgcgcgtagtcgattcgcgatctgcgaatcgctgattggaataagcgaatcgtcatctatgggcaagtgcgggtcggcggacagccgtaatgcgccggtggcatcgaatccgatggcttgcaacagatcaaatgcgcttgtcgatcgggcatgatgcaatcgcatggcttcatctcgggcctgaggggattccgggaccagggcctcaaggaaattacgcgggatgtcgcctgaatattcggctgcggtaatgggcatggaaagcgatattggtgtgggtgattgcgaccaacgataggaatcgtgatattggaaaataatgctgccatcgtttgttcttcgaaactggccgatgggtgtttcgccgagaaatgcattgagagtgttttcgctcatggtgtcaccattcatagagttcggcgggctgcggggttttgcggacatccagcgacaagccaagctcagtcagagcgctgagaatggtggagaatccgggattggggactcgggcgtgttcaaattcgatcagccagcgacgtgacacgcccagccgttgggccatgtcggtctgactgatgccctggcgttgcctttcatccttgataagccgcgcgtattcggcgatatccatgacaatcatgtgcaaaatatatcacagtatagtaaagtgtgcaatattctgcacatagttggaaatgtgcagaatattgcacaaccgagtcgattggtcggtgcggaattgcctatggatcactggcaggtgaatcactgacaggtaccagtggatgccagcacatgccgctcgtcagctgatgtcgcgcacggaaccgcgttcgatcagttccggcgggattacggttttgacgccgaccggtatcttctcgccttcgcattgacggcggaccatggagaaggcggtggcgccaatgtcgtcaaagcgcagcttcatggtcgtcaggttcaagcgcggaaccatatctaccagcgaatcatcgacgcccacgatgctgacatcctcgggcacgcgcttgcccgctgactgcaacccgagcattgcgccgtatgccatttggtcgttggcggcgtagatggccgtgcagtcggggtcgtgggccaacgccacgccggcctggtagcctgaatccgcgcaccaatcgccgatgtacatgctcggtacgcgtgctcccatttgttccaacgcttctcgccaaccgcgggcgcggctttcggcggcgcgcgaggtggacggtccggcaatgtggtagacggtcttgtgccccttgctcatcaggtaatcgacgatagcggtcgagcagccatactggtcggcgtcaacggtggggcagtggtcggcggcggattcgcagatgagcacgactggaagttctcgcggaggcttgtatccgacgaaatcggagatgcgttcctccagcactacgatgacaccatccaccggctgacgctgcatgcgatcgatggcggcggaaagcgtgcgttccgcaccgtggcgcatggtctggatggtgactgaataatcgtcatcggccgcgttggccacaatagaatcaaggatgcgggcgttgccgaacgcggtggtgttgaacatcaccacgccgatatcctggaagcggccgtgctttagggctcgggccgcataattcggacgatacccaaggcgtttcattgcagcttcgacacgctggcgtgtttcgggtttcaccgcatcgctgccattcgccacgcgggacactgtctgtggcgaaacgccggcggctttcgctatgtcttgcatggacacctgtgttggtctcgacatttcaccctcgcttgactcattaatgtcggtgtttcgtttacaacgcttatcttagggacgcttacggtaacgataacatcgttgtcttcgtgaccattgtagcagagtgactgagaaacccttaattcaacacggtactcaacacgattggataatgttacaaatggtgttatgatgataacgcaaacattttggtcaaccttcgaaggagaggggttgggaatggcttcagccgatatcgcagctgcgcccgtgcattcgggcaaggctcgtgtgaataagcacaaggccgattggcgtggatggaaattcatgtggccttttgcggtggtgttcgtgttcgtgttcatcgtgccgatcgtgtacgccgtttatatttcgttcttcaagaagcagatgatcggcggcaccaagttcgtcggcttcgagaactacgcgcgcctgttgggtgatggccagttctggagcagtgttggtcgtgtggccctgttcacgtgcgtgcaggtgccgatcatgctgtgcctgtcggctttgatggccctggcgttggattcgatgaagctgcatggcacgaggttcttccgtatctcgacgttcctgccctacgcggtgccggcggtggtgtcgacgttgatctggggtttcgtgtatggcgcgaagtacggcctggtgggttcgttgaacgatttcctgggcacggacatcgacgtgctcgcccccagcgtgttgttggccagtatcgggaacatcgtgacgacggcgttgttcacgatcgtggcgacgtggaacaactacttcctgccgttgatcatgctcaaggacgcggactggtacccgctgaccatcggcctgaaccagtggaaggaccaggcctcgaccgcgggcggccaggcgatccagaacctggtgatcacgggctccctgatcacgatcatccccctggtgatcgcgttcctgtgcctgcagaagtactggcagtccggactcgccgcaggcgccgtcaaggagtgatggagtcggctccgccgacgcggtgtcttcaccgcctcgcggcggggtctctccctccgtcccggctccgccgagacaaccttcctcatcagagggaggtaaaatagtgccaagcccccctctgacgagctgagccgttaggcaaacagccctgtgggctgtttattcccgcggacgcagattatcgataaaattcaataaaggagctgaatcatcatggaacgtaaagagttcaagtggccgcagccgcttgcgggcaacaagccccgcatctggtacggcggcgattacaaccctgaccaatggcctgaggaagtgtgggacgaagatgtagccctcatgcagcaggccggcgtcaacctcgtctccgtagccatcttctcctgggccaagcttgagcccgaagaaggcgtgtacgacttcgattggctcgaccgcgtcatcgacaagcttggtaaggccggcatcgccgtcgatctcgcctccggcaccgcatccccgccgatgtggatgacccaggcccacccggagatcctctgggtcgactaccgcggcgacgtctgccagcccggtgcccgccagcactggcgcgccaccagcccggtcttccttgactacgcgctcagcttgtgccgcaagatggccgagcactacaaggacaacccctatgtggtctcttggcatgtgagcaacgagtacggctgccacaaccgcttcgactattccgaagacgccgagcgcgccttccagaagtggtgcgagaagaagtacggcaccatcgacgccgtcaacgacgcttggggcaccgcattctgggcgcagcgcatgaacaatttttccgagatcatcccgccgcgcttcatcggcgacggcaacttcatgaacccgggcaagctgcttgactggaagcgcttcagctccgacgccctgctcgacttttacaaggccgagcgcgacgccctgctcgagatcgcccccaagccgcagaccaccaacttcatggtctccgccggcggtgccggcatcgattacgacaagtggggttacgacgtggacttcgtgtccaacgatcactacttcacgcctggcgaagctcacttcgacgagctggcttactcggcctccctatgtgacggcatcgcccgcaagaatccgtggttcctcatggagcactccagctccgccgtcaattggcgcccgatcaactatcgcgtcgagcctggcgaattggtgcgcgactccctggcccacttggccatgggctccgacgccatctgctacttccagtggcgccagtccaaggccggtgccgagaagtggcactcttcgatggttcctcacgcgggccccgactcccagatcttccgcgatgtgtgcgagctgggtgccgacctcaacaagcttgctgacgagggcctgctgagcaccaagctggtcaagtccaaggtcgccgtcgtcttcgattacgagtcccagtgggctacggaacacaccgccacgcctactcaggaggtacgccattggaccgagccgctcgcgtggttccgcgcgctggcggacaacggtctgaccgcagacgtggtgccggttcgcggcccttgggacgagtacgaagccgtcgtgctgccgagcctgaccatcctgtccgaagagaccacgcgccgcgtgcgcgaatatgtggcgaacggcggcaagctgttcgtgacctactacaccggtttggtggacgacaaggatcacgtctggctgggtggctaccccggttccatccgtgacgtggtgggcgtgcgcgttgaggaattcgccccgatgggcaacgacttccccggtaccatggaccaccttgacttggacaacggaaccgtggcgcacgatttcgccgacgtgatcacctccgtggccgataccgctcacgtggtcgcctccttcaaggcagataagtggaccggtttcgacggcgctcccgccatcaccgtcaacgacttcggcgacggcaaggccgcatacgtcggtgcccgtctcggccgtgagggcttggccaagagcctgcccgcgctgctggaggaactcggcatcgagacttcggctgaggacgatcgcggtgaagtgctgcgcgtcgagcgtgcggatgaaactggcgagaaccacttcgtgttcctgttcaaccgcacccacgatgttgcggtcgtggacgtggaaggcgaaccgctggtcgcctcgctggcccaggtcaacgagtccgagcacacggccgccatccagcccaacggcgtactcgtcgtcaagctgtaaaaccgcgcatagcgcctgattactcaacggctcccttgctgctcatcgcagcaggggagccgttttcgtttctccagcaaagtcgggtagggtggtcaccgtgcgaggcaaaaacagagtgacgatggcggacgtggcccatgaggccggtgtttcggtagcctcggtgtctaattttctgaacaaacagccatatatgagcgaggcgatggccgcgcgtattgcggaagccatcgaccggctcggatacaaagtcaactcgtcggccagaaacctgcgttccgggcgcacctggttgctcaagctggtcattcccgatctgcggcaggtgtatttctccgaactcgccgaggatattctggccgaggcccggcaacatggctatggcgtcatcgtggaatccaccaccaacaatcgtgcccgcaagctggaaagcatcgcatcgatgggcacgcacagcgcggatgggctcatcttaagccctctgatgatgacggttgacgatatcgcagctttggagggcgattacccgctcgtactgttgggtgaacgtttgttcggcgtcaacgcgccgcacgtggtgattcgcaatcgcgaaggggccgccggcgcgaccccgttcgatacacaaagccccgtgacgaatcccgtcacggggcttttaccgttttaagccccgcctagtacactcgtcaccatgcgagtgatcggacagcgaatcaaaagaatggcaaccatagcagtgactgccatcctttccgtatccctggcctcgtgcgggcaggccacggacgacaaccgtacggagatcagcgtatggagctgggaaccgagcatgggggaggtcatccgccgtttcgaaaaagccaatccggacatccgcgtgaaatggaccaatatctccggctacggcaatcttaataccgccattcaagacggttacggcacgccggacgtggctcaaatcgaatactatgcactgttgcagtacgcggtctccggccaattgcttgatctgaccgacaaaatcggctcggattattccaacttctttaccctcggcacatggtcgtccgtgcagctcgccggccgtacctatggactgcccatggattcgggcccgatgggcttcttctacaacgaagacgtgttccgccaagccggcgtggacgccaccaagatcaagacttgggatgactattacgaggccgccgaaaagctcaaggagatcggcgcgtatatcgccgccgactcgggcgacggcagtttctatgacgcgatggtctggctcgccggtggtcagccgttccacacgtcggccgacggcaaaaccgtgaccatcgatttggatgaggatgccggcacccaacggttcaccgaattctggcagaaaatgatcgatgaggggcttgttgacactacctccgccacatggtcggatcggtggaaaagcagagtgggcaccggcaccatcgcctccgtgttctctggggcttggatgccgtcgttgctgctgtccaatgtgccgggcgcggccggtctgtggcgcgtggctcccatgcccacctatggtgggcagcctgccaacgccgaaaatggcggctcggcgctgaccgtgttgcaactgacccgtaagccggatgcggcctatcgtttcgtggactttgtggcgcatgacgcccaaggcattagcgcgcgtgtagacggcggtgccttcccggccgattacgccaccctgaattccgctgattttctggataaaaccacgattaccaatgaccgtggcattgaaatcccgtatttcggcgggcagaagttcaaccgggtactgtcggaggccgccgaggatgtgtcggtcggataccagtatctgccattcgaagtgtatgcgcgcagtgacttcaaatcgacggtgggccaggcatacgagtggtccggcagtttccacgcctatcagcagcgacaggaagccattgagatgggcatgaaggacgaggaaggcaacccgctcgaaccattggagaagcccggcaagaaagtcagtctctccgacggcctggcccaatggcagaaagacctccgagaatacggcctcaatcagggctttacgattaagtagggttttgagtaggtttttcggggagggacggaatcgactgcgctatgcgcggccgatgcctgcacaccgcgttacttcacattgcgcgagtagatgtatgccatgcctttgaagatcaggtctgaatcgtagacgtcgatcatgtcggtgtcgttcttgaaaatgcggctgagccctcccgtggctaccacttggaacggctcatcgatttccttgcggaactgctgaatcgtgcgctcaatgccaccgaggaacgtgtaatacagtccggcctgcatagcagtgcgcgtattggtggccagaatcgactgcggttgcgtgatctccacttccggcagctgggcggtctgcccccacaacgcctcggccccggtgcggatgcccgtggtgatgaagccggagcgaatcgtgccggaaccgtccacatagttgaacgtggtggcggtgccgaagtcggccaccagcaccgggccgccataggtgtggtaggcgccggcgcagtcggcgatgcagtcagagcccaaggttttggggtcgtcgagacgaatgttcatgccggtcttgacgccagggcccaccaccatcggttccaatccgaggaatttgatcagcgaggcgcggaaggaatacatcaccttcggcaccaccgagcagacgatcacatcgtccacatcgtcggccgtgtaatcgctcaaagccaggaactgcgtgatcatcagaccgtattcgtctgaggtgtgcgtcgccttggtggtgatgcggtaggagccgacgatgcggtcgccctccagaaaaccgatcacgatattcgtattgccgatatcgaccgccatcagcatgggtcaggcctccttgttctcgtcatcgacattgctcgcgccgccggaacgcaacgctgcgagccgcagcaacagtcgttgcgcaagcacggttttgtccatcttgtcccaatgctcgatattcggggtgccggcatcctccgctccggacgtgagcacggtgacaacgttggtgtcggtgccgaacccggcaccggcgtcgcgcagattgttggccaccagcatgtcgcaatgcttggacgtcagcttcttctccgcattacgaatcagatgctcggtctccatcgcgaatccgcacaggatctgcgagccgtcgtcgcgcttgcgttcgccggcccacgccagaatatccgggttggaaaccagctccacggtgatgctgctgcggccggccttcttgattttctccggcgcaatctcggccacgcggaaatcgcccacggcggcggccataatcgtgatatccgccgccgggaaggcgtcggccaccgcatcgaacatatcctgcgcggtcgtgacgcgcaccacatccaccgcatcgggcgcggtcaaggcgactggaccggagaccagcgttacgtcggcaccaaattcggctgcggccgaggcaatcgcataccccatcttgccggtggaatggttcgtcagatagcggaccgggtctagcggctcctgcgttggcccggcagtgaccagcacgcgcagccccttgagcggggaagatgagggagcctggtcatcctgcgcatccgccagcagccgagcggccacttcctcgatgcgcgccggctcttccatacggcctcgtcccacgtcgccgcaagccagattgccttcctccggctccacaatctgccagcccaattcggcgcaggttttcagattgcgctgcgtggccggattgttgtacatatgcacgttcatcgccgggcataggatcttcggcccctcataggccagaatggtggacgtcagcgtatcgttcgccaatccacaggcgatgcgggcgatgacgtcggcgctcgccggggccaccaccagcagattggcccaggccgcatcggccacatgattgatggtcgttggcacggtcggattggccgtcacgtcgccgtgcgcggccggataagcggggaacatcgtggtacgggtgggttgatgggtcagtgaggtgaatgtcaggggagtgacgaagccttcggccgctgtggtttcgataacccgcacctcgtggccggccttggtccaatcggatgccagatgacaggccttgaatgcggcgatgctgccggtgacgcccagaagaatatgtgccatagctgcctcccggccttatgccaaggccgcacgtgtgcccacgccagcgcttcccgcgtcgttgcccgacgatgcgccgcgtgttgtggtcgccgcggaccctccgtcggcgccgcaatccagtatagccattgcctccggcgtgtccggggatatagtagaacgtggtgatcgacccgaatgggcggtcaaccacgcaagataacaacgaaaccatattcgggcgtaagcatgcccgaatgcatcagggagtatccatgtcccagaacaatggtgtgcacggcgagtccggcgcaaccgaagacaggaacaccagcggcgcagaccaagccgccagcaccgacgcgagcctgaacgcgcgcgcgaaatcatcaaacaagaagaacggcggcccgaagtggtggctgtggacgctgatcgcggtcgtcgtggccgcggcgctcatcgtgggcgtcaccgtcttcggagggaaaggcaagggcaaggacgcgaacgcctccggctcggccagccgatccgataccgtggccgtcggcctcaaactcgccccggtcaatcttgacatccgccaccagtcgggttcggcccttgagcagatcctcatcggcaacgtgtacgagggcctcgtctcgcgcggctcggacaacaaggtccaccccggtctggccaagagctgggagatctccaaggatggcctgacctacacgttccacctcaacgagaagatgaacttctccaacggcgacaagctcgacgccgaggatgtggcgtggtccatcaacgagctcaaggcccagaagtactacgactacgagcaggtcaagagcctggacaaggccgaggccgtggacgccaacacggtcaggctcaccctctccgcgcccaactcgaacatgctgtggtacctcaccagccgtcccggcctggtctacgacaaggacgccacctgggatcagaagaacggcgcgttgggctcgggtccgtacaccgtggtctccttcgacccgaacgacaagatcgtgctcaaggcgaaccccaagtattggggcaccgagcacaaggcgaggaccgagaacgtgatcgtccggttcctgccggacgagaacgccagcatcaacgccctcaagagcggcgacgtgcaggtgctttcgcccatctccgccacccttgccgatccgttccgcaaggatccgaactatgtggtcaagtccggtgacggttccgacaagttcgtgctcgccttcaacatggccaacgacaagctctccgacaagcgcgtccgccaggccatccgatacgccatcgaccataagcagatcatcgcctcgcgcggcggcgtggacgcccccctcggcggtccgatccccaaggtcgatcccggttacgaggatctgagcggcctgtacccgcatgacgtggccaaggccaagaagctcatggagcaggccggatactccgagtcgaagccgctggacctgaccctcacctacgccaacgtgtacggcaccgagctcggcgaccagctcaagagccagctcaagcccatcggcatcgacctgaagatcaactacgtggagttctccacttggctgcaggacgtgcacgccaacggcaactacgatctttcgctcgtggaccatgccgaaagccacgacttctacggatggaccacgccgagctactacttccactacgacaacaaggacgtgcaggccctgtacgccaaggcgctggaggccacctccgatgacgaggcctcgaagtatctggccaaggccgcgaagatcgtctccgaggacgcgccggccgactggctgttcagctggaaggtcaccatcgcctacgccaagggcgtggacggcttcccgcagaacctgagccagaccgtgctgcccctctggcggatcacctacaccaagtagtcccggaacccatcggtcgggcgcggcgcgggagtgattccgtggcgcgcccgaccgtggacggcccatccggccggtgacgccacgggcggtggcgagggaatcgataagggagacgttatgcggttcttgatgcaacgtttgctgctgttcgcggcggcgctgttcggcatctcggtgctggtgttcgcgatgctgcgcatcctgccgggcgacgtggcggtcgtgatggccggcatgaacgcatcgccggcgcgtgtggcggccctgcgcgccgaattcggccttgaccggccgtatgtcgtgcagtatctcgactgggccggagggctgctgcacggcgacctcggcgtgtcggcgctgaccggtcgggcggtgacctcccaggtcggccaacgtgcgacgatcacgttcccgctgatcgtgatgagtctggccatcgcgctcaccctcggcttgtccatgggcgccgccgccgtgatctcccggtcgccagccgtgcgcggtttcctgcgcgtgctgtccatcgtgggcggcgccgtgccggccctgtggagcggcctgctgctcatcctcctgttcgcacggggcgtgggccttgtcggtctgctgccctcgcaggggttccccgccgctgggtggggcgctcccgggcgggcggtctcgtccctgatactgccggcgctcgccaccggattcgtgtccggtgcgggcatcatgcgctacacgcgctccattctggaaggcatcgccgatgagggagggccgatcgatatggccatgtcctgcggcatgacccgcacccaggcgttgctgcgcgtgggattgcgattggcggctccgcagctcgtctcggtggtggggctggcgttcgcctcgatgatcaccggcgtgatggtggtggagaacctgttcgccctgcccggtctgggcgctctgctggtgggcgatgtcggcaaccgtgatctggtggccgtacaaagcgagctgttcctgctcgccgcgttcttcctgctgatcggcctgacggtggatctgctgcacgcgctgcttgacccgcgtctggccgccggaaaggaggaatgatggttgatcgcaatggtcgatggcgtcgttcgggcgtggttctgggcaccatctggtcccggggcaccggccgctactcgctgatcgtgctgggatcgtggatggtcgtcgccctggtgtcgttgttctggaccccgcagtcgttgctggccaccgacggctaccacgtgtgggataagccgtcgtccgcgcattggctgggcaccgacggcaccggcgcggatgtgctgagctggctgatggccggatcgcgtacgaaccttgccatcgccctgctcaccgttgtctgctcggctgccatcggcatcctactggtcgggctgatggtcgcccgttcttcggcgctcgcttcggcgtcggtcgccgtggtcgacgcgctgatctccatccccaccgtgctcatcgccctgctgctcgccgtgccgttcggcgcatccgcggccgtggtgatcggcgcatgctccatcggctacgggctgcatctggcgcgcgtcgcccgcccggccgccctgctcgccgcccgctcgggatacgtgcagtcggcccgggcgaacggtgccagcgggttcggcgtactggtcagacacatcgtgccgaacatcacgccggtgctgatggtgcaatcgtcgatgtcggcgggcacttcggtgctggccgaggcgggcctgacctatctgggcgtgggcgtcggcgcgggggtgccgagctggggccattcgctggccacctcggtcaaactcatcaacgtgtttccgttgacggtggtgtggcccggtctgatcgtcaccctggtggtggtcgcgctgaacctgttcggcgacgcgttgcgcgacgccaccgacccggtggctaatcccgcgttgcggcagatgactgtgcccggtgcggttgtgccggtggctaggggagccggtgacactgcggcgcagtccgcagtggcagcgccgaaggagacggatgatgagcgttgaaattcacgggctgaatattgctatcggcggcaaaccgattgtcacggatgtcgatctgtccatcgcggacggcgaacgggtcggcctgatcggttcctccggctccggcaaatcgatgatcgccaagtcattgctcggcctgttgccgcgcgaggccgtgctgtccggcaccatcacgatgggagaaaccgccatcctgtccggagaaaccgccgagtcgcggcatgggcaggaagatgactcaggatctgacgaagaacgcggcgcggcagataggcaccatgttgccggtgaacgcagggttgccacctcgggccacgattccgctgcgtacgccgacgagcatacgcttgccgatctgcgcggccggtatgtgggtacggtattccagaatccggcccatgcgctgaacccggtgatgaccgtggcgcagcagattgcgttgccgttgagactgcattacgatctgaccaaggccgaacgtgctgagcgagtgaataccatgctggacaaggtcggactggaccgtgacgtggccggcacatacccgcacgaactgtccggcggccaacagcagcgcgtgggcatcgccacggcgctgatcacctcaccgcgattcatcatcgcggacgaacccaccaccgcgctcgactccatcacgcaacgtcagatcgtggacctgctgacctcgttggtggacgacgccggcgcatccatgctgttcatcacccatgatttctccgtactcgcgcgtgccaccacccgctgctacgtgctggacgccggccgcatcgtcgaatccggacccaccgccgacctgcttgctgcaccgaccacgccgcaagcccaacgcttggtcgccgccgcccaaaccctcaccctccacacccccaaggaggattcgcatgagtaacagcagtgtgccactcctctccgcccactccatcaccaaatccttcggaccgcgcaccgcacgccaccaagtcctcttcgacgtctccgccgacgtccacgccggcgaatgtctggccgtgatcggcggctccggatccggcaaatccacgctgacccgcattatgctgggcttggaatccgcggactccggcagcgtggaatacgagagccaatccattgtcggcggccgaaaatcgccgggattcgcgaccctgcgccgcgaatcgggactggtgttccaggacccgttctcatcactcgacccgcgttggcaagtcgccaaatcggtggctgaaccgctgagtctgcagcgacgtgatctgaacaacaccgatatcgacgagcgggtggtcgcggctctgaccatggcgggtcttgaaccggcggacttcctgaaccggtacccaatcgacctgtctggtggccaggcgcagcgcgtggtcatcgcccgcgccatcatcaacgagcccaaggtaatcctcgccgacgaaccaatgagcgccatcgacgtggccgcgcgcatccagatcctcgacgccttcgccgctatccgtgaggcccggccgagcaccgccatcatcatggtctcccacgatcttggcgtggtgcagcacatcgccaaccgcatcctcgtgcttcacgacgggcgcgtcgaagagacgggtcccaccgccgaagtgctcggcaacccccaatccgattacacccgtcagctcatcgaggcagcctcgttatagatctttttggctcccctccctgaggggagccggccgccggcgacacgcgcttgtcgcgggttgtgctatggtgtgaggcatgcagattatctcatgttgttgtcgctaaccgacgcccctgggcgagcggtcagtgacgcataacttgagatggagcattcgaatagcggcgaatctgccgcatacttttcatgtatctgatggcacaagcgtaatcgtgtaatgcgcgagccgtggttaacatgaaaaaccggttcacttttcggattcaccgtacagtgagcgggaatactcgattttcaaaccaaagccacagtccattcgtctgggaacgtcggttcacgaacgcaacgcagcaaaacccccacaaccccagcaacgaaggacttcacatgaccatccacaacagcctcgcagaactcatcggcaacaccccgctcgtcaagctcaaccacatcccgcaggcggccggcgtcaaagccaccatcgccgtcaaagtcgaatacttcaaccccggcggctcctccaaggaccgcatcgccgagcgcatcatcgacgccgccgaacagtccggccagctgaagcccggcggcgtgatcgtcgagcccacctcgggcaacaccggcgtcggcctggccctggtcgcccagcagcgcggctaccgcacgattttcaccctgccggacaaggtttccgaatccaagcgcgcggtgctgcgcgcctacggtgccgaagtcatcgtcacaccgaccgacgccggcccggacgacccgcgctcctactaccaggtcgccgaacgactggccaacacgattcccggcggcttccgcccgaaccagtacgacaacccgaacggcccgctgagccactactacaccaccggccccgagatctgggaggctacggaccacaaggtcacgcacttcgtggccggcattggcaccggcggcaccatctccggcaccggcaagtacctcaaggaagcctccaacggcgcggtcaaggtcatcggctccgacccggaaggctccatctactccgcttcctcacgcgacgaagtccaccagtacgacatcgagggcgtgggggaggacttctaccccaaggctttcgaccggaacatcaccgacgacatcgtgcgcgtatccgacgccgaagcctttgaaatgacccgccgtctggccggagaggaggcgttgctggtcggcggctcgtccggcatggccgtggccagcgccatcaagtacgcgcttgccaatgatttggacgagaaccagattgtggtggtactcgcccctgattccggccgcagttatctggagaagatcttcaatgacgactggatgcgtgccaacggctacggcgacatcgtggaacacaccggcaagccctccctcgccgagcagtaccttaacggaactccctctgatgagggagctgcggatggactccataactagctatcaaaagaatcaatactaactaaccgcacctgttttaccttcgaatacggaacaatcccgaaaggaacccaatatcatgtccgctgaatacaacgccaagttcgccaacaccgacatcgccactcgcgccatccacgccggccaggagcccgacccgaccaccggtgcggtcgtcacgccgatcttcgccacctccactttcaagcaggatggcgtgttgggcctcaggggaggccacgactactctcgctccatcaaccccactcgcaccagcttcgacgagcagctcgccgccgtggaaggcggcaagtacgcgctgagcttctcctcgggcttggccgccatcgacgtgctgctgcgctccaccatcaagcccggcgacaacatcctgctcggcaacgatgtgtacggtggcacctaccgcctgctctccaaggtgttcgtgccatggggtgtgggcctcgacgtggtggacatcaccgatctgaaagccgtggaaaccgcattggcctccaagcactaccagtatgtgtgggtcgagaccccgtccaacccgctgctcaacatcaccgacatcgcggccaccgccgaagttgcccacaagtacggcaccaaggtcgcggtcgacagcaccttcgcctcgcccgcccttcagcacccgctggccgatggcgccgatgtggtggtctactccaccaccaagtacatcggcggccactccgacgtggtcggcggtgccgtggtggtcaacgacgaggagacccgtgagaaggtcgccttcctgcagaacgccgccggcgcagtgccctccccgttcgactcctggctggacatccgcggcctgaagaccctggatctgcgcgtcaagcgccacagtgccaacgccctgaaggtggccgaatggctcgaatcccagccctctgatgtgattgagcgcgtctggtacccgggcctcgagtcccacccgggtcatgaaatcgccgcccgccagatgcacggcggcttcggcggcatcgtctccgtgcagctcgcggccggtgccgaggcggccaagcacttcgtggaccacacgcagatcttcacactggccgaatcgctcggcggtgtggaaagcctcatcgaggtgcccgccgccatgacccacgcctccgtggccggcaccaccctgcaggtgcccgccaatctggtgcgtatttcggtcggtatcgagaacgccgacgaccttatcgccgatctcaagcaggcgttggatcgtatctgaccgtactgacggtactggtggcaccgtattgacggtgccaccacgcttatcggcggactcgctatcgattggtacctacaaaaaatccccggcccacaagggtcggggattttccgttatcgattaaacatggatcgaatcagctggcgttgccgccctgccatccggtggcatccgcaccagccgggcgcaacgcctgaccggaagtcggtgtggtgccatcaacgaccacacgagtgccgatggtggcaaagtcgtacatccacttggcgtcggccacctgcatgttgatgcagccgtgcgagcctgggataccctgctgcacatagatggggtgctcgccccacatgtatgcaggaacaccgtgcagggcctcgccgccgttatagtaggaaatccacggcgtgcctggctggttgtagccttcgccaaccatggtctgcgattcgtacttgagatacacgtaaaacgtgccggtatcggacagcatggaaccatcggcggtgggcttgccagaagcgatgttgaacttcttgaccaccgtggtgccctgatatgcagtggcagtctggttcgtcagatcaacatgaacccacttatcgccatttgccgtatcgaagttatgaggcacctcgacctgcttgacatcatatgggctgtctttcacagccacagtggaatcagtggactggttctgctcgatggcggtagccagacgttcgggggcgtccccggcaccagtcacttcaataccatccacaccgagtgtcttatcggcaccaatttccacgccgccttcgtctttcggcgtgatgtagacctcgcgtgtcaccttgggaacagtcagttctttggttacgctgtcactggtgacgtacttggtgatggcatcgcggtcgactaccagactcatggtgccacccgccttattcaccgtgggcttgaggaatgaggcaatggtatcggccgggatggtgacgctcttgttcacgccgttgtccacggtcagtttgaggccaagcttggcattggcgtcaaactgtgtttgctgtgcgctcgcgtcatcaatcggattctttgcagtctgtagcttgaccggcaccgtcgcattttcgcccggggtcgcgacggcctccttgactgcagcattgacaacattgatatccggacccttgccatcctgacccgcggtgtaatcgaactgcttggtgctcttgttgtagacaacggtggcaatctgcgctcggtcggcctcatcgaccaggccggcggtgacgaattgttcggcagtctctttgtccctggtggcggtcagagcgatatgcggctgatcgaaaatattgagcttggccacgtcgccggtcttcgcgttcaacagcgcatctacggttttatccgtgtcgacggtgacgccaaggtccttcagcgaggctttgacgctgttgccttcggcggtgaacgtcactgtggtgttattcagctgctgcttcacagtattcgcaagttcttcgcgggtctggcccatgacagagacattgcccaaatgaacaccgggcgcagccttgtcttggaagtaccaacgtccgacgaagaaataggctattaatgcggcaagcaacactgcaaatatggttatgatggcaatccgtgcggccttgccatgtgatttagcggtggtagatgccataacatgttcacccacataggctgtattgtcggcatggttattggtgccattgtcgctttgctgtggcgtggcggtacctgtggccgcggctgcgaacagcccatcggcggccacaggctgcagcaccgccgtctcctgatcgtcaggagaggagaaggaaaatgtatcgttggccataaaatgccccgtcttagttctctcaaagcggcatatcgtgcgatatgccgggaataacgtttcttgacgcataataatacggaagggctacgtacatcgttacgaggtattccgttatacgatgaaatccatccgcggtcggcctacactggtcgtttatgacagcacatcaggcggcgctggaggcgctcacacgatacttcggctatgactcgtttaggcccggacagcaaggaattgtcgaggctttgcttgccggacgcgatgtcttgggcgtgatgcccaccggcgcaggcaagtccgtgtgctaccagattcccgccgcgctcagcccgggtgcgactttggtcatatctcccttgatttccctgatgcgcgaccaggtcgatgcgctgaacgacctcggtctgccggccgcgttcatcaacaccactcaaactcccgacgagcaggcgatggtgttcgcccaagccgccgccgggcagatcaaactgctgtacgtggccccggaacgcttggaaaccgggcgattccgcgactttgccgcccgtacgccgatctcgctgatcgccgtggacgaagcccactgcgtctcccagtggggtcaggacttccgctcgtcgtacttaggtatcggcgatttcatcgccgggctgccgcagcgtccaccggtgggtgcgttcaccgccaccgccaccgaacgggtgcgccgggacatcgtgggactgctgggattgcggaatccggccgtcaccgtcaccggattcgaccggccgaacctgtattttgatgtggtcaaactggagaccaaatacaaggccgcatgggtggcgcggtatgtggccgaccatccggacgaatccggcatcgtctactgcgccacccgcaagaccaccgaagcgctcgccgacacgctgaaccagatggggcatccggccgtcgcctaccatggcggcatgtcgccggacgcgcgtgaggtggcccagcgcgacttcatcaccgacaaggtgccggtggtcgtggccaccaacgccttcggcatgggcatcgataagtccaacgtgcgttacgtcatccaccacaatctacccgaatccattgaagcctactatcaggaggccggccgcgcgggccgtgacggcgagcccagccgatgcacgctgctgtggaatgagtcagacatcgtcacccggcgtcggttgctggataacgattatgagaacgagcgattgactcccgaagagcaggagatcgttcgccagtccaagcgccggctgctggacggtatggtcggctactgccgcaccaccgactgcctgcaccggtatatgacccggtatttcggtcaggaattgtcgccgaatgctggttccgcggcgggtgaagacattgcggcggactcttcgcagtccggcagatgcggtgcctgctcgaactgcgaaagcacgttcgagaccatcgacgtgacccgcgtggcgcaggcgatcagccgttgcgtgcatgacgtggggcagcgcgtcggttccggcaagatcgtcaagatcctgcgcggttcgcgggcacaggatctggcatggctgaacccggagcggatgcccaccttcggcatgctcaaggacgtgaacgaggctcgcgtgcgcgacgtgttgagccagatggccacggacgggtacctgtcaatcgccgaagggcgtatgccaatcgtcatgttcggtgcgcgggcggccgaaaccgccgctcccgacttccactatgagatcaaacgggtggaacgcaagtcggcggcggccggttccggtcggagcgggggagtggctgatactgccgattccgccaatgttcccggcgatgcgctgggctcgtatatcccggacgatgacgaggaatcgctgttccagaagctacgcgaactgcgacgcaccatcgcccaggaaatcggcaagccgccgtacatcgtgttctccgacaagaccttgcgcgacatggcccgcatcaagccggttaccaacgcgcaatttctggcggtcaacggcgtcggtcaacacaagctcgacctctacggccagcgcttcatgcaaaccatcgcctcgttcaatgccgggagtgcgtcataacaatctcctatagcgaaccgcggagtatttgcgggcgttcttgggctggcgcgactacgatgactgttcgatacttcatgaccgaacactcagcaagtagaaaggcaacagcatggcagaagacaaggccgaaaagcccgtcgtcgaatcattccagcttgatcacaccaaggtcaaggcgccgtacgtgcgttacatcgacaccgaaacgggccctcacggcgacgtgatctccaattacgatctgcgcctgacccagccgaacgagcaggccatccccaccggcggcctgcacaccatcgaacacaccattgccgtgctgctgcgtgaacgcattcccggctacatcgactgctcgccgttcggctgccgcaccggcttccacctgctgacctggggcacccactccaccgaggatgtggccaaggcgttgaaggaatcgttggagttcatcgcatacaaggccacatgggatgacgtgcccgccaccaccgagaagagctgcggcaactatcgcgaccacagcctgttcgccgccaaggaatgggccaagcagatccttgaggaaggcatcagctccgacccgttcgagcgcaaggtcgtctgattcgtctgattcggttcaattctgattcggctcccgctggcgggagccgggggcgaagccgactgagggtggctgtcctcaactcggctggactgtccggctcctgcggacggaagccattgtttattagtgtccgtcatgcaacgcggaggggatttcttgtgcctacggcatggtaggttggccgtcagttagtcgccggtcaccgtgccggcaacccggcatgtcggagaggtgagaagtgactcagtcgaacgctgcaaacaaggcgacaggccgccgtttccgccacgccaccatgcgcgatctgccgcagatgcataaaatctacgcacgcgcacgcgcgttgatggccgccaacggcaaccccacccagtggggcaacgaatttccgcgtgaatcggtgattgaagacgacatcgccaaccagcgtacgatgctgctggtcgacacctgcaatggccacgaacgcattctggcccagttcgccctgtgcccgggcaaggatccgacctacgccaaaatcgacggcgcctggctggacaacgacacctatgtgaccatccaccgcatcgccgcatccggtctggtgcgccacgcggcccgcgactgcatcaggtgggccctgaagcactacggcaacgtgcgcgccgacacccaccccaataacaaggccatgcagcacgtgctcgaaagctccggcttcgcccgttgcggcctgatccagctgctcgaccggccggtcgacaccaccagaatcgcctatcagcgccacgagtggtgagtgtggctgtcgccagcgtgttcggttccgcggtggagctggtcaggtaaggtccacgtcgtcgcgcacgtacggtccgtcggccgcccgttcaaactcgtgcatatcgcaaaaaccgtacgctgaaagtaactcagcgtacggttttcacgaaagcagctatcggctatcggtcagccgatagacctcagtcctcagtcgcagcgaccttggtgtcagccccggccttctgctcaaggccgagcttggagcgcttgcggctgtagccgaagtacacgatcaggcccagaccgaaccagatggcgaaacgcacccaggtctcccagttgaggccggcgatgagcacgaagcagaatacgatggccagaatcggggtgaccggcacgcccggcgcgcggaagccgcggggcgcattcggctgggtcttgcgcatccatagaataccggccgacacgatgatgaacgcggacagcgtaccgatgttcaccagctcgaacagcacgttgatgttgatgaagccgccggcgaacgcggtcagcagaccgaagaaccaggtgcccttgaacggggtgcggtacttctcgtgcacgtggccgaagaacttcgggaacaggccgtcacggctcatggcgtagcagatacgggactggccgtacagctgtacgagcatcaccgtggtcatgccgatgagggcgcctaggttcacgatcaccgcgagccagttcatgccggtctccagaatcacgccggccactggggcgtcgatgtacttggcgaactccttgtagggcaccacgccggtcatgatcatggtcatgacgatgtagagcacggtggaaacggccagggacagcaggatgccgcgcggcagtgtcttgttcgggttgatggtctcctcggcggaagaggacacggcgtcgaatccgatgaagctgaagaacacgatggatgcggccggcacaatgccgtacggctgggtggagccgggctggaaagtgtagatgccgtacggggagaacggctgccagttggacggcttgacataccacacggcgcacacgatgaacagcacgatgatggcgagcttgatgagcaccatcacgtcattggtgcgcttggtctggttgatgccgatcgagagcacccacgtgatgatcagcacgatgacgaaaccgggcaggttgaagtaggtggtgacgtccgggttggtgccgtaggcggcggtcagctcgaccggcagatgcagtccgaagccttccaacaacttgttgaagtatcccgaccagccggcggacacggtggccgcctgcagagcatactccagaatcagatcccagccgatcacgaaggcgatgagctcgccgaacgccagataggcataggagtaggccgagccggacaccggtgccatggcggcgaactcggcgtagcacaggccggcgaaaccgcagcagacggcggccagcaggaacgatacggacagggccgggccggcggtgagcgcgcccttgccggtgagcacgaagataccggtgccgatgatcgcgccgataccgagcatcgtcagatcgaaggtgcgcatcgtgcgcttcaggggagtggattcggcgacaagctgatccacgcttttcttacgaaacagatccatgttcttctctcatgaaacttaagatatggggctagaccggacggatttccgggatcccggcacgcctcaacgccgggaatcaaaggcggcttccgagaaaccgcatatcggtcattagtgtacgactgccgggcgaaaacaaacgattgtgaccacacgtcacattcctgcgcaacaataggtgcctatgagcatgaacgcagcacccgaaatcgcattctcgtccgagcagggcaaggccaactatgcggccgcccgccgccaataccccgcacaggccatcgtgaacctcaaaaccatgcgcgacaacatggcccacctggtctccgtggtcggcggcccgaactccggcacggcggtgatgggcgtggtcaaggccgacgcatacggccacggactgctgcccgccgcactggccgcgctcgccggcggcgcgacatggctcggcaccgcgcaatcgcatgaagcactgctgctgcgcaaactcggcatcggccccgaccgttgccgcattctgacttgggtctacaacggcaccgaagtgccattcgatgagctgatcgctgccgatatcgacgtatcggtcggctccctgcccggcatcgatgccgtggccgccgccgcacgcaagctcggcaagcccgcccgcgtacacgtcaaggtcgattccggcttcggtcgcaacggtttcacgccggctggattcgacgccgcgctcgccaaactcgtgccgctcgccaaagagggcgtgttgcatattgtgggtcagtggagccatctcgccgtggccgattcgcccgatgtgcccgaattcgtgtcctccaccgaccgccagatcgaaacattcaaggacttcacgcgccgcatggaacaggccggcattccgccggagatccgtcacctggccaacacggcggccactttggaccgcccggagattcacttcgaacttacccgccccggcatcggcctgtacggctacgagcccgatcccgcgatgggcaccccgcgcgactggcatctgaccccggccatgcgcctgcaggcgcagctcggcacggtcaaggatgtggaggccggccatggcatctcttatggccgcacctacctgaccccggacaacacctcgaccgttattgtgccgctgggctacgccgatggcatccaccgctccgcttccggtttcgatatggaaggtgccaagcacgtggagaagccgggcggcccggtgcgcatcatgaccactgaaggttcgaagctctaccgcgtgtgcggccgcgtgtgcatggaccagttcatcgtggacctgcacggatccgccgccgaactcggcgttcacgagggcgacacggtcgaactgttcggcccgggccgcggcgaggattacgttgagcctaccgccgacgattgggcccgcgccgccgacaccatcagctacgagatcttcacctgcctgcgcaaccgcatcccgcgcctttacgagcatgccgccgaagtactgcccgccgccgacctcgccaagctcgaccccgccacgctgctataaggtgcattaccgccatacggtggcaccccgtaatcccttcttcccgaatatgtaccactgacatgtgctgagcgtcacatattcgggaaatcggccccaatctcccgaatatgtgccgttgagttgacgtcagtggcacatattcgggaagtcgggattactgcggccgatatgtgtgcctatgcttggcatatggaaacaacgttggatggggaacaggtgctgagcgatgagggctacaacgccttcgacgaggagcgatgggcacccgagccgcccaaatccaagtcgcgcacggctttcgaacgcgatcgcgcgcgactgattcattcgtccgctttgcggcgtttgggcgcgaaaagccagattctgattgccggtaccgacgatttcgcccgcacccgactgacgcatacgctggaagtcgcccagatcggtcgccaaatcggcgcattgctcggctgcgatccggacgtggtcgactgcgcctgtctggcccacgaccttggtcacccgccgttcgggcacaacggggagcgtgcgctcgccgacatcgccagcaatatcggcggcttcgagggcaacgcacagaccatgcgtatcctgacccggctcgaacccaagatctttcacccggacgggcgttcggccggtgtgaacctgacccgtgcggccttggatgcggccgtcaaatacccgtggaccttggccgaagccgaccaacaccccaagggggagcggtcgaagaagttctgcgtctacccggatgacgaaccggtgttccgctggctcaaaatcggcgctccccaggccaccaagcccatggaatgccagatcatggacctttcggatgatgtcgcctactccgtgcatgatgtcgaggattccatcgccaccggcgcgttcgatccgattgtgctcgccgatccgaagatgctggaccacatcatcgagcagacgcgcgcatggtatggggcgaagtgggatgccgacaagctgctggccgcgttcatgcgattgcgccgagagcatttgttccctgcacatttcaatggttcgcgcgaatcgttggcacagctcaagaacatcacatccgatttgatcggtcgcttctgctggtcggtggaaaccgccacgcgcgacacgtatgggcccgggccgttgacccggtattccgcgaacatcgtgattcccgaggacacgaattacgagatcgtggcgttgaagggcatcgccgtgtacttcgtcatggcgcctcgcgagcgcgagccattccatcaggaggagctcaagatcgtatcggatttggtcgatgtgcttatggccgattcgccgctcccatccgacgctttggaaagccagttcctggccgattggaatgaatccaccaatgacaacgagcgcctgcgcgtcgccatcgatcaggtcgcaagcctgaccgacaactccgctctggccctgcactccatcttgtgctgagggcgtgttggacgggtgcttccctcagtctcgctgcgcgagccagctcccctcgggtgaggggagctgtcgctgtaggcgactgaagggagtttcgcggaagaaatgataaccgacggtaaaaatttaccgtgtctcaggtgaggcggtactctagagacttatggtcggaatgattaagaaagaggatgtcgagaaggtgcgcgccgccgcggacctgtatgacattgtatctgcgaccgtaacgcttaagccctccggcaccggcaccttcgtgggcctgtgcccgttccacgacgagaaaaccggcagcttcaacgtgcgcccctcacttggcgtgtggcactgcttcggctgcggcttgggtggcgacgtattcaaatacgtcgaacaatccgaaaacatcgacttccgcgaagccgtggaactgctcgccgacaagtaccatatcgagctgcactacgagaacagcggcaacggcccgaaccgcgagaacaccggctccaagcgcacccgactgctggaagcctgcgaggaagcccaacgcttcttcgtctcccagatcctgaccaaggaagcactgcccgcccgcaagctgctcggaggccgcaacttctcccaagccgactgcgaacgtttcggttgcggctacgcgccccaaggttgggataatcttgtgcgccacttggcctccaaggggtttacgcagaaggaaatcctcgacgcgggcttggcccgccaaggccagcgcggcatctatgactatttccgcggccgcgtgacgtggcctatccgcgattcgaccggccgcacgctcggcttcggcgcgcgcaaactatacgaagacgatcagatcgccgccaaatacatcaacacgccggacacgcagctctaccgcaaaacccaggtgctttacggcatcgatttggcgaaatccgccatcgtcaagaagcgacaggtggtgatcgtcgaaggctatacggacgtgatggccatgcacttggccggcattgacaccgccatcgccacgtgcggtacggcgttcggcgccgagcacgccaagattgtgcgccgcctgatcgccgacgattcgctgggcgcggtccagctggtcgggccgttgaaggtcaaggaccagccgttgagctcgcgcatcgtgttcacgttcgatggtgacgccgccggccagaaagccgcgctgcatgccttcggccttgattcggccttcctctcccaaaccttcgtggccgtggccgacgacaatctcgacccgtgcgacctgcgcatcgagcgaggcaacgaagcagtgcgctcgctgatcgcccgcgccaaaccgttgtatgacttcgtgatcgacgccgccatcagccggttcgacctgacctacacgcccggccaagtgggtgcgatgaaagccgtggccccgctggtggcgcagattcgcgaccgctccctatgggacgcttacgcgcgcaagtccgcgggccgtatcggcgtggatcttgaggtgatgcgccgcgaggtgatgaacgcgcgccggcagatgcatgtacgcgatgaggacgcctacgcgcccaaacgtcgattcgagcgtgacgagccgcgtgtggaacccggcaccaacccatacgccaatccggccacgcgcaaggcgttggagcgccgtgacgccgccgaacaggcatatttcaagatcgacgacgccgtattcatcgccgaacagcagttcatggccgtgctgattcaggtgccgcgcgccatcgaccgcaccatgttcgggcagctgaccatcgaccatttcatgacttcggtgttccgcaccctgttccaggcgatcgcggccgccggcgggctgccatccgacgataccccgcaggggctgtggatgcacaacctcaccaaggccggcgggccgatgctgaatcaggtgatcaacgagctggccgtcatgccgttgccactgcctggcgacgacaccggtagcggtgcgcagccggtgcaggccaacgtgtcgggaggaggtgttggcgtgaatggcggtgccgccgcagtacagctgcgtcctgccacgccggaggagcagcgctacgccactgagcttctcacccgattgttggacatgggcttcatgcgccagatcggtttggccaaacgccgcatggcccagctgcccgacggcgaagagaagataaccctcctcggccagatcacccgcatggaaaccgcccgtaaagacctccaagcccaaatctacggcaacaccgtcggctaatacctcccactgattgcgcgcatcttcgaatacgtgccggatgcataaggccatacaaccggttgccggattggatgggtgcagaagttgcggattggccccatccaaattggactggtttgggtggggccaatccaatccgttcaataatgaagcgcgataccaagcagcgtcgaacgaagggaaactcatgacgcagaatcgtgcggaactcaaccgtaatctggcccagatgctcaagggtggcgtgatcatggacgtcaccacgcccgaacaggcgaaaatcgcgcaggatgccggcgcgtgcgcggtgatggcgctggagcgcatccccgctgacattcgtgccgccggcggcgtctcccgtatgagcgatccggccatgatcaagggcattcaggaagctgtctcgattccggtcatggccaaggtgcgcatcggccacatcgccgaggcccgcattctgcaggccatcgacatcgactacatcgacgaatccgaagtgctttccccggccgacgacgtgtaccacatcgacaagaaccagttcgacgtgccgttcgtgtgcggcgcgaagaacctgggcgaggcgctgcgccgcatcgccgagggtgctgccatgattcgtaccaagggcgagcccggcaccggcgacgtgattcaggccgtgcgccacatgcgcaccatgaacaagcagatccgcgagctcgtggccttgcgcgacgacgaggtctacgaggccgccaagcagctggccgtgccctacgacctggccaagtacgtgcacgacaacggccgtctgcccgtcgtgaacttcgccgccggtggcgtggccaccccggccgacgccgccctgatgatggagctcggtgccgaaggcgtgttcgtgggctccggcatcttcaagtccggcgacccggccaagcgcgccgccgccatcgtcaaggccaccgccaactggcaggacgccgatctgctcgccaagctgtccgaaaacctcggcgaagccatggtcggcatcaacgaggacgagattcagaccatcatggccgctcgcggcgagtgagtgcattaccttggctcccctctttgaggggagccaagaaagggtgacgctcccgccagcgggagtcaaggcccaaggagacaacatggttgtagctgttgaatatatttccaaagaagagtccgcggacgtcgaaaacgtcaagcacggcgtgaccggcatcctggccgtacaaggcgcattcgccgaacatgcggcggtgctggacaagctcggtgcgccgtggaaactgctgcgcgcggccgaggatttcgatgaatccatcgaccgcgtgattctgcctggcggcgaatccactacacagggcaagctcctgcattcgaccggactgttcgagccgatcgccgcccacatcaaggcagacaaaccggtattcggtacttgcgccggcatgattctgctggctaaaaagctcgacaatgacgacaacgtctactttggcgcgctcgacgccgtcgtacgccgcaacgcctatggtcgtcagctcggtagtttccaggccaccgccgattttggtgcagcggatgatccgcagcgtatcacggacttcccactggtattcatccgcggaccgtacgtggtgtcggtcggacccgaagccacggtcgaaaccgaagtcgatggccacgtggtgggcttgcgtcaaggcaatatcctggccaccgccttccacccggaactcacggacgatacccgcatccacgagctcttcctgtcgctgtagtcgattcgtctgccgttagactggtatccgactgacgaatcaaggagacgatctgccatgcagcttgagctgaatcgacgcagcaaggtgccgatgtaccggcagctggccgccgggctgcgtgaacagatcgtctccggcgcgatggccgagggctaccgcctgcctcccgaacgcgagctgtcctcgcgtctcgaagtcaatcgcaccacggtgttgcaggcgtatcagcagctcaaggacgaaggtcttatcgcctccaaagtcggcaaaggcacgttcgtgctgccggctgcctccgcaagccgaacaccgcacacgtcaaacagtgacttcgggaatgcaataacgcgaacaacacgatcgtcggcagaaatgggaacatcgcaagcctcctcttccggcgacgtagaacgtgctacctccactggtttcttgacgacggaccagggcagcagctctgcggcggtccatacgattcgtgaaagccgctcggttcagggcccggagccaaccgtcgtgcgtccgccatggtcggtgttgttctctgattattccaaccggtttacctaccatgacatcgcctcggccgagcgggcgcagcgcggcgacaccattattgatttcgccaccggttcgccgaacccggcggatatcccggacgatctgctgcgcaaggtgagcatcgaggcgttcgaatcgcgggaattcgacggacaaccggaatcacctatcgagggattcgaagagttgcgtgcgctgcttgccgaacatatgcgcacacgaggcgtacaatgcggcgtccgcaacgtgatggtgctctccggttccgagcagggcatcgacctcatcgtgcgcgcgttcatcaaccccggcgactgcgtgctggtcgaacaatccacgttcttcccggcattgcagaccttccgttcggcggatgcgcgcatcatcggcgttccagtggacgagcacggtatgcgtacagacctgttggatgggtattgcgcgcgattccggcccaagctcatttacaccgtcccgacattccaaaaccctaccggtaccacgctgccgcccgaacgacgcagcgaactcatcgacgtggcgcggcgctatcagtgtctgatcgtggaagacgatgcttacggcgatttgtggtacggcggggaatcgtccgacgcacatcgccccataccgctcaaaggcatggagaatgcgggatacgtgatgtatttgtcgacgttctcgaaaaccgtcacttcgggcctgcgcacgggatgggttgtggccgacccgcatgtgattaaccggctggcggctctgcggcgcatggtcgaccagcatacgagcacgtcatcgcagcgcatctgcctggaactgcttaaagaaggccgcgtcgccgaacatttgcgcggtttgatcaaggcttaccgcattcgacgagatgcggcaatcgcagcattggagcggtatgcgccggatgaagtgtattggaccatgcctgcaggcggctactatatttgggtttccttaccggacggcgtgcgctctctggatgtattggaatcctgccgttcccaaggcgtcacgttcatgccgggcagcgtgttcgacgttgacgaaatggatgattcccacatccgtctcaactttgtgcgcccggatgctgctgacattgataccggcattcgaatcattggcgagacgatagcacagatgtagccaagtgactggctcattgcggttgtcgagtttttttgatggctgcatacccacatcgatgggtgcattcgacgaatgaataagcgaggaagccatcatcagttcgctgtggcatgcgcatagcgttgtcgggcgaacggggcagaccacgtggtcgttgcgtgacctggccgatcgagccggcatcgcattgcccctggcgtagtggcgaggtggcgcagtaacgagtcatgccatcgcgagccgatgatgcgaaatgcggaaccggtcgcggccatcaacgggtatcatacatgcgggagcaacgatacgttggcgtcagcacatccatctgactccagaaagggacacgatatgaccacatcctccgtttcgccggtgaccactgaactggcgggcagcgaaaccggcatcacgcttgtcgttcacgccggagcgggcagtcgtggcaagcacagcacgcctgaacgcatcgcccaggtcgaacttgatctgcagcgcgccctcgatgccggataccagttgttggaatccggagcgccggcgcatgaggctgtggtcgccgccatccacgtcatggaagacgctcccgaattcaacgccggctgtggtgccgccctgaccagcgatggcatcgcccagatggacgcctgcctgatgaccggcgatggcgaggtcggtgcggtcaccggcgtaagcaccgtgaagaatccgatcgatgcggcgcgtgccgtcaaagagcagaccaagcatgtgctgttcgcggacccgaccgatgccgagatcgccgattggggcgtcgcgaccgaaagcaacgagtacttcatcaccgaacagcgtcgtcagtccttggccgaggctcagtccggtggcgatgagtgggagaagcatggcaccatcggtgccgtggcgcgcgatgccgagggcaatatcgccgccggcacgtccactggcggcatcaccaaccagatgcacggtcgtgtgggtgattcgccgctgcctggttgcggcacgttcgccaaccagtccacggtggcggtgtcctgcaccggcatcggcgaggcgttcatcaaggtggtcgccgcccatcaggtgtcggatcgtgtgcgtttctccggcgagaacgtcgaggatgccgcgacggccactttggacgaagtcgccgcgcatcatggcgatggcggcatgatcgttctgccggcggtcggccgtggcgtggtcgcctacaacagcgagatgatgaacttcggataccgtagcgcgcaaggaggtaaggtgcagggctgattgccccctgtattgcggcatatatcataatggccggtgtactgcggattcttggtaaggaatccgcagcacaccggccattcatgtatgcggcaagtgccgccgatcagtgcggcagtgcgcgctacttggtgatcgtgttgtacgtgggcatgttcgtgtaatcgaactgcacgttcttcacgttctgtgcagacacggcggcgaaacgtttgaccgggaatactggggtaatacgcaacttcatcgctcctcttcctcgaatgaaactatgttccattggtttgagccagtcacgtacggtattcgtgtctggcctgccacacaatgatgcagccgtatatacgggcacagcattgcgcggcaccggtccaaaaactcatgtccgccagcgcaacgcgactacgtaccttatgccggtctgcgcgtagaatagaacggctgcgatattgggttattcacggaggaatggatgcgacgctggctgatcaatgtagccaaaaatgagacgattctcatcgtcgccgcaatactcgccctgatttcgtgtttcattgtgccgccggacgccgattacaaaagctacattcacgccagcaccatcagccagctcatctgcctgatgattgtggtgtgcggattccagcgtatcggcgtgttccgcatcatcggttcgcgattgctggagaaggtcagcaccatgcgcggactggtcattacgcttgtcgctttgacgttcttttccgcgatgttcatcaccaatgacgttgcgctggtcacgtttgtgccgttcgcggtggccgtgctcatcatggctgggcaagaggataagaccatcctcgtggtcacgctgatgaccattggcgcgaacgtgggcagtatgctcaccccgatcggcaacgcgcacaacctgtatctcaaagccctgaccggcatgccgaccatggaattcctcggcatcatggcaccgtattccggcacggcggccgtgttgctggtcatcgtgatttccgtggtgtttggcggcaaaccggtcggcgacctgggcgacctcgaaaccggcgtgctggctcccgagcgcaacaaacaccagcccgacgagattcgtatcaccggctacggcgccggttatggcggctggcgcaccatcgtctactcgctgctgttcgtcgtctgcctactggccgtctccgacgtgattcccctgtgggtgatgtgcgtgatcgtggtcgtcgtgttcctgttcaccgatcggcgcgtattcaaatacgtggattggggactgccgctcaccttctgcatgttcttcatcttcatcggtaacatgaagcgcgtgcccgaattctacgaactggcgcgctcgctggtcggcggccatccgctggaggtggcggtcggctccagccaggtcatcagcaatgtgcccaccacgattctgctttccggcttctgcgaccaatggcgcgatctgatcattggcaccaatttgggcggcatgggtacgctcatcgcctcgatggcctcgcttatttcttacaagaacgtcgtgcgccaatacccgcacaagaaaggccggtatctggccgtctactccgccgtcaacgttctgtttttggccgtattgctgaccttgagctggatcatcgagccgagtctctgagcccagccatctccaccccgctgacgggggctgtcggcgaagccgactgggccggtctaccgcgcgtatacggtgggggagccggtcagtcggctcatggccgactgcgggatgtcatgaatgcggccgatggtggcatccagcgtggatacgccggatacgccgtctgtgttggctgtggtggatgcagaggtgatgctggatactccgactgcggacgatgatacggccgcaaccatcggctgacgataggcgttggagttgcgggccagccgggcgagcgcagggcgctgcctgcggaacagattgataaacataccgcatactccttcatcgttggccggcggtcttctggccgccgtggtttccatcctgccctcccgtgcttgtattcgctatgggggatagcccctattattccctgaatctgcacgattccccctcatccttgagggtgattctaacggcaaaggaatcggcctaatggccgatgtcaatcagcgcgaagccaccagcgtgacgctgtacggcttgatcttcatcgccagcaatgaagacggcgacggcaatgtgtaagcccgacgttccggcacaatcgcccccgaagcctcgccgcggtatccgatagtggttttcgccgtcggactggcgcttaacgtcgtcacctccaaacgcaccggtcgcgatggcgaggcgcccagcccggccagtccgcgcgcgatttccaacgtcacatccaccggggaatcggaggtattgacgattttgatgtaacggcaggcgtcatccccgtcatgcccggtggcactgacatacagatgtttggcggggcgtgacgcggtctgctcgatggacacggcatatgtcgtgtcgcccagatgcgtggaaaacagccgctccacctcataattcaccgtggggttcacatgcgccggattgagttcgataagattctgcgcccaccccttagccgggatatgcgcgagcagcggtgcataggaggtcatgcgcaccacgtcggaattgcgctcgcaaccggtcaggaacgcggcctcgccgagtgccgacttccacgtgttcgcgccctgttcggtctgcggttggccggcaaaatagccgttggctgaatattcgccgaaatagacgccggcgccgcaacgcgggtaagcgtcgaatcgtgacgcttggtatgcaaaccattcgggggagtggtaagaatgttcgtcgacgataatcgcgtcaccggtggcggaatcatgtgccccggaatcggttgcggccaacgctcgcgcatggtcccagctgcgtttcatcgtcggctggaaggggaacagtccggcgctcatcacacacagcatatccgggtatcgttcgtgaatggcctcgctgatcatgtcaaacttggccacgtagtcagccccgaagttttcgttgcccacgccgatcatgtccaggctgaacggttctggatggcccatatcgcgccggaccgcggcccacgagctggactccggatcgccattcgcgaattcgatgaggtccaggtagtcctgaatcacattgttgcggaaagtggccgaattgatatccatgtggcgcggatcgcggccgggcgactggcatgcgatgccggcgaacagagtgggcagcggcttggccttgaggtcctcgcacaggcagaaatactcgtagaagccgatctgatagctctgcgaatagctggaaccatccggcatcttgaacgaccacatcgaatactgttggcgtcgcgcggccagggagccgacggtatccttccagcgatattcattgccgggcgtcacaccttcgacgatgcagccgccggggaatcgcagaaacgctggatgcaacgcctgaatggtttccaccagatcgcggcgcagcttgccgtaacgccatttcgggtcgcccgcgccccaatagtccgcatccatgaactgcaccagatccagatcgaacgtggtgcgttcgccggcgtcaatggtgatacgcagcttgccgtaatcggtgttcaggccggttacgtcggcgttgaaccggtaccagccgtcacggccgatggcgatggcaccatccgacgaatccggactgatcgaaacgccggaatcctgcgcattggcaccatcgtcctgcctcagaccggtctcttccgtatcgtcaagcggatctgcgtccacgatatacgacaatcgagtggtgctggtgagcggcagaccgtacctatcgaccacgccgacggacagcttcgcccgcccatgaaccggacgtaccgcgagactgacggaataggtgtggtcggcgacgatggagaacgcgggctcgcccccgttgtcgccgcctccgttatagccgaggttttccagatatgcagggccggtttcggaaggaacatcggacgtgatgcgagcgtatcggctatgtgcgtgaattggcggggcggggcagtcggtggtcacccgctggccgtgaatcccgcgtatctcactgccgaggctggcggcggagcagttgatgaaatcccagaaacgcagggaatcggcctgtgtacgccatcgttcggcgccggccatacgccacgtgtgatggtcgagatagacgccgtcaaaactgtagttgttcaccatgttggcgttcagcccgccatccgcaccatggttgatgtcctcgaagaacacgccgtacagccgcccgcttgtgtgatgggtggggcttcccacgctaatccgcaccatggttttgattgtagagggaatggagcggaaaggtaaacggaagagttcgctcaccgttcatgttgcggtcaatccaagtcgactgttcgccggtatacagccggtaccctcgaaacaggaatggaaaatacggacgactaggagcgcggctgtgcaatcctcggtgggaatacgtgagcgcattgaccacgtgtatccgtcgctgcgtccggcggagcgcgccgtggcccagtatattcgggatcatatcgaggaggcggccgacctgaccgtcggccagatggccgacatcgcccacgtcagccagccgacggtgattcgtttcgcccgcaagctcggtttcggcggttaccgtgaactgcggtacgtgttgcgccatccgtccgccgagcacaaagtgaccttcaatccgttggctggattcgatctgaatccgtgggatggcgaagatgagattcccggcaaagcggcctatggcgcgaaggcgctgatcgatgagctgcacagtgcgttggaccccaaggcctatcgcaaggcggtcgccctactcgccgaatcggagttcatcgatattttcggcgtggagaactcgttgacaccggcgatggatctgttcaccaagctcggctacctgggactgacatgccgtctcaataccgacgcttacctgcagcagatcggtgccgggcacctgccccacggcgctgtggccgtcgccttctcccattcgggcagttcggcggatacggtcaaagcgttgcgattggcgaaatcgcatggcgcgaaaaccatcgccataaccaatgccatcggcgcgccgctggccagctgggccgacgtgacgttgctgacgggtcgtgactcgcacacgatctatggcaatgcgattttctcgcgcgtggccgataccgcgctcgtggacatgctgtacatgggcgtgattctgtccgactacggccggttctccaccgcgctcgacgaatccggccgcatgattcgcgatcgcgtattcgagaactgagctgctgctttatcgcgccttgggctgtattgctctggtcgttgccgctttgttgccgctctggtcgttaccgtcctgaggcatgtgccagcgaatacgtagtggacttggcgtgcgtatgacgttcgatcttgccgctcaactccagctggtccaagagctgcgtcatctgatccttgttcaggccaagcgctttctgcatggttttacggctgagcttcacgccgcggaacgcgaggaaattgagcgtgaactgctccaacgtttgaggcgacggttccagcgtcgccgtatcgagcgggcgggtactgacctggtcgtcaccgtccgggcgctcgccgaatccgctgccgagaatcagcgtctgcaatggcgcgcagccgatgatgcgtgcgccggccaaagcatctgcggcgttatccgtcatgcgctgaatcgtggggaatgaatacattttggcgcgctgcgcttcgtcagtggtgctgggcgcggcggaagcatcggtatcggtccgatgcaaggatgcggcctcggccgagaccgggatgggcagcaccatcgccaccgaagtggggcccacgcgcagttgcggactgaccgcgctctgcgcgtaggcgtccataatgcgttgaataccggtaccgcagttctcgcagaggcccaaatcggcgaacaattcagccaaacgcggggtgcgtggctggcatacgccgttgagcagatcgttgatttccaaaccatcggtcaggccgccgagcgagacgatttccaggcgggaatcgaagatattgatcagtgtggggccggagtacgtgtaatcgcgatgttccagtgcgttgaccaatgcttcgcgcagggctatggccgggtattggccggattcgttgataccgttcagcagggcgctggcttggtcgagctggcgcagcaccgagccggtgaatgtgtgacgttcgcgaatggcgtttttgccattgccctcgaaaatggtggccttgataacgaacgggcattggttggacagcagggtggcaagcgacgattcggtggcgctggtgaaggtgttgttggcgccggtgttggtgatgctgccggcgggggcattgccggcatcggcagagacggatgcagccatgttggtcacaaccgggctttcccaatccctgccttcactggcaaaacgaccctgtgcgtatgtgaaagtgagctcaccactatcgcctgcgacggtctggcccgatgcggcgtgatctacgttgctctccgttgtccccatatcgccgatggtaccggtgcaagccgacgttacgccgaggtgttttacacccctacggctagacttacatgagtttggccccgtagctcagctggatagagcatgtgacttctaatctcaaggtcgacggttcgagcccgtccggggtcacgatgcaataaacccttggtccctcatcgtctgtgggggccaggggcttttgagtattatgccggtctgggtccgtctggagcctgaactgtcgaccttgagattagaagtcacatgctcatcatcaccatccgggaacacccttaaggggtgcggctcctgcataacggctatactctgatttgagatgtgctggataataaccagctatcgcgcgtccgccaatggcgacgaacgaaggaagaagggcccgtgccgcgagcaatcatcgaggtaagaaacctacgcaaggaataccccgtcgaggatgagacggtggtggcgcttgaccgtgtcaatctcagtattccgcaaggccagatctgctgcattttcggcgaatccggctccggcaaatccacgctgctcaaccagttggccggcatggaaaaaccgacgcacggcggcgtgagaatcggcggcgtacccgtcagcaaactcgacgagcgtgagctggcggccttccgccagaagcatctcggcttcgtattccagtcgtacaacctgctacccaatctgaccgcgctcgaaaacgtggcaatgccgctgatgttccgcggcgtgcccaaggaacagcgcgaacgtgcggcgcgtggcgtactcaaacgagtcgggctcggccatcgtctcagccattacccgcgccagatgtcgggcggccaacagcagcgcgtcggcatcgcccgggcgtttgtgaccaagcccgaggtggtgttcgccgatgagccgaccggcaaccttgactccaaaaccaaaaccgaggtcatgacgatgatctgcgcattcgcccatgacttcaaccagaccatcgtgctggtcacacacgatccgcagatggcctcatacgccgaccgcattgtcaccttgctcgatggccgcatcaccagcgatcggctcaacaccgacctttcccgcccaactgttccgtccacgccgtccgccccaaccacaccaactacaccgtccacgccgtccgcccatagaacccaaggaactgaccgatgaagcacctctcccaccacaccatcgccatcatcgtcgcgttgctctccacgctgtcactggcacttgccgtcatctcccttccgcatcaggcgtacgcggtcgacggcacagacggcacaagcggcacgaacagtacgtctcagggaagcgacggcgattccgcgccgatcgccggaccggtgcccaacatcatcatcaccaacttcgcgtatggaggtgattccgtggccgccggatccaaattcaatctcgacttcaccttccagaacaaggggcaggtggcggtgacgaacatggtcgtcaccgtggacggcggcgagagcttcgccatcgcgggatgcacgaacacgttctacgtcgacgcgctgtgggccggttacgccatgacgcaaagcgtgccgatgcaggcgctcgcctccgcgaaaagcggtgcccagtccgtgaccgtgaacttccgatacgagtatgtggacgccagcgcccgctcctcaagccagtctgacgtcaagatttccgtgccgatcagtcagcctgaccggttcgaaatcagtgatcccgtagtgcccgaccaggtgatcgccggccaggaaaacacggtcacgatggaatatgtgaacaagggcaaaggcgatatcgccaacgtcgaggccacgatggagggcgaaggtttcgatgccacgatgaaaacccagtacgtgggcaatgtggcttccggcgccaccggcacgattggttacgccttcacaccgcacgcgtcaggcgagctgaagaccacgctcaaagtcacgtacgaggattccgacggacagaccaagaccaaggaattcccgctcaccatacccgtaaccgatatgcagccgatggatgattccggcatggccgatccgaacatggaccagaacgccaatcagggattgccggtgctggtgtatgtggtcatcgtcgtgatcgccgtggtcattatcgtggtgattgtgctgctcgtgcgtcgcaggcgcaagcagaaggccaagaagaacgatattgatgaggactgggatgattggtccgaaggcaaggatgataagaccgataccggcgtgacggatggtgctgcggcagacaccgctcctatcacaccagtcaccccagcctcatcagtcgcaccagccggctcatcccacaaggcctgaaaggcccgaccatgcgattcggcgacatactgcggctctgcagacaaaacctatggcggcgtaaatcccgtacgattctgaccgtgctgggcgttatcgtcggctgctgctcgattgtgctcatggtctctttgggccaaggcattaacgagcagaacgagaagatgctcaaatcgatgggcgatctgtccatcgtcaccgtgtacaccaacggttatgccggtccgatggacgatggcggctcgtccaagatgggcgataccaagctcgacgacaaggccgtggaatccttccgcgcgatgagcggcgtatccggcgtgacgccgatgatgaacttcccttataacgtgacggccagagccggcgcgggcggccgttacatctatgattacgtgcagatcatgggcatcgacatgacccagctcgaccagatgggctacaagctcgtcggtggcgagaaaccggtcaaaaaagaccaggtgcttgccggcgaatggttcgcctatggtttcatggacaccctgaagaacggcgaacaacgcaccagcacacgtggcggtcagtattcctcatgcacgtttaaccaggccaccggccagtgcgaggaagatcaggacgaagatccgttcttcgacccgctcgccacgcaaattagtctgaccaccggcaccaattatcagggcgaccagtacagcatgaacatgtacggcggcggtggcggcggcggcacaggcggcgcgggcggcggtggcggcgcgggcggcgcaagcggcagcgccgcgggtcagtcggaaaacgtcaccctcgatgtgcgggcttccggcattgtggcgggcgactacaacaagggctatgccacctccgacggtctggtcatggatttgcaggcgttgaaggaactggccgccaaagtcgatccagccgccgccaaaaaagccaccgcctatgatcaagtgctggtcaaggccgccgacctcaagtccgtgcccgaagtcgaatcacagatcaaagcgttgggctacgagacctcctcctatgaagacatgcgtaagtcgttggaagaacagtcgcgcgcgattcagctgattctgggcggtatcggtgcggtttcgctgttggttgcggccatcggcatcgccaacacaatggttatgtccgtaaccgagcgcacgcgcgagatcggcattatgaaggcgcttggctgctacgttcatgacattcgcgtcatgtttcttgcggaggccggcgcgatcggattcttcggcggattgatcggctgcgtgctgagcggactgatatcgctgggcatcaacgttgtcggcgcgttgtatgcgggcggcatgagcggcggcatgtctggcggtatggtcagcggtgccggcgggggctccggcgacggtaccggtggcggaacatctatctggaccatactctggcaggcgatagttggtggcgagaatgtgacccgttattcggtgattccgtggtggctgttcctgttcgccgtgctgttttccacgctgatcggcttgctattcggcttcggcccggccaataaagccgttaaaatcccggccctagacgccatcaaaaacaacgagtgatcgcctctgtcacctgctccaccgttagtccataacgttcgttcagttcgcccagcgacacgcggtcggtaaattccttggctgcgccgaagttcagcacacgaggattacggctgccgtccgagacatgatgattcgcatagtatgcggtcactttctcgccccagccgccttcaagctgcccgtcttcaagggtgatgacctgctggtggccatcacgcaacgactccagtacgtctgaatccagcgacgtgcactggcgcgggtcgataaccgttgccgtgatgccataatcgtcagacaatgcggcggccgtctgctccgccaacggatacgcattgcccagtccgatgatcgcgacttgcgagcccgtctgattgacccgccaatccagcatgggacgcgcaccggcatgctgagccgttacgctaacggtcccgcggactgttgcggcagatatgcccccgctggcggagctggcggaggctggcagcgaagctgactgggggcggtcagcaatctgcccacccgtcaccggcagcagcgtcgcatcccgttccgccgccagaatcgcctcgcccggcacccgaatcaccgccggaccagcaggggcgtccgccgaaccggccggcgcggtagcccatgccaaatcagccagatagtcgcgagccgaagtcggcaccagcatcgtgacccctggaatattggagaacatcgtcacgtcatatgcgccggaatgcgtattgtccgaaccggacaagccgcccagaaaatcaagtaccgtgactcgcgaacggttcaggctcatctcctggaagaactggtcgtacgcgcgctggaagaaggacgccgtggtggccaccaccggcgtgccacccgcccgtgcgatgccggcagcgtacgccacggcatgcgattcggtgatgcccgtgtccacgtaatgcgaacccgcgcgttcgcggaattcgtgggtgatgccgttggagcccggcgtggcgggggagatgaccacgagtcctggctcggtggcgaaacgcggttcgagcgcggccatcgccattttgccgtaatgcttgcgcggatcgtccggcttgccgattgcggcatccggattctgccaatgcgaggcctcgcactggccttcatgcggttcgtgatcggacaggttgcagtgatccgaatgccacggctcgctgtggttcacgttatcggtggggtgcacgccggtgggggagtcgagtgagaccggtaaggtcgaggcgttttgttgattggcgtgagtctcctcactgtcatatcccgcgcccttcagcgtgtggatatggaccaccaccggatggtcgatattgcgcacttcctcgaaagccgcgaccagagcggaaacatcgttgccggccgccacataccgataatccaagccaaacgcgttgaacagattcggctgggcggtgccgccggacgcgcgcaggcgggcgagcggaccgtacatgccaccgaaatcgccggcaatcgacatctcattgtcgttgaacacgatgatgagattgccgccctgctcagccgcgttgttcagtccttcaaacgccacgcccgaactcagcgaaccgtcgccgatcacggcgatcacattgccgatgccgctgttcgggccttccatatcgcgggttttcgccaaaccgcaagccagtgaaatcgaggtaccggtgtggccgagcacgaactggtcgtgtttgctttcatccggattggtgaagccagtcacctcgctgaaacggtccgggtccagataggcgtcggcgcggcccgtgagcatcttatgcacgtagctttggtgggatacatcgaacacgatgcggtcacgcggcgaatcgaatacgcgatgcagggccaccgtggcctccaccatgcccagattggagccgatatgaccgccgtgttggtggccatatgccagcagcgtggcgcgaatctcacggcagagttcggcgagctcgtcgggggcaagggccttgacatcggccgggctggcaatgcggctcagcagatgggagtcgtcgccatgggaaggggtaatgctcggggggatgtcgtgaaggcgcgcggccccctcggcagcaccggagacggcgaaggaatcgcttgaatcaaatccgtttcctgacgcgttgcgcataccctcgaatctcccttcgctagtctttccgaagttgaatgctaacgcccggcattgtccgaggtccacatgacgaatcaatgcccccaacatctccgtaaatgggtgattcgttcgctgcgcgatgtgggacaatgaatgcggtaattccttttgataccaaggagcgcgcaatgaaggccgtatacgcatccaccgtcaaccatgacgatccgcttgccgcgttggcggtgggcgagcagcccgaaccccaggcccgcccgttctggtcgaccgtttcggtgcgcgcggtgaccgtaaaccatcacgacgtctggtcgctacagggtgtgggtctcgccgccgaacagacgccgatgatcctgggcaccgatgccgtgggcattctggacgaggacatccccggcaagcatgggctcaaggccggcagcgaagtggtgctgtacacgttcgtcggcaccgatggggcgggcgtggccccgggcgagcgccgtacgatcctctccgagaaataccccggcacgatggccgagaagacttccgtgccgtccgccaacgtgttcgccaagcccgcaaaccttaccacggccgaggcggccgcactcggcaccagctggctgaccgcctactcgctgttgttcgaggccgccggcatcaagccgggcgactccgtgctcatccagggcgcgggcggcggcgtgtccactgcggccatccagctcgcccatgccgctggtctggaggtgttcgtcacctcgcgtgacgcggacaagcgcgccaaagcgctgaaacttggcgcgaacgccgcgctggagaccggtgcgcggttgccgcgcaaggtcgatgcggtgatcgagtccgtgggggcggccacatggggccattcggtgcggtcggtgcgtcccggcggcaccatcgccatctgcggcgccaccaccggcgaccagcccggtgcggagctcacgcgactgttcttccaggacattcgcgtgcagggctgcacgatgggttcgcgcgaggatttcgcccggctgctgcgcttcgtggagcacgccgacctgcatccggtgatcgattccgtggtcagcgggttggacgccgcccccgaggcgttcgccagaatgatcgccggcgacatgttcggcaagatcgttattgagctgtaagcctcacagaattatgtattgagaacgattcgctgcgtggcttaactccgctatcaggagtacagtgggccttattctcaataactagggagtaaatgataatggcaaatgaatccaagcccgaagtcgcagtggtcatgggatcctccagcgactgggagaccatgaagcgcgcctgcgatattctcgaccagttcggcgtcgcctaccacaagcaggtcatctccgcgcaccgcacgcccgagctcatggccgagttcgcgcacaacgcccgcgccaatggcctgaaggtcattatcgccggtgccggcggtgccgcccacctgccgggcatgatcgccgcgcagaccacactgcccgtaatcggcgtgcccgtgcgctcccacgccctgtccggctgggattcgctgctgtccatcgtgcagatgcccggcggcattccggtggccaccaccgccgtcggcaactccggtgccaccaacgccggcctgctcgccgtgcagatgctctccgccttcgagcccgaactggccgacaagcttgaggattaccgtaacgaactgaaagaaaaggtggctgaatccaatgcccagcttgtctgaggaaacaggcggtcgtgtttcgatgctgatgccgggatcgaccatcggcatcatcggcggcggccagctcggccgcatgatggctttgtccgcccgctacatgggcttccgcgtcggcgtgcttgacccgacgccgaactgcccgaccggtcaggtggccgacttccagatcaccgccgaatacgatgacaaaaccgccatccatgatctggccgtgcagtccgacgtgctcacctacgagttcgagaacgtggacgccgatgccatcgacgaggtgcgcggcatcaccgccaccccgcagggcaccgacctgctgcgcgtgacccagcaccgcgtgcatgagaagcggttcatcaacgaccacggcaccgccaccgcaccgtggcgcgccgtcaacaacttcgatgagcttgacgccgcattggatgatattcattatccggccgtgctgaagaccgtgtccggcggctacgacggccacggtcagctcgtgctgcgttccgacgccgacttggagaagatccgctcccgttccgaccgtggtggcggcttcccgccgagcatcctggaaggcttcgtcgacttcgcattcgaggcttcgatcctggtctccggcaacggcaaggacttcgtcaccttccccatcgtgcgtaacgagcaccgcaacaacatcctgcacatgaccatcgcccccgccgaagtgtccgaacatgtggctcgcgaagcgcatgaactggcgattcgcttggccaagggcttcgaactggctggcacgctggccatcgaactgttcatcaccaaggacgatcaggtcatcgtcaacgagctcgccccgcgcccgcacaactccggccactacaccatcgaggcctgctcgatggaccagttcgacgcccacatccgcggcatcgccggctggcccatgcccaagcccaagctgctctcgccggccgtgatggtcaacgtactcggccagcatgtggagccgacgcgcgcgctgatcgccacccacccggagtggaatgtgcacgactacggcaaggccgaagtgcgccacgaccgcaagatgggccacatcaccgtgctcaccgacaaccctgatgccacggttgctgaccttgaggccaccggctgctgggacgacctgaaaaagaaggcgtgaccttatcgatggttgaacatatcgaacgccagaccaagcagaaggacgcgattcgcgccgccttggccgactgtgaggagttcatctccgctcaggacctgcaccgcaggctggaggacgaaggctcgaaaatcggcttggccaccgtgtaccgccagctcaacgccttggccgatgccggtgccgccgacacgatccgcctggacggccagcagctgttccgcctatgcggcgacgacggacatcaccaccacttggtgtgcaagcggtgcggcaaaaccgtggaaatcgatccacccagcgaggcttggctgcgcaaagtggccgacggccacggcttcaccgtcgaatcccacaccctggaggtcttcggactatgccctgattgccaaaaggagcagaaagcgcagaaggctcagaaagcagtgagcgaataattgaatgggatcggcttcaaagccgatcccatttgctattccgctgctattccaccgacttcagggcgccgagcatgtcgaccgtcttcaaccgccggtagaccagcacgccgagtccgccgagcaccttgatggtcggcagttcgcggatacgttcggagacgttgagattcgtcagattgtagaggatcaccacggccagcagctcagccgcgagaatcagcacttccatgatctgatccggcaagtcgacgattgtggccacctgtttcttcgaagtcgtgttctgcacaatgcccttcgcgccgtccaactttatgagcttggcgctacgcgactccacattggaggtctcatggttcttgagcctcaccatataggcgttcgactggtactgttcgccgaacacgtgcttatagccacccgaagtcatgaacatgaaatgcccgatatgcatttcggtgatgccgtccacgcgcaccttgcgctcggtaccgctcgaatcggtgacggtaatcgtgtcgcctaccttggcgtccatcatccccgccatacgttcggagatgatcgcaccacggtcggtgagcacctgcggcttgtgcccggtgcgcgaacgcagggtgatgtagtcgccgaaattgtaggcgtcatcagtggcgatcagggtaatcgactgtttgtcgttctccttgccggccactttcgacatctcctcgtagtagatcggcgcggactcggagacggacccgcccctcatcgccttggccacttcggcgcgctgcgaataatgttttcgtcagctttggtcaggccataatcgctgatgacggttatgtcagcgagattgttctgattaaagaagtcggtgccggttatttgcatgtccgggccgaaagctgcgcggggaagttgttgatacggtcctgaagccccacgtcgataagcgcttgggtcggttcctgcgcgtctttcatgatttcggaggcgagctccacgttctccttggccgtgaggttggccaccagattgtaggactggaacacgaagccgaggcgttgcgctatgtcaagcgtgagtatgcgttcttcgacgcactgtcccgttcgggcaacgatatgcagatgtatgaccgggtcaaggatgtgttgaagcagatgctgcttgggcaggcggcccgtgtgggtgccgagctgagctacggcggcattccgcgcgcctatgcgctggaaattctggtctccgccgtctcatcgattatctggctatgggtccggcgcggctgcaaggaggcgcccgagcaaatctgcgccatcatcgagaaaaacaaaaccaccgcgcccgtagacatcatacggtaagcgcggtggttcgtgtcggaatctggctcccctccctgagaggagtcaatccgcaggagaaatcggaaacctaaaactcagacagccagctcggccttgagttccttgaggtcggccaggatctcatcgtggtacttctcgttggtgtcgaaggcaaggtggcagaaggcgcactcgtggccttcgcggttctcgtggcaagcgtgcaggcaagccttgcccccgcactcttcggtgtggttgtgctcgcagccggtgtcgtcgcagcagtcgccggtgaagcagcagccgcagcggccacaggcggccacgccgtgctcgtgcttggtggcgtcgaacttggccagcgtgtccttgcagacggcgaaggtgccctcttcggtaacgatctcgtaagcatgctcatcgatggtcttgatagtcattgttgttcctttcagcgtttgttcgtctgcgactgtagggcggcagacggcagcggcgaaagttggtgaaagtgattatcaggcccattgctgctattaagagcaatgagacctcatgcagttttgtgtcggtaacgggccgattgttggccgagtgtcgacgcctggtataggtggtggcggtaccaatccaaatattggtggaacgacgacgatgagcgtgtctggcgtcggtgctgcgccaagcgttggcaatctaacgatgcgagtggagcttatatcgtcgctattgcgccaaggattggaagggcaccgatgctgaaggccagtagcgtcgggactgcgccattatttgttcgagcgccgacggccagtatcgtctggcgtcgtcagtggtccatcctttggtgaggtgccgacgctgagaggcggttcgatggcatgcttcgccgcacacttggggcacaggtcgaaaatctccagttcgtgggcgatggtctggtacttcaactgcttggtggctttgtcgatccactgctcaagtccgggaatctcgatttcgatggtccgcccgcattcgtggcatacgatgtgatggtggtgatgctggtccgagcactcgcggtagagggcctcgctgttgacgtggattacgtcgagctcgccttgggaggccatcatctgcacattgcggtaggcggtggccgtgccgatgcgcgtgccgcgctcgcgcaggatgtcggtgatttcctgggccgtggcgaatcgggatagttccgccaggacctgggtgatgaggagtcggggtcgcgtcacgcgccgagtggtcgcggtttgctcgatgctcatgacgttctgcccctttctgttaacaaatgatattcattatcgttattaaagcaaatcagatgcccggcatgttgtcacatgatttgaatcaactggcagaaatcccgcgtttcaacgaggcctgcgcgggatttctgccagttttgagccctataaaggcagagcccccgcgtacctttcgttgtaacgcgggatttctgccgatatggggcgagtcatggcgcagcgcagtgctttccatttcgggagacgcgtcatttactgccagtagaagtagccggtcggggcggctgcggctttgctggccgaccggacctgcagtatcaggccttggcgctcgtggccggcggagccgtaggcgccctgcttgatgacggcgtcgacggtgacccagtcgtgattgtgcggggtgccggccttgccggagctggctatgaacccgaatggggtcatgtcgagaatgcagcaggacatgaactggcgggacagctcgaactcgtccgcgccgaacgtacgcgacttgctcacaaacccggtgacctgcacatggtaaccgacgtaacgctgtggattatggtcgatctgctcgaaccatgagccgaattcgtcgtcgctgatggtcagggtcttgttcgccgtgtcgagtccgtgcagctgcgaggcgccatcaggcttgtgcgagctgcggggaatggcgatagcgcggccgccggcgtactcgtcgaagccgccgctgccgctgctgggctggaacggcacggcgatcagcagcgccggaataatcaaggcgatcaggaaccgtaaaaccgaacgctccgtggcgtggaacagtccgagccatgctgcggtcgccagcacgaacagcagtaccgcaccgatgatgagatacggcagcgagcgcggcgtggtcagcgtggtgtatgatccgcccaccgccgcataggcgatggccgcgcccagcgccgcgaaacacagcgcctccacgcggtcggggagtgtgactttgcgcttcatggctacgctcccatcactagatgggcggcaatcgcggcgaggaagcaggccgccgccacggtcgcgatgaaccggatgatgaaccgtggccggcattccgtggccagcatcagcgtgttcttgaggtcgagcatcgggccgaagaccaggaaggcaagcatggcggagaccggcagcgcgccaatcatgctggcggcgatcaccgcatcggacgtagagcacagcgaacacaggaacgccagtcccatcgccgccagaatcagtacgatggcaccggcgtcatcgagcgtgcttgaaccgttggtcaacgacgacaatgcggtgcgcatgatggaggcgatgatcgtgccgaacagcagaatcggcatcatccgcataaagtcgtcatgcgtatgccgaatgaaatgcgtgaaccgctccaatccgcgccccgtgcccccgccggcgggggctgtcggcaaagccgactgggggtggctctcaggcgaatcacccgtcgcccctgcacaatcctcgcaaatcaacgaccgcccaatcgtcagcggcctctcacgcaccgcaggggagcggagcggccacaccgcgaacgacacccccgcgactatcgccactaccatgcccaaccccatgcgggccgccaccatccatggtttgtcggtgaatgcgaaccatgtggaccatatcgccatcgggttcatcaccggcaccgcgcacagaaacgtcaccgcacacggcagcggcaggcgtttgcgcatcagattcgcgaacgtaggcaccaccatgcaatcgcacaccggtaggcacagaccggccaccaatgccgcggccagtccgccggccaacgatttcggtatgtggcgggccagaaaatcggcgctgacgaacgtgctgaccgcggccgacatcatcgcgcccagcagcatgaacggaatcgcctgcaggataagccccgcggcaccggtgccgatacgcaccagcggaaccggaaacccacgcgactcgagcatcgcggaagccgcaatcaggaacgccaccagcggcgtgccgataatcagaaacagatagttcgccgaatggtcctgttgcgcggtgttcacctgttccgtgcgctgcgtgcgaggttctttcatgcgaatatcacctgccatatcgccgtcatattagcaccgtacgcatgatagtggtcgagataatatgcgagttccccgcataccgatggtacacatcgatatgcggggaactctgcacatggttgcctgggccgatggagaatcggtgggccagcatctcggtggccacttcctccttgctcatggatgccgggtaatacgtgggccagttgtccatttccttgagggtttcttcctgtcgttgaagtgacgttgcacggtggcggcggtggcagaaccggccccggccttgtccgcgtagacggcgttgatggcttcggcggccttcagcacggcttccgggctgaaccacaggtgcgggttcgtagcaccatggtggtgatggcggccttcttcgccctcggcgtggtcgtgggaatgctcgtgctcgtcggtggcggtgacgtccatgaggtcgcccacgttcacgatggtctggcgtttcttgtcaagctgcgccttttccgtccagccgtcgtagccggcgccgttgagcaccacgatgtctgccttggcgagcttggccagatcggatgcggtggcctcataaaacggcggttcgccccggcaggtgacggcatacggaaggaaatgggagaaagaacgtacgccgccggcctgtggagcggaccgtcgagttgttgttacgagacttgatggattgcggaatccacgatgttggttatggcttcatatacccctttcgtacggctgcggccagattctgcggaacctgaaccacttcgccttcaggcgttctgaccgtggccagctgaggcaccttggccttccagttggctcggcgcgaatgcgtgtttgctcgggacgccttgtacttgggcagtgccatcagccttgcctcgccttccagtgggggttcttcttgttgattacatacagatggccgcgccggcggacgacataggagccatccttgcgggccaatgagcggaccgatgccttgaccttcatgtccgttcctttcttcttgtcttacggtctttgcggaatgtgcggcgaatcacttgcgcccgtaacgagcgttgaacttctgcacctgaccggcggcgtcgatcaccacattcttgccggtgtagaacgggtggctgtagctggacacctccacattgacgagcgggtaggtgttgccgtcctcccagtcgatggtcggcaggtttacggccttggccaccagtgtggacttggtgaggaagtacttgtcggcggagcggtcatagaagaccacggggccgtattcggggtggatgccctcttgcatggttatggacctttggttgtgtggtgttgtgtggtgatatggatgagaatggcgtcggacgcacgggtggaatccggtgaattgagatggcctgagacggcctgacggccggttgtgccggcccgatcaccagctggatttcaccacgccgggcagtttgcccttgtgtgccttctcacgcagattgatacgtgacaggccgaacttgcggttgtaggcgcgcgggcggccgtcgatggaatcgcggttgcgcagacgggtggggctggcgtcgcgggggagggcctgcagcttgcgcatcgcctcggcgcgttcttcggcggtcagatgagggttgacgctgtcgcgcttgtattcggcgcggcgttcggcatacttggcgaccatgcgttcgcgctgcaattgtcggttgatcttactggttttggccatgtccggctccttgataaggctccggggcgcgggaatcgcgccggccggagctgggacgagtgcattcgttcattgggcgcatgccgcaaggttcggaagatgagttcatgaaatggtgatagaggaaaccgccggaatgccaacaaggaaacgatttcggcgggtgcttaagcctcttcctcgcctcgcgactggtgtccaatgaacgaacagatggattagcgggtctctcggaagagcacccgtttgcggactaccggatcgaacttggtgagctcaagacggtccggcgtattacgacgattcttggtggtggtgtaggtgaatccggtgccggccgtggacttcagggtgatgaccgggcggattgcggaggatttgcttgccatgagtggtgctttctatgtgtgggtgtcacgctgttatgtcacgtatgtcgcgtacgtcgcggtgccatgtgggtgatgcagctcgttagcgcggtttgttgcgcggttacgcgccggcacagtggcgggcctactgactgcccgagcatgggggtgatgccgtggccggttcagttgacgttctgatcgcggcggatgcgggcgatcgccgcctcgatgccgatgcggtcgatggtcttgatgcccttggcgctcacggtaagcgtgacgtgccgctgcaaggacggcacccagtaccgcttggactgcaggttcggggcgaaggttcggcgtgttttcctgtgcgagtgggagacgcggttgccgaccccggcgcgtgttcccagaatttgacatgttttggacatgcctgcaactatatcataatgataaccattatcaaataagaaaggctgtcatgattcatccggcattgcaatcacagggaaacgcggaggggcgcacgcccgtggtgctgctcaccggcgccgaccgcctgagcctggactccgtggcgttctcgttggtcgattccttcccgtccgtatgctcgattgcttatgacgtgcgcccgaacgaagccgtggaatccggtctcgatatcgtgcgcaacgtcgcgaagccccaggcaagcggggtggtgttcggcgagtccgattcgttcgggctcgaggggtgctgcatgagctgcacggtcaaacatgaccttgaacggacgctcggatcgctgcaagggcgggccggcgcgtttctggtctcgctgcctgtgggccttgaggccacgccggtcgcgcagtatctggccgattccttccgtctcaacgagtggggtgagtcgatgttcgtgggtgcggtggccaatgccgtaggccttgacgaattcgaagagcgattctttgacgacgaccgtttgtgcctgtacggcatgggcgaggagaacggcgtctatgacgagcgttcgaccggcgtagtggtctcccgcctgatccgtgaggcctcgtgcgtgctcgaattgccggtcattggtgccggttgcctggcacgccatttggatacagacggggagtgcgcctgccgcgacatcatccgtgcaatcgccttgcgtgatgcgctggtctgtgaggatgcccgcaccgtggggctcgtcgacctggtgcaggcgtcggtctgtgccgcgatgccgttgtgacatgtgcggcaaacggcagaacccccgcgtccgaacgaaggtggcgcgggatttctgtcgtttccgaggccttaaatggcagaacccccgcgcgggtatcgttcggacgcggggatactgccgtttcgtctgccgaaaacggcgggatcccgcgttgtcatcgtcggggcgcgggatttccgccggcagcgcgggtgtgcgcgtgcaacacaccgacgtaaatgcaaatgataataattctcaatacatgttattctgtcgtgttgggggccggacgatgatgcagcaacagcagcatcgcccggccaaacagccgaattagagaggaaaatccaatcatgtccatcatgtccaacgccaagcgcgcgctcgccatcgcggccgccgcggcgaccctgttctcgatggccgcctgcggttccagcaatgccgccggcaacaagtccgattccagcagcgccgcgtcttccggcaagatcgaggtcgtcgcctccatcaaccagtggggttccgtggccgaagacctcggcggcagcaacgtcgaagtcaccaacatcatgaccaagaccaacgttgaggcgcacgattacgagcccaccagccaggatgttgccaagttcggcactgccaaggtggccgtggtcaacggcgccgattacgacccgtgggccaccaaggccgcccagtcgaccaaggccacgctggtcaccgccgccgaaaccgccggcatcaaggaaggcgacaacccgcacgtctggttctccgccaaggtgcgttccagcgctgccgacgccatcaccgccgcctaccagaaggccgacccgagtcacaaggacgactacgccaagctcaacaaagaatggcacgccaaggaagaccagcttgagtccaagatcaaggagacttccgccaagaccgagaacctgccgtacgccgccaccgaatccgtggcctggcacttggccgacgacctcaagatgaccgacgccaccccgaagggctacgcccaggcttccgccaacgagagcgagccgaccccggccgacatcaaggacttccaggacaccctgaagggcggctccatcaagatgctcgtcttcaacagccaggaagccaactccaccaccgaccagatcaccggtgccgccaaggacgtcaacgtgccgatcgtggagctcaccgagcagatgccgaagcagtacaccaacctgctcgactggatgagcgcactggtcgaccagttcgccgccgccgtgaagtaatgcggcggtagccggcaatccgcaacagcaataaggggaataatcaagtcagatagcgaggcgttgcctaggggagaacagaacgcttcgctatcagggaaggctccttatatatcagggtgcttcggggatgtcccgaggcaccctttgcgttagggtgaatagttaggaaacggtaagaaaaatagtggaactatggattttccaaggttcagcggcaacaatatgcccttgaaaagtcccatacggaaacaggcgaatgagcgagaacactagtagtatcaccacagtgaaaccccatttcaagctttgggtcaaaaaggccgaagccaatgaagtcacgccccagcacccccacaagcccttccccggctgggcgtacggcgtgctcttcgttatcttcgacattattgttgtgacggcgctcgaagtgggcgtttcgtccagctccacccgtgtgcaactgtccagtccgaccgtcggattcggcttcgtgagcaagatgtggaccgacggcaatttcgtattcgtactcaacgtgatacttgtcgcgttgctgtacctcatgttgctgatgctgttcaacagattctggacggcaagcatcgtgattcttgcggtcggaatcatcgtggccgccatcgaacatttcaaggtcgagatccgttacgaggccattctgcccgccgacctcggcttccttggctcgaacaccggcaatatgctcaccttcattccggccggcgcgcacgtgaccatcctcgtggcacttggcgcgttcgccgcgctgctcgccctgattctggtgctgcgccacttcgacgggcgcaaaggtcgcatgatccgtacggacaacctgagcctgaacctcacctcccgtctgattctgctgctgctgccgattctggtgttcgcgttgtactgcattcatgtgagcaccaccgattcgctggccaacaagttctcccgcgccttgggggacacgccatccatgtgggattccgtgtatgacgcgcagcgcaacggtccgctcgtggcctttacccgtcagctcaacccgaagatcatggacaagccgagcaactactccgaggagaccatgaagaaggtcgccgctcgctaccagaaggaagcggagacaatcaacgcctcccgcaccaacaacctcactgattcgacagtggtgtacgtgctgtccgaatccttctccgacccgagccgcgtgccgggactgaagaccaataaggattcgatgcccaacatccgcaagatcaaggcgggcaccacctccggcctgatgctctcctccggctacggcggcggtacggccaacctcgaatacatgggactttccggtctgagcatggccaatttcgattcctccctgtccagcccgtaccagcagctggtcccgagccagcattggacccccaccatcaaccagatgtggggtgcgcccgccaactcgctcggctaccatccgtacgagtccagcatgtactcgcgcgctacgaactacaagaagttcgggttctcgcacttctacacgctgaccggtccggacgtgatcaagtatcaggacaagattgacgagtcgccgtacgtctctgataagtcttcctatgattctgcgctggaaggcatcaggtccggcaagacgaacaagttcattcagatcatcaccatgcagaaccacatgccctaccacgagtggtatgagaacaacgactacaccgctgaatccaccacgggtacgccgctgggtgatgatgaacagcagtcgattgagacctatcaaaagggtgtggagattaccgatcaggccactcaggagttcctgaacgaactggatgcgctggataagcccgtcaccgtagtgttctacggcgatcacttgccgggcatctactcgtccgccagcgaggatggcaacaactccttggccctgcacctgaccgattacttcatctggtcgaataaggcttccagctcccaaggcaataaggcaagcgatgcagcctactcttcgccgaacttcttcgtggcacaggccgccgatcacatgaacgccaaggtcagcccgtatctggcgttcctgaccgaaatgcattccaagattgccgctatggaaccgcctgtggtcaacaaggtccaaggctgggatcgtattcccgaaggccagaacatctatctcgaccaaaacggcaacccgatgtccaccgatgacttcgacaaggaaaccaagcagttgcttgccgactacaagctcatccaatacgacatcaccgccggcaaaaactacctcaaagacacagattttatgacgttgccgtaaagcagacagcccggccgaaccgtaaagcggatagctcagtgggctatccgtaggtgaggggagcggctgtgccgcgacggaaaatccggaggattttcggtctgtaggcaacgtgcgagccgacaggcgagccagcaaaacgcgggcgaagcccgtccaaaattgctgtaccgttgccatagtgctgtgagctccctctgatgagggagctgtcgaacgaagtgagactgagggagagatcccacagaccaatcactcccgccttacaataaagccatgaagcgcatcgatgtgaatcatggctggcggttccgttcaattggcaaggaccgcgatacggcagcgcggcagccagtcacgctcccgcacgatgcgatgattcacgagtcgcgcgaccctcgcgggccgcacctcgcgattcatcgaacgaggacatgacggcgtggccagctggtcatgggcgggctatgagggccgcgacgccatcgtgcatgtcaccgatgaccgccgcattgtggttgatgcaggcgggcatatcgccgtcggaccttctgccgaagctgtggatgtggaggtacaagtggactctgtggccgcacaacacgacctgcctgccaatgccgaactgctcggcgtggccagcgccaatcccatcaccgtcgatgaactcgccgacaatacctgcaccacctacttcggccgagcccaagctatttggcgaataccagccgaaacgtctggtattgcctgcagcacaaacgccctcatgccatcgtcatgacggtacgataggtacagtcgatgcccggaaaaccgacccgggcatcctgcgggaaggatgtgccatggtcaatgcggatttcgctcagttgcgtcacgcctacgaatccgggtgtacgcggccattggcttggcgacgggcgcaattggatgcgctatgccgtctggtagcggacaatcgtgatgctttcgtggctgcggccatggccgatttgggcaaacccgcggcggaaaccatactgatggagctgaatctggtggccggcgaggcgcagttcgtccgcaaccggctcggactgtgggccgcgcgccatcccaaggcgatgcattggatgctgcaacccgccgccggctggacgatcgccgagcccaagggcgtggtactcatcatctcgccatggaattacccggtgctgttggctctggagccaatggccgacgcgctcgccgcaggcaacgccatctgcctgaagccctccgagctttcgcccaacacctcgcgcctcatcgccgaactcgtgccgcaatatcttgaccccgagtccgtgtgcgtggtcggaggcgggcccaaggaaaccggcgaactgctgaaatgtccgttcaaccatatcttctacaccggcggtgggcacgtcggcaaaatcgtcatgcgtgcggcggccgagcacctgacaccggtcacgttggaactcggcggcaaatcaccgtgcttcgtggaccgtacggtggatatcaatgtggccgcacgacgtatcgcatggggcaagttcaccaatgccggacagacctgcgtggcacccgactatgtgctcgccacgccggatgtggccgaggctctggccgagcgcatcgccgtagccatcaccgaattctatggcgaagatccgaaggcctcgcctgattttggtcgtattatcaacgatcgtcattttgaacgactgtgcaagctattgccggtcggcaccgtgccgtctgaggagccgagctcgccgctggtacaggtggcatcggcggtaggcgcggccatggatatggtcgggcgacgcttcaatgtcgtggctgccggacgcggaagcgcgggggagacagccggtggtggcaccggtagcgcgaacaatgcggcgaagccggcggccggttcgaatacggcagccgctgatagtgatgcgactgcctcggccgctgttgagccgagcgagattcacaaggtgcccggcgtattcgatccggccgggcgaattgtttgcggaggcaaggtcgatcgcgccgcccgatatatcgcgcctaccgtgctatacggcacgtcaccggatgcgccggtaatgaaggaggagatcttcggcccgattctgccgatcctggtggttgaggatgccgagtccgcaatccgattcatcaacaagcggtcccggccgttggctgcatatgtgttctcgcgcgatcacgaggttcggctgactttcgaacgtcagaccagctccggagctttgggatattcgttgccgttgggtcacctgctgtccagccggctgccgttcggtggcgtgggcgcgtccggcatcgacgcctaccacggcaaagcaggcttcctcaccttcagccacgtcaaaaccgtggttaccaagccgcagttccccgacactctgcgcctcgtgtacccgcccttcaatgaagccaaggccaaactgttcaacatcatcgccaaattcagctagcgtgatatcgctcgctgatattgggtgatggcgttgtcatagtgacgttcgctgtcccggcagccacgtcaatcgattgattcgtgtaccgggccagatttttctgtcctggtatttgatttcgagtcattttctgcttaccgggacaaaactgacgccgaaagtatcgtccgcgtattacgaaaatggcggaatagtgcggttttgcatggaagggaattccaaatattcctatattcgaggtgttcaactgtcctggtttgcgaaaaagagccgaaatcagctaccgggacagaaaaatctggcccggtagccacgtcaatcgattgacatggctaccggaccaaaaatatgcggcagatgcgccgcttctgttacttcagggctttgaagccgatgtcgtggcggtagaacagtccgcgcagctcgagcttgtcgatgatcgcgtagaccttgtcctgagcggacttgatgtccggggcggaggtttcgatgagcaggacacggccggagttggcaatcagaccacccttgtcgtcggaggcgacgccggcatagtagacatgcgaatcctcgtcgacctcgatctcgggcacacgggcacccttgatgacgttctccgggtagccgttggaggcgatgaccacgccgagggtggcgttggactcatcccagatgaattcgggggtttcgccgtcgagaatggcggagatgccggcaccgaggtcggaggtgagcttcgggagcacgacttcggtttccgggtcgccgaaacgagcgttgaattcgatgaccttcggtccgtcggcggtggcgatcaggccggcgtacaggatgccggtgaacggcgtgccttcctcggccatgccttcgacggtggggcgcacgattttctcgatggcctcgtcgaccacggactgcggaatctgcggcaccgggctgtaggcacccatgccaccggtgttcgggccttcgtcgccatcgtgggcgcgcttgtgatcctgggagatcggcatcggccagaaatcagtgccgttgacgaagctcatcagggagaattcctggccgtcaaggaagtcctcgataacgaccttggcaccggcggagccgaagcgatgatcgatgaagatgtcttcaagcgcacgctgggcggtgtgctcgtccatggccacggtcacgcccttgccggcggccagaccatcggccttgatgacgatcggcgcgccatgctcgtgtacgtaagcctgagccatgtccaagtctccgaacgtctgatatttggcggtcggaatgttgtgacggtccatgagctgcttggcgaagtccttggaaccctcgatctgggcggcggccttggacgggccgaacgccttgatgccggcggcggcgaaatcgtccacgatgccttcgatgagcgggacttccgggcccacgaacacccagtcgtagccgttgtccttcacgaattcgatgagcgcggcatgattcgactggctcagctgtgtggtgtggatgccgtccttgagcatgcccgggttgccgggagccacggtgacttcgtcaatgctcggtgccttgagcagcgtgtaggcaatggtatgctcacgcgcaccggagccgatgaccaatactttctgacccatgtttttccttcctaaagtctttggctcccctctttgaggggagccggtatctggagctacttcagtacgatttgcgtgtcggtggtgtcggtggtgatctggccgagcacgtaggcgggttcgttgttgtcggcgagcagcttcagcgcctcgtccttgcgggcggggtcgatggccagcaccatgccgatacccatgttgaagatgttgtacatctccttgtgatcgatgttgccggccttctcaagcacgtcgaagatcgggagcacaggccaggtgccaagctcgatctcggcggccagaccgtccggaatcatgcgcgggatgttctcgatgaagccaccaccggtgatgtgggccacgcccttgaccacgcccgccttgaacagcggggagagggccttgacgtagatcttggtgggggtgagcagcacgtcgccgagctttgcgccgcccagctcggcgagctcagtgtccacggtatagccagcctgctcgaacagggccttgcgcaccagggagaagccgttggagtgcacgccggtggaaggcagaccgataagcacgtcgccctcagtgatggtggaaccgtccacaatggcggacttttcggcaacgccgaccgagaaaccggccagatcgtactcgtcctcgtcgtacatgcccggcatttcagcggtctcaccgccgaccagtgcggaaccggcctgcacgcagccgtcggccacaccggccacgacctgctcaagcagggccgggtcgttcttgccgcaagcgatgtagtcaaggaagaacagcggctcggcaccctgggcggcgatgtcgttgacgcacatggccacgcagtcgatgccgatggtgtcgtgcttgttggccagcttggcgaccatgagcttggtgcctacgccgtcggtgccggagatgaggaccggctccttgtagcccagggaggctaggtcgaacaggccgccgaagccaccgatgccgccgaccacgccgggacggttcgtgcgggccacgtgcgacttgatgcgcttgacgacttcgtacccggcttcgacgctcacgccggcgttctcatatgcttttggcatttggtggggcctttctgttctattttcaagctcccttgccggggagccacctgcaaaaagcggattttcgtttgtactaagctccccttgtcaggggagctgtcagcgaagctgactgaggggtagtcgtaaagaccaatgactgaggtgtagtcgaaggaccggccgagcctactgcacgtccggctgcacggtgttgtactcgttgccgatgtacttgctcttgtacagcgcgaattcaggcagacgcacacggtcctcgggcgtgagggacttcaggaagtcggcctcgtagtcgtcgagcgcagtggggtagtcgccgttgaagtaggcgacgcacaggccaccgtatggggcgtcggcgttcagtccgatggattcgaccagaccgtcgagcgaaaggtaggccaaggaatccgcgccgatgtattcgcggatttcctccacgctcatcttggctgcgatgagttccttggtggtggagatatcaatgccatagaagcacgggtacttcagcggcggggagctgatgcgcatatgcacttcagcggcgccggcttccttgagcagctgcacgatgcgcttggacgtggtgccgcgcacgatggaatcatcgataacgataacgcgcttgcctttaaccacgctgcgcacagcagagagcttcatacgcacaccctgctcgcgcagttcctgcgtgggctgaatgaaggtgcgggccacatactggtttttgattaggcccatttcgttgggcagacctgctgcttccgcatagccggatgcggcggacaatgaggagttcggcacgccgataaccatatcggcctccaccggggattcggcggcgagacgtgcgcccatgcgcttgcgggcggagtgcacgttgacgccatagatatcggaatccgggcgtgcgaagtagatgtattccatcgagcagatggccagctgcgtgttgttggtgtactgcacgatcttgtagccgtgatcgttgaccaccacgatttcgcccggacgaatgttgcgcaccagctcggcgccgacgacatccagtgcgcaggtttcggaggcgagcacgtaggcgccgttcttcatcttgccgagggagagcgggcggaagccgttcgggtcgagtgcgccgatcatggcgtcttcggtcatcagcaggtaggcgaaaccgccatgcaccgtgttgagcgcttccttgagcttgtccataaaggtgcgctgcatcgaacggcgaatcaagtgcatcagcacttcggtgtcggagttcgaatggaagatggcgccttcgtcttcaagcttgcggcgcagtgacgggcagttcgtcaggttgccgttatggcacagagccacgtcgccgtcatggaagcggaagatgaacggctggatgttgtccgtggtgcccgagccggccgttgcgtaacgcacgtggccgatggcgcaattgcccttcagtcgttcgatttcgcgctcatcgccgaacacctgggtgagcaggccgagtccgcgatgaccgatgagatgaccgttatcgttggagacgatgccggcaccttcctgaccgcgatgctgcagcgcgtgcaggccaaaataggtgagtcgtgaggcgtcggggtggccccatacgccgaagatgccacattcctcatgaatgtcttcgagttcagccgacaagccaaagctcctttttcaaacaggggattaactatctgccaaccctaccaatcggcggctacatcgcgtgttgtggggtggtgggggcatggggctgcccatggtcttgcccctggccgcatgagcagagccgtcaggtcggaccctgttcgccgatggcgccggaatatggactgttgcttaaatcctgttgtcttatagtccgatgttttgtattctcaactgaaatgaaggatagttttttacccggctgggggcactgttgattactgaggaagtcggcaagagaatcagagaattacggaataagacgggcctgagccaggaaaagttcgctgcaaaaatcggtatggatcgcacatatttcgccagtatcgaactaggcaagcgtaatgtagccttgaaaaacattgaaaagatagcgaatgggttggatgtgcccctttccgatctgttcaaagggatctaagactagtgcgtcgagtaaaaaggtgatgggggataagcgagaatgggattcaagggtaaattgtataaaacaacgttgattaacaatcgcagatacctgggcaacaaatacaagctcctgccttttatcaccaaggtggtcgatgaggagtgcacggggatcgatgtcgtcgccgatatctttgccggcactggcgcggtttcttccgctttccccgggaagacggtaatcacgaacgacataatgtacagcaattacgtgtgcaattacgcctggttcggtgcggagacttatgatccgcaaaagatcgtgaattatgtagtcgaatataatgccatctcgcaatatgacgacaactacatgaccgataatttcgcggatacctacttcagctataacgattgttccaaaatcggtttcatcaggcaggatatcgaggacaactatcaagctggcgacctcaacgacagggaacatgcgatacttatcgcctccctgctctatgcgatggacaaaatcgcaaagacctgcgggcattacgatgcctatcgtaaaggagccaagttcgataaaccgcttgagcttcgtgttccgcttgccgaggtgcataacaatgccgggaaccaatgtttcaatgaggatgccaatgaactggtcaaggacattcatgcggatctgatatatatagacccgccgtataactcccgccaatattccgatgcctatcatctgctcgaaaacgtcgcccactgggagaagcccgaagtattcggagtcgccaggaagatggagcgaaaggccatcaaaagcaagtattgcactcgcagtgcgacggagacgttcgaggatctgatcggcaacatcaacgcgaggtatatcctgttgtcctacaacaatatggccactaaaggagacggccgttcgaacgccaagatagctgatgaggatatcgtaagaatattgcggaataaaggcgagttgaagattttctcggaagactacaagccattttccgcgggcaagtcaagtattaccggcaatgccgaaagactgttcctatgcacctgcaatgagggataagaaaaccatgattcaatcccctctgaattacactggtggcaagtttaaactactcccacagatattgcctctcttccccgggaagattgatcagttcgttgatttgttttgtggtggctgcaatgttggcctcaatgtcacagcaaataaggtgatctataacgatttagatgagaatgtaattaatctgtacaagaccttattgcgtttagggcatgacatgacgttcgagtacattcatcagataatcgatgattatgagctgtctcttgcaagccagaaggggtatgcatattacggctgcgatagcagcaaaggactaagtaggtataataaaccccattttttgcaacttcgtagcgatttcaatgcaaggcagaagaaagatagctacaactacataatgctctatgtactcatagtctatgccttcaataatcaaatacgattcaacagcaaaggtgaatacaatcttcctgccgggaaaagggatttcaatgagagcatgtcccacaagttatctgcctttatagagaaaatccaatcccagaattgccttttcacttgcagtgatttcaaggattttgatattgctcaacttacgagtggagatttcgtttatgccgatcctccatatcttattacttgtgcaacctataatgagcaaggcggatggaacgaagacgacgaatgtgccttactgtcttttctagaccgtctggatgaaagtgatatacgattcgccctctccaatgttctacgaagtaaaggcagagaaaatcaagtcctcattcaatggttgaaggaacgaaaagacaaatatcaagttattccattgaataaaagctattcaaactcaaattaccaagttaaagacagagtttccaatagtgaagaagtactgatagtaaactattaatgaaaagtggcaattccagctgcggagagttttgcgactgcatatcgctgattgtaagggaggatcctcatgaaagtatccaaggggcatattttcaacctttttgacaccaatggtcgtagaaatgatgtgattgctgccatgcgggggtatctcagtatcctaaacaccattcgtgccaatcaggatttgccgtggaaagcaatgccaaacagtccggcacaggtcttgttctatcgtcatacgattggcatgtttccggatgttttcaaggaccaccccaaatatgatgagctcatatccacgatacacgaatatcctgcattggaagcagcaattgatagagccgatatggaatggctcgaatctcacggtgacgagtatgcgaatgtggatatcaactttgacgaaggcgtggaggatcgcgcacgtcactataccagtaatcttgtcaaactagggtttgcggatgggcggcggaacatctcgccggttggcaatattttgctcgatcgtattcctctacatgaagacggtttggaacgattgctatcgttgaataaggagaatatcctctatctgcggcagttgctcaagttgcgaatttttgataaggccggggaacgatactatgccccattcgttatgggcgtctacgcgttgctgcgcaagtctcgcctatcagaagatgattttttcggcatggtgcaaggaagcagtccgtacagcaacattgacgacgtcgatcggtatattgataatttttcggtagaggggcagctccacaaccatgctgtctccactcccgatgaaatcaatattgatcagcagttaacgtatgacgtgtttaaacaatattttctgaaccggaaatcagcaagaacggtaaatatctattatgggttttatcagtgtatattcgaatttaccgttgaccggactcctgaaaaattagaccttctacttacgtattatgagtcaaatcgttctgtgctgaacaaggcattcggattcgggcgaaatgtatttgatactcgaaccggtgatcgtccagatgtccaggatttccttgatgagaacgaggacatgttttcctccgatatcaacgactatttataccgacaatttgcgatttcaaaattctgggatacgttgcgcgaatattcagataccacgaagcgtattttcaaagcctcgggtctcatcagctttgaaaacggatacgtcgaactggcttatcacgaactgtgcgcatgtattttcaacgcagccgatttgaagcccaaaatcttcggtagcatggatgacgaggttgttccgtactacgaaagttatgatgaatacgaagagggagtgagtagttacttttgtagtaatttcagtctttgcgacattcttggtctgcaggagtcgcttgacgagattaaagagcacatcagtgaagcatttggcggagctgcgcctgaggacatccctgatattacccgtcgtagacggtgggaggaattcgaagttttcgttgcgaaccaatatcctgtcgaaagagtgaaagagctgcttgccctatttggcgacagaaataatgacaagcgcatcaagcaggaggtctgtgaagatgcaactgtcccgaccatttacgagttcatcgttgggctggcttggtattacttctcaggcaaacgtttcaatctcctttccagctataatctcacgttatcggctgacttcgagccgctcaaccatgcgggaggcggacagggcgatatcgtgattgaaagtaagcatgatgtcaccatgcttgaagctacgctaatgaatgtaaacagccaaaagcgaggcgagtgggaaccggtattacggcattccgtgaacctgaaggtggatgaggaggctcgtaagacggaccggcgggtcacgacattcttcatcgccgatgtatttgatgccaataccattaacatctggaaggccgttgcctcggtgccgctgcaatcgaccactgctggcgcggcatatacagacaacgtggtgatcatgcccattagcagtctggaactctgtggcttgatggatagaagttcgcaatatgacacggtaatgcagcgtgtccacgatctgttcgaggtcgacaaaagcaatttcgaccttcaatggagggacaagttcattgatgaaatagtgtgaacccgctattgcgcctttcgcgcatgaaacgagagggcatcggtctcgccggctatcgctatggccggtgagaccgactttgagcgagtcatccgggtttagcgctgccgagccttgtgtcggagatctgagacgggatgtctgagcttcgctgaagtttatatcgaacaaatgttcgactgttctggtatgctggtcgggctggtttcgatagggaggtgatggcgatggctggcgagagggcatcggcgcaacgtgaacatacctatatcgccattgacctcaagtccttctatgcctcggtggagtgcgcggcgcgtgggcttgacccgctgaccacgcatctggtggtggccgatgaaacccgcaccgataagacaatctgtctggcggtctcaccttcgctgaagagctatggcattcctggccgtgcgcggctcttcgaggtgaagcagcgcctgaatggagtcaatgccgagcgcgcggtccatgctcccggcggccgattaatcggggagtcctgcgatgcgcgcgacctggaacactcgccgagactcaaagcctcgatggtcatcgccaagccgcgcatggcgcactatctggaaatcagcgggcggatctacggcatctatctcaggtatgccgctcccgaacacattcatgtgtattcgattgatgaggtgttcatcgacgccacgccgtatctgcgctcgctgggtatgggggcgcatgcgatggcgcgaaccatcgtgcgcgaaatccttgccgaaaccggcatcaccgccactgccggcatcggctccaacatgtatctggccaaagtcgccatggatatcgtcgccaagcacatgcccgccgacaaggacggcgtgcgcgtggccgaactgaatgaaatgtcatatcgtcggctgctttgggatcatcgtccgctcaccgatttttggcgggttgggcgcggctatgccaagaagctcgagcatgccggactgatgaccatgggcgatatcgcccgatgctcggtgggtcgtgcttcggattactacaacgaagacctgctgtatcgcatgttcggcgtgaatgccgaactgctcatcgaccatgcgtggggctgggagccgtgcgagatcgcggacatccaatcctatgagccggatgcgcacagcatcagcagcggtcaggtactcaccggtcccgccgactatgccacggcccgcctgattaccaaggagatggctgatgcactggccctcgatttggttgataaaggcgtgctgacgaatcgactcacgcttgccgtcggctatgacatcggcagtttggacgcgtcgaagctcgattcatgcgccgattatgcgatgaaacgtgccgctgagcgtgcggcgaaaagttatcaggggccggtggccgtcgaccggtttgggcgtaaagtgcccaagagcgcggtcgggtcgattggtttgggtgatttcacgtcatcttcggcgcgtatccgtgaggccatgacgatgctgtacgagcgcattgtggattcacgcctgctcgtgagacgcctgaccgtcatcgccgatgatgtggctacgccggaggagcttgccgccggcaaacgctatgagcagctcgacctgttcggtgatgacgaggctcaatcgtatgggtccgagcccactgatgacagagatggtgagcatgatatccagcgtgcgttgctggatgtgaaacgtaaattcggccgcaacgccgtcatcaaagccatggatatggaagacggtgccaccggtcagggccgcaaccgtcagattggaggtcatcgcgcatgactctacaagaaacccatgcatacgacgacatcatcaacctgccccatcaccagtcgcgcaagcatccgcacatgtctcgccaccagcgggctgcccaattcatgccgttcgcggctctgaccggttacggccaagtcatcgagcagacagcaaaaaacgccgaaaccgctattgctcaggccgaggcccaaggcgataccgatttcggcgcttaacaatcgctccggttggaggaagtctcagattcgtcagcccacgtgacgctcaaagtggtggaagccagtgatcttgtcgatttcggccatcgcgtcagccggaatcacaaagcccgcggccttcatgttgttctccagctggctgggcttggaggcgccggcgatcacacagctgatctccgggtgctgcaggatccacgccatggaaagcaccggcaggttcgtgccgagctcgttggccacaacgcgcagcgtctcggtcagatcggtggtctcgtcgaatcggtggcagaagtacatgtccagatagtcggtctgcatgttcttcagtgtctgatcaatgctctcgaagatatgcttgcgggacaggccgcggtcgttcacgccttcgccggtggtgacttcgcgggcgcaacgaatgaaatcatcaatgacgctccagcggtatggtgtggccgaaacgtcgaatcggatggcgtattcggtctccggcccgcaatccagcacatgcaaggtgcgcagccgttcgccgtcaagcagcgctggcaggaaccgctccgggcataagcaggcacccatgccgtaatggcatagttccagcagcgtcaatatgttgtccgaacgggcggcgactttcggctcgaatccggcacgacggaacagaatctcgccgatgcggccatcgatgtcctgcggattgcccagcaaaaacgggcagtgcgccaacgaagatagatcgcctggagcaatggcgcgttcatctggaatcgtgttggggatggtggaatcgttggcaatattagtttggctgttcgcggttccggtggtgactaaatccagtcataatgattgcgcaataaccagtaccatacgttcgtcgtagaatctggggttatcttgagtcatggctcgtgcgaatagcattgatgtttgcaactgcgggtcatgagatgaaatctgagatgaggtcgtagccggaagaggagaggatcacatgctggaagcgggcgcgatgttgctgttctgtgcggtgctgtttgccagcgtcgccctcggctggtcgattattcccgcgctgttcgttggtgtgctgctgttcatggggtatgggctggttcgccggtgctcgctgcgcgcgatggcgagccgtgcggccggcagcgtacggtccgcggggaccgtggtggtgaccttcgtgctcatcggcgtactgacctcgctgtggcgggccagcgggaccatcgccttcatcgtggcccattcgactgcggtaattcacgccgccacggtgattccgctgtcgtttctactgtgctcggcgatgtcggtgctggtcgggtcgtcgttcgccagtgcggcgactatgggtaccatctgcatgtcgctgggattgtcgatgcaggcgaacccggtgatgctcggtggcgcgattcttgcgggcgtctatgtgggcgatcgttgttcgccggtttccaccagtgccttgctggtcaaacagcttacgcatacgaacctgttcagtactattgcctgcatgctgcgcactggtgcggtgccgtttgtgctgagttgtgtggtatacgttgcggctgcggtggcggagtggctgtgtgcaagcggtggttccagattcggtgcggctagagcggctgtttcaaccaacacaagcagcataaccgatatcggcggattgttctcatcggcctttgatttgcattggcttaccctagttccagcattactggtcatcgtgttggcgttgctgcgtgtggacgttcgcctgcttatgctcgccagcattgccgcctcggtcgcgatatgcgtgggcgtgcagcacatggaatgggcggaactgttgcggctgcttattttcggttaccatgcgcaaaatccgcaggtggccgcactcctggacggcggcggcatcctctccatgctcactgtgatggccactgtctgcatctcctccgcctacgctggcatttttgccgagacgcggatgcttgctcggctgcagcaggtcatcgagatgctcggtcatcgcatcggcgcatgtggcgccaccatgattaccgcgacttgcgcggcggcgctcgcctgcaaccaaaccctcaccatcatgctcactcaccagttgtgcggcgggctatacggcgacgacgaatccgaacgcgccgcgcaagctatcgatttggaagacagtgccgtggtgatcgctccgttgattccttggtcgatcgccggtgcagtgccgctcgtcaccatcaacgccccccacgttgagcttggccgccgcaaccttcctctacctgctgccgctgtgccgaatggcggtttcagctgtgcgtcaccgccgtgcaataactactaatatatgagtgattttgggcgtatacaggcgaaattactcatatattagtagtttggcgaacaactatattgtattctcgaaaagcttcgcgataggcggtgataaggtccggcaaacgcattgaggcgttggccgggctggtggagggcagttgggtcataccgatggcgatgccggcttcggtcaggcgcggctcgataagtttgcggtaaagttgcgctgatttcgcgccggttgcgaagatgtgggcgattggagcgccgcgcaagattggtgtcaagtcgttgggcacggcattgcggatgctggcatcgctggctccggtgatatcgcaagaagcaatgacatcccataacgcaatgtggtggcgcagagcaaacgcacgacgggactcaggtaaatcgccgacagcgtcagtaggatcagcggagttggcaaacagcgcctgcatcaccggccaaaaccggttctgtggatgcatatagtaaaacgccgccgctcgggatttcggactcggcatcgatcccaaaatcaaagcccgggactcaccatcccacaccggcccaaacccatgctccacatgttcgctcataagccccatattatgccgtttggtcttgaaaatagttcgggggcggacagttaatgtcatattccctcaaagagaagaaggatttacaatgaaaaaaggtggaagaaattgccagtgaaggcacaagccattcttattggtgttttagtcgtcgtttgcgcaattgctgcggtatttggatataggtcagttgacaatatgctgcatcctcaggcgactctgaccaattcggttgtggccaggcagttggaaaagattcaggatcttactacggccaaggaaaccgattttggttttgaagagtataaggaaggcaacattgctccacgccagatcgtcctcgaagccatccggcaacggaaccagcggattcttccacatccggaaatccgcaaccagccgcttcaactcctcgacataccgtcgctcatccaaccgaatggacatccccactcaccctccttcacac

SEQ ID NO: 6 - DNA, 5929 bp, Unknown
  R30_18m  MAG No. k141_1282
atttgaagacgttgggtgccacggtgacggtggtgcgcaatgatgcgatcgacccgggcgaggacggtgtgatcgacgaatatgacggcgtgctgatctccccagggcctggcgctccggcggaatccggcgccagcgaagacatgatacgcctgtgcgcggagcaatctaagcccatgttcggcgtttgcttgggtatgcaggcgctggctgaagtgttcggtgccaccgtaagccatgcgccgaccatcatgcatggcaaaaccagtctggtggagcatatcgacgatgaggttttcgaaggagtggccaatccgatgaccgccactcgctaccattcgctggccgtggaacctgattccgtgccagaagagctggtggtgaccgcgtggacgcagagcgaccacatcgtgcagggcattaagcaccgcagcaagccgatgtacgcggtgcagttccaccccgaatccgtgatgacgcaggacggctaccgattgcttgcgaactggctgaaggtgtgcgggcaggagaacgcggtggagcgttccgccggattgcagccgaaggtcgcggcctgaaggcgcgaaaacgcaaggtgcaaatgcggaaacacacgaaacgtaaggactgtagggaatcacgaaatacgtgaaccgcgcgaaaatctcgggaacgaatctcggaaaaacgtgagtgtcgtaaaacgcaatcgtaaggatgaaggcccgactggggatttccggtcgggccttcatcgtgaattatgacggctatcgcggttgtggcaatcgatcagttgccttcgccgggagtggtgctgcttccgccgttgttgttgttgttgctgttgttgctgttattgccgccgttattgttgccgccgttgttgccattatcggtgctggaggatttggtggtcaacgtgatcgtggctccgctgtcggactgggtgccggcggttggagacatgcccgtgacggtgccatcctccggaccggaaaccgtgacctggaagccgtagctttccagcaggctcttggcattcgcatagctcatgccgaccacgctgggcacgctgacctgctgtttgccggtggacacccaaatcgtgaccgcggtaccagcctcgaccgtgcttccgacacccggatcgacgcgggtcacagcgccggaagcgatggaatcggaatactcgctttcgatggtgatctgcgtcagaccggcctgcttgagctgctcaacggccgaatccttcggctgtcctatcagattgtcgggaatctgggtcatgccggacgaaatgtacagcgtgatgatcgtgcccttggtttgcttcgaattggccgcaggatcggtgcttaccaccttgtctttttcgatggatgcgttgtctaccgtacgcacgttgcccactttgaagccggcggcctcgagaatggacttcgcgtcgtcctggctcttgttcgacacatccggcaccgcgaccgactgcggtccggtggagaaccatacggaaaccgtggagcccttggcgaccttcttgccgccccttggattctgcttggtgattgtgcccttcggcttgctcgaatcggaatcctcacgggcgtcgagcttcaggcctttggctgcgagctgctcttcgacgcgcgcctcggaaacattcgtcgtggcggtgaaatcaggcacttccaccatgtcggcagcggagtcgctcttgttcagcatgaagaacacgcccagaatgaccagcagagccaccagaccgcccacgacggagccgatgatgatctgcttcttcttgcgtgcctttgcggcctccgcacgctgttccgcacgggttttcgtggcaacgccgttctgcgggttcggcacggcctcgaattggcctgtgacgggattgaatgcctgcgttgcggccgtttcgccggtaggggtcatggccacggtattcgcggtcatttcggcctgcttgcgtgccttcatattggtcagatcggtcaacggattgaatgcggccgccatcggcacgccgccgttcatgaatgtcagcagatcgttcttgaattcggaagccgtggcgtaacggttctgacgatccttcgccatcgctttcgcgcaaatcgaatcccacatcttcggcaagcctggaacaaccgaacttgggggagtggcgacttctgaaacatgctggtaggcgatcgccactgcggaatcgccggtaaacggcggccttccggtaagcatttcatacagcacacaacctgcggaatacaggtcggaacgcatgtcgacgctttcgccgcgcgcctgctcgggagacagatactgcgcggtgccgaccacgccctgcgactgcgtcatcgtggcggcggaatcgtcgagcgcgcgggcgatgccgaagtccatgaccttgaccacgccctgctcggaaatcatgatgttgccgggcttgatgtcgcggtgaatgatgcccatgcggtgcgaatactcgagcgcgttgagcacgcccaccatcacctgttcggcgtcgcgctggctcaaagcgccgttcaccttgagaatgtcacgcagggtctggcccttgacatactccatcaccagatacggcagatgctcggtctggccggtttcggtggtgacgacttcctcgcccgaatcgtagatgtttacgatgttgggattgttcatctgcgccacggaatgggcttcgcgacggaaacgctcaaggaagatcttgtcgttggcgaagtcggcgcgcatgatcttgaccgcgacggtacgtccaagacgcgtatcgagcgccacgtgcacttcggccatgccgccacggccgaccagttggccgagctggtaacgttcaccagccaaagaggtaggcatgttgatgttcatccctgttccttcccatcagtgatcaaggagatatgaggtctgctgaccacgcggcgcggaagccttccacctgtaggcaccaccatcgtgtcagccagttgtgtctgctggtcgagcagacggcgttcgatgcgggacaatgtgcgcgacaccgtcaacgcgtccttcggacggtcaaggggatccttggccagcattgacatgacgaattcacgcagctgcacatcgacggagtcaggcagcggcggaaccggattattgacatgggctgcggcgatgtcaaccggcgtggcgccagtgaacggacgatgcccgcacaggccctcgtaggcgacgacgccaagcgaatagatatcggattgaggcgtggcatgctggccctgcgcctgctccggggaaatgtactgcgcggtgcccaccaccatgccatcctgcgtgatctgctcctgattggtggagtaggagacgccgaaatcggtgatcttcacctcgccggaatcggacaccatgatgttcgccggcttcacatcgcggtggatcacgccatgcgaatgggcgacgaacaggccacgcgcggtctggatgagaatcggcagcaagcgggtcggctccatcggaccgttctgctcgtggaacaggtcggccaacgacttgctgggcacatactccataatgaggaagccgatgccgtcatgctcgtagtattcgaacaaagcagcgatgttcgggtgtgcaagattggcggaattatgcgcttctgcgcgcaaacgaagcagtttggcctcctgcgtgacccctaaatcgccacgcaatgccttgatggccaccgggcggcccaactggatatcgtagcctttccacacttcgcccatgccaccttgggccagacgggcgtccaacctgtagcgtcggtggatgagctgtccttcaatcagtttcactctgccagcgcctcctgcatcatcgctttcataatcggtcctgcggcgaacgagccgtacaagtccacgttgtgtaccaccacggcaacggcgatcttcggatcgtccgcaggagcgaatcctatcacccagccgtcgatggacgtgttgccgtcgccgatctgcgcggtaccggttttcgctgccacctgcacgccgtcaatggccagattcgggttttccttggtgaccacggcttccatcatctgcgtgagcttgcccgcggtgtccgaactgaatgcgcggctcatgacctgcggcttggtctgtgagatgaccgacaagtcggaggaacgcacgcgatccaccagcgtcggctgcatgaccttgccaccgttcgccactgcggcggccaccagcgcgttctgtagcggggtcaccacggtgtctccctggccgatggacgccaaggcgagcttgtcgtcggctgcatcggttgggaacttcgacgccacgctcatccacggcgtgcccgtggactcggaaccatcaatggcgataggactgtcgaaaccaagcttttcggccatggatgagaccttgtcgtcacccaaagccacgcccagctgggcgaatgcggtgttcgacgaatacgccatcgcgtcttccaacgtgatcttgccatccgaaccgtcggcctgcgacactgcgttcgtcaactgcgtggccgtacctggaagcgtgtagctcgatccggccggaatctcggtgtcggtctggtattcgcccgtttccaacgcggcggcagccaccaccgtcttgaacgtggatcccggaggatacagctgcgaggtggcgcggttgagcatcgggttcgattcgttttgcgagagcgtggaatagttgccgttcgcttcggacgtgtcgtggcttgccaactggttcggatcgtagctcggcgtgctcgccatggcgagaatacggccggtcttcacctcgatggccacggctgcgccatcattgttggagaggccgttgtaggcggcctgctggatcttcggatcgatggacgtttcgatggtcgcgcccttgttctcttggccggtgaacagcgatttgaaccgctgccacaccagttggtcggattgacccgacaacagcgagctgcgcgaggcttcgataccgctccaaccgcgctggctgatggagaagaagccagtgaccggcgcatacagctcgccggccgcataggagcgctgataggagaacgcgtcgttcgacgggtcggatttggcgatgacggagccgtccgacgcgagaatcgcgccacgcggagcaccatactcgtggtagagagcgcgggtgttgcgcggatcactgttgagctggttcgcgcggatcgccgtgatgattgtggtggacatgcctagaatgacgaacagcgccaccacgatggtgaacagttggcgaagtgatttattcatgcctggctcccctctgacatgttgcccgatgggttcggcatgctcggcatgtcagacgtgccgaacccattcgatgggggagcggggggcatgattggcgtgcctgcgaccggcgtttccgccgaaacttccgacagtgttcccgtggagatgatttccgttgcttgagattgctgcatggcggccggtacggcgacttgcggaacggcttgcgcggctgcttgtgaaacagcttgcgattgtgcagcggattgctcggaggcgacgctgctgcgggcgcggctctgcttgcgggcgctcagcgcctgcatcgcctcgtattggaacgtgtcgctgtcgatatcggattcgggtttgtttgctgagttggaaatcaccattaagagtgctgccaacatgtaattcgctatgagtgaggatccgccggcggccatgtacggaagagtcaaacccgtaagtggtatgactaacgtgatgcctcccaccacggtgaacacctggaaggccatggtgaacacgaggcccgatgcgagaagcttgccgaacccatccttgattttcatcgcagtgatcatcccggcggcgatgatgagcaaatagagcatcagaatggccatcaggccggtgagg

SEQ ID NO: 7 - DNA, 126538 bp, Unknown
  R30_18m  MAG No. k141_1339
cctctccttccggttcgcgcctcatcgtacggccttcgtaaccgatgcaatggccgcgaccgactgcccggacggcgcctacaagttgggtgcactggacgtgaacgtggtcgacgggcatgcgcgtttggtttccaacggtgccatcgccggctccactctgctgctggaggtcgccgtgcgccgtgcggtgtgcgaactcggtttgagcccggtggatgcggtcgaggcagccacgttggctccggccaaggcatttggcttcgacaagccgaacccggtgaccggggtgcctatcggcctcatcgcccccggctatgccgccgacttcaaccttgccgatccgaccgattggacggttgaacaggtgtggtgcgcaggccgcaaattgaaatagcgctggatacctctccgcaggagaataggcggagctggtggggggcggggtgacagtactgcgtcggcacagtcaccattcgcggcaatgcggtgcgacgccgacacggcaaatgacgaattgcgtttgaccgcactccgtactatattgttgcgagttgctttgcggagcaaagtaacatccaaggggctgtagctcagttggtagagcgcttcgttcgcatcgaagaggtcgcggtttcgactaccgtcagctccacgagaccctctgcattcattccaccgcagagggtcttttcatttgtcttcgttggtattgtgccatctcgcgtttcaaggggctgatttggggtttaccggaggtctacttgcgtttcgaggggctgatggtcaagtagatatgccgccaaaatggcggaatagcgttgcgtcaaagccgtttgtactggtgcttcaccggatgaggagccccttgaaacggaagtagacttccggaacatgtgaaatcagcccctgcaaagggagaatgcctcgattccgccatggattgtcgtggattgctctgtggtatgggcaatactgggagtatgacaagcgcagatgagttgaatgagcagtatgacgctgacggtagcgtgacgcaagtgcctgaacgcaatgatgaagttcatgccggcgaatccgccgccacccaatcccgcgaatcggccgtgaccgtccccgccggcaccgtggtgctcgccgcaaccccgatcggcaacgttggcgacgcctccgcccgtctggtggccctcttggagcgggccgatatcgtggccgccgaagacacgcgccgcctctacgatctcgcccgtcgcctcggcgtctatgtgaacggtcgcgtcatcgcctatcacgaccacaacgagcgcgacaaggccgacggcctgctcgaccaggtcgaaaccggcgccaccgtgctcgtcgtgtccgatgccggcatgcccaccatcaacgaccccggcttggccatcgtgcgccgtgccatcgaacgcggcctgcccgtcacctgcgcgcccggcccctccgctgtgctcgacgcgctcgccctctccggcctgcccaccgaccgcttctgctacgagggcttcctaccgcgaaagcattccgagcgcgtgcagtatctgcgcacgctgttgcccgaacgccgcaccatcgtgttctacgagacgcctcatcgcattgccgattcgatggacgatctgctggacgcgttcggcccgaatcgcccgatggccctgtgccgcgaactcaccaaggattatgagcagattcgtcgcggcccgattggcgagattcgccaaagtgtgattgatgatccgccccgtggcgagatggtgctggtcatcggcggcgcgtccaacgaggaggccgaagcggccgcgcccagtacgttgagcgtggatgacatggccgtgctctccatcgaccgtgctttggaggaaggcctgcgtatcaaggacgccatcgcgcaagtggtgcaggagcatccactggctgacggatcgttggccaatcgcaagcaggtgtatgcggctgtgctgaaaatcaagggatagcgcagcagccggcgattatctccccgttacgcttccatcgactcgaacaatatttccaacgcctgccggaccccaggcccaccacgctgcgagaccaattccagcaaaggcgcgtcggctttgggattggcaaccagccatttacgcagttcgggcacgtgatatgcgatgtgccagagcacggcaacatccgtatcgggcgaacatgccaccgcgggcgtaagtctgatgggtggttcaggcggcgcggtcatatccgagattgcgcgcgatgcggattcggatgagtgtgccgccgccgcgtggcgaggcaaccgttgcgcctgccgcaaatgccgtaaacggtgagcggcatggcggcctctgcgatgtcctttggcgatgaatcccctcgtcatgcgcattgctccaaagccggttcgtcaatctccttctgcaccgattcaaaaaacatgcgtgcgcgtccggcatacttgtgatgccgatgctccttgacgatttgcagacagtcgtttggccgaaactggtacgcggacatcagctgacacaccagtgcgttgacggtggaaggatcggggatgtcttcaggactcatcaccaggtcgcaagccgtacgggctggcgtggtgacaggcagcccgccgagcttgatgatttgctccggcaacgtcaatcttttgaatacgcggatgcggcggctgacggatgccgagcggaagtgcgatgtggagatcacgtctatggtgctcggaaagtcggggcctcccagccatacccaagcggcggtcatcgaacacaccacagtgccaaacggggcgacctccgcgacgatttttgcgcgaccatacagtgtgcccgaatgctcgatccagtagccggcggaatcgtcgagcttacgtaacgcgccgaaggcggccagacggttaaggctgagcggtcccggcagatccttggtaaacagtatcggcggcaccgcgggctgcgcggttgccggcgaggtgactgttgtgatgtccgtcatcggacctgctgtgatatccatgaccgaacaatatgcagaaatgcggcttgcgcgccaccggataagcgaaaacggtggataagtgcataacttcactaggtgcgcgaatgatgtggataactcggtggatatcgacaggcggaagtgtgtgcggatgtgcgtggacgtgcgtacggatgggtgcgtggacgtgtgtacggatgcatgtacggatacgtgtgcgaatgcgtatgcggataagcgcgcaagcggtgtacggataagtatgtgggggaagttacgggtggataggtgagtgggatgaggatggcggcgcggcagctatccgggcgtgtccccgccgcgccggataatcaagccttatgagtcatgttttggtgaatgttgcttggccgtatgcaaacggcccccgtcatatcggtcacgttgcaggatttggtgtgccctccgacgtctacgcgcgctacgagcgcatgaagggcaatgacgtgctcatggtgtccggcaccgacgagcacggcaccccgattctcgtcgaggcggagaaggaaggcctcactgcccaggaactggccaaccgttacaaccgcgtgatcgccaaggatctgtgcgacctcggcctgagctacgacctgttcacccgcaccaccaccggtaaccacgagcacgtggtgcaggagatgttcaagcagtgcttggagaacggctacatctacaagggcacccagcaggtggcgattagcccgtccaccggccgtaccctgcccgaccgctacatcgagggcgagtgcccgatttgccacgccgaaggtgcgcgtggcgaccagtgcgacgcctgcggcaacgagctcgacccggacgagctcatcaaccccgtctccaagattaacggcgaaaccccgcgcttcgagcagaccgagcactacttcctcgacctgccggcgctcgccgaagccaacaaggcatggctggagacccgcaagggctggcgcaccaacgtcatcaacttctcgctgggcctgttcaaggaggtcaagccgcgcgccatcacccgtgacatcgactggggtatcccggtgccggtgaagggctggatcgacaacccgaacaagaagctgtacgtgtggttcgacgccgtgatcggctacctgtcggcctccatcgaatgggcccgccgccagggcgacccggagaagtggcgtgaatggtggaacgatccggcgtgcccggcctactacttcatgggcaaggacaacatcaccttccactcccagatctggccgtccgaaatgctggcgtacaacggcaagggctccaagggcggcgaaaccggcccgatgggtccgctcaacctgcctgagcaggtggtggccagcgagttcatgaccatggaaggcaagaagttcagctcctcccgcggcatcgtgatctacgtcaaggacatcctcgcccgctaccccgtggacgccgtgcgctactacatttccgtggccggccccgaatcctctgattccgacttcacctgggccgagttcgtgcgccacaacaacgaggagctcgcctcctcgtggggcaacctggtgaaccgcgtggccaacctcatcaacaagaacttcggcgagattccgccgctggacgaggattcgatgaccaacgaagaccgtggccttctggaagaggcttccgccgcgttcgacgtggtcggctcctccatcgaaacccaccaccagaagcacgccctgtccgaggcgatgcgtgtggtcggcgacatcaacaagtacatttccgccaccgaaccatggaagattaaggacgaccaggctcgtctcggcaccgtgctgcacgtggccgcccaggccgtgtctgacgcgaaccacctgctcgcgccgttcctgccgcactccgcacagagggtgtgggaggcgctcggcggcaccggcaccttctcgccgctgcctgagctcaaggaagtcgaggatctcgacaagcccggcttcacgtacccgatcatcaccggcgattacgagctcggtgtgaacgtgcacccgtggaagagcgaggcgatcgaggtcggcgccgtggtgcctaagcccgcaccgatcttcgccaagattccgaccgaggccgtggaagaggagctggctcgcttcgatgaagcgctggctgctcgccgtgccgccgaagccgagcgtctggccgccgagaaggccaaactcgccgccgagtgattcggcattgctagctcgtagctgacgggccacctcgcacatgaagtgttgcgaggtggcccgttgccgtatgtgcggtcaagccccgacaatgcgaggccggttgtcggcgggcgtcacaaattcgtcacactccgccaagacttttcccagacaagcacatcaattcgccaagcatggggcggttatatagaagatgtcaacggaatgaagttcataccggtggcgaggttcttcgaaccccataactgaacccttcttctctcttctctctcacccggcggccccctccgccgggttttttttttaatgctgggaatgccatgggccgcatattgaaaaaaggattatggcagagtgctgtctgtttacaataaggcattgctgttctagaaaataacaaagaaggggggactgatgatgtataccgtcacattttcgggcaacctgactcaagcggaatcggccttggtcgagcgaggcgccatacagatcgccgcgttgctggccgcaaaaatcactggccgcggactcatcatcaacgacggtgacaccgaatactcatgggatttcatcctggtcgatgccagcagcgatgagcggcacacctttgacgagaggctattgcggatgctgtccgactacatccacgccggtttccccgatgccgtgatccgccacgccaagcacgaggctccaaagctcggcaaataatattggtcgcgtggtgagtcccatacttccgtcggaatatcgctatcgcgatatggtcgcatgcctgttgcgcattgaagcgttcgacctatgcgcagttgatgttccggtgatgacggcaaccgattgacgcgattaccgggacagatttcgctgtcccggttcgtgatttcggcttctttttgggaaccgggacagccccccttgtaaacgcccattatccgtaatcccaaaaccccggaattccgccgatgtacgatggcgaatattgcacggtggggtgataggtgaatgaaattttgtcttggttgctcaaaaaggggcgaaatggagaaccgggacagcgaaatctggcccggtccacacataaatcgattgacatcgctaccgggacatcggacacggacaccgagtcgcgcagcgtcggcgcaacatggatactgtacgactttcgcgataaacgttatattcttcgtcgcctccgccggacgatctcatcgagtggcgttgccgtcaaagtgaaatcgaatacggcacctcgcaatgccaactgccgcccgacccggtaggcgagttcggcttgggatggctcatcggccatgttcgcggcagtggcgatgatgacgatccaatgatgatgtcgcagcagttcgcgcttgtcgttgtcccgccgccactggtttttgtcggtgcgatgatgatcgccgtcatattcgatggcgacgcgaaattcgggccaagcgagatcgagcgttatcggcgcgccgttgctgaatgtcgcgccgggcaccgtgtaatttgtcacggctggcggaagcccgtatttcgtcgtcgcgatgcgggtctttgattccatcggagagtccacgcggggcgtaatgaatgcaagagcgatcatgcacttggattttgcgttgaatttcgggagtccagtgacttgccgcacgaagtcctgataaatgccgtcagcagtgcggccgttcgccagacccggcttgcgggcgattgccgtaaggattgcgtcgccaagtatgaccagcgattcgagcgatatatgagcggcgagttgtgcccaagtgtgtatcagatccagtgcgtacacatgtttgttgatacgcacattgtgcgcatcactcagcggcttccagatgtgtggtgtcgttggcggcacgatggcacgtattcgtgtgcggtgtgagtcggagacggtatggagctcggcggggtcgatatcgcaatccttgggaagcggcacggattgcagtatcagcgatgtggccatgccgaagagcaccggttgcccgagctgttgcgcggcgtccgtgcatcgtttaagcatttcccgcttacgttgggtgagggtttcgctcattgctggcggcacagggcctgtaatcacagttggcgcggaactcgccatacgtggtgatgaacgtagctcaggattgatggtgcgcgcagacgcaacgcccggtgtgtggggccgggtccagccggacggttcgtcgtcgaatacgccgggcggtggagtgggcaatatgtcgttcatgacgccaccgtagcgcagcggtcacatgctcgctatgaaaaccggggtatgtggctctagcttgcgggagatgtggataactctgtggataactagttcggaacaattagcgaggccggaacctaccggcaattggccgatgatgacggcacttttgctcagctcagccgcgatagtctcgaataggtgcggccgggcgtactcgcataacgtaatgccccttctctctgaacagagaggaggggcattcgaaatatatgctcccgccagcggaacgtcagcggcagcggcgggtgagaggctgccaggggtcgagctcgaccggttcggcggtgagcagggcgcgggtggcgtcgtcgaggtattccttgcggatgatgagctcggtgacgtagcggtcgaaccaggcgtcggacatgacgtagtagccgtccttgccggcgtccttgccccagctgttctccaccttccagcggttcggcttgccgtcctcgccgaggttcacgccggtgaaagtcatggcgtggttgctcgggctgtcgccgtattcgagtccgtgagccttgtctccggtgaattcggtgccgaacagctggtcgacgcgcaccacggactggtcgaagaagccatccttgcgcagcgcgaactgcgtgcagtcgcaggcgaaccagatcgggtggccggcggtgagctggtcaagcgcggccttcttgaacacgtccagcggcacgttgacgaactccatatcgcccgcctcggccacgttcgcgctgaagcggatgcggtagcgccggttgaacgggcggttcttgagtggggcgttggccagcgtcgcgaaatcgttgacgtccaccggcacgtacttcttgtagaactcaagcggggtgatgccgatctcgcgaatctgcgggcgctcgtccttgccggtcttgtccttgttcttatcgcacttgcacgccttggcgtcggacttgtcctcgcatttgcaggagtcggtcttgccgtctgcgtcgacctcggccttgcacttgcaagcctcgcccttcttatcctcatcatcatccttggtgcgcgcgaagaagtcgaacttctccggcggctcgccaagcgacacggcgcagatgcggtacacggtgcccatgtactcgtccttcagcgcgcgcagctcgtcctcgccagcgcccgcagccgaacggcggcgcagctcggctgcgaactcgcgcagcttggagttgaggtactgcttgaaatcatcggaattacgggagttctcggactccgggtaggcgctcttgggcaccagaccgtacttgttcaccagcgcggcgaacatctgccaccagccgccgtcatcggacgggccccagttgatggcctcgaacaggcgcgagtcggtgggctcgtcgagcgtgcgcagcacattctccaggtaggtgttcgacttctccatcgcatcccagaagaagaggtaggtctcggagaactcgaagtcctcaaggttccagcgatgcataagctcgtagcgcagcgtgttcagggaggcgaacatccagcagcggccggaacgctcctgattggtgatcgaaccctgcttgagttcgatggagaagtcgcgcggcagcgcacgtacgccgcgatagtcggtggccgccttgagtacgccggccgaaaccgccgcgtccgccgcgatcaggttggcgcggtccttgttgaagtcttcggtgtacgtacgtagaagttcgggtttgatggcccgtgcgctggcgtctgtcgtcatgatgcccctgtctgatgctgatgatgctgatggataatccgttgccggcggcggggactgtcaccatccgggccggcggactgctgacacgaaagtataaggcatgtccagcaaaggctcaggaaatacaaaattaacaaacggatgtttgcccaatatacagtaagtgttttcgcggttttccgtacaggaaaaagtcggaaaagtcaatacccatattccatatattgaacttaatttgtggttttgagcgggggggggtatcactttcccagttatctgggaggtggttgggtgttcaagtacatcatcaagcgcattgtgaactacgtgatcatgctgttcgtggcagtatcgatgacgtatttcctggccagcgcattcatggatccgcgttcgaactacatgtcgcgcaatccgcatccgccgatcgcgtcgattaaccggtcgctcgatctggccaacatcaacgaccagacgccggtcgtcatccgctatttccgctggctcaagggcatcctcacccagtggaactggggcctgagcccggaccagtcgccggtggcgccggccatcgcctcccgtatctccgcttcgctgcagctggtgacgctcgccaccgtgctctccatcctcttcggcgtgagcatcggcgtgtacacggccatccgccagtacaagtggcaggaccgcgtgctcaacaccaccgcaacgttcttcctggtggtcccggccgccgtcatgggcctgatggtggtgctgctggccatcaacttcaacaacatcgtgggcagccgcgcgttctacgtgaccggcctgcactcctaccaaggctccaacccggtgctttgggtgtttgactatctgcagcacctgatcctgcccaccatcgtgatgacgattccgggcatggtgggctaccacctcacccagcgcacgtacctgctcgacaccatgaacgccgactacgtacgcaccgcccgcgccaagggcctgacgctcaacgcggccattcgccgccacgcactgcgcacctcgctgattccgaccgccgtggatgtggccttctccatcgccggcgtgttcaccggcgcggtgatcaccgaaaacgtgttcgccatcaacggcctgggcatgtacttcacccagaccatcgccaacaacgacatcaacggtgccgtggccgtggccgcgttcggtggcgtgtgcacgctgtccggcgcgctgctggcggatatcttctccgcctggcttgacccgcgtatccgactgagctgagccccgcgcaaaggacgatctaacatgatgaacgacaacgaaaacatggtctccgacgccgccgcccaggatatggaactcaccgatccgcagggcagcgaaccgcagtccgccgacgccaggaacgcccaggaggcttccagcgccgacgacttccaccgcaccggccgcatgcagctgtacgtgcgccgcttcatgcgccgcccctcggccgtggtgggtctggtggtgctgattctgctgattcttttggcgattttcggctcgaaattctcccagtggagctacgatgagcccgatttcgccgccctcgcctcgccgccgtccgcccagcactggctgggcaccacggtcggtggctcggatatgtacgcgatgatcatccgcggcctcggccgttcgttgaccatcggtatcttcagctcgttcggcaccacgatcatcgccgccctggtgggcacggccgtggcgttcttcgaaggctggttcgagcgcgtgggcatgtggctgctggatatgctgctcgtcgtgccgtccttcctgctcatcgccctgatcgtcggcatggcggccggcggcagcgactggctgtggctggccatcggcctgaccgcattcggttggatcggctacgcccgtacgctgcgcacgctgaccctgagcctgcgcgatcgcgaatacatccgcgcggcgaagttcatgggtgtgccgtccttcaccatcatcgtgcgtcatctggtgccgaacctgggttcggtgctggtcatcaacaccgtgctcggcgtgatcggtgcggtcaacagcgaaacctcgctgagcttcctgggcctgggcatcaaggcgcccgacacctcgctcggtacgctgctcaacgccggccagtccgtggtgcagacctcgccatgggtgctgatcttcccgtccgtggtgctggtcgtcctgaccttctccgtgcagctgatcggcgacggactgcgtgacgccatcgacccgtactcccgttccggcggcaaggccgagtgagaggggagacgggcatcatgagcgacgaacgcaacgcaagcaacgtaacaaccaacaccaaccccaacaccacaggagcgcaaggcatggcatccgaaccggtgatttcagtacgcgacctcaccgtcagcttcgcctccgaagccggcaccgtgcacgcggtgcgcggcatgaacttcgacctgtaccccggcaagaccctcggcatcgtgggcgagtccggctccggcaagtccgtgacctccatggccatcatgggcctgctggacaagaacgccagcgtcaagggctccatcacctaccacggcgaggaattgctcagcaagtccgatcttgagatgagcgagatccgtggcaagggcatcgccatggtcttccaggacccgctctccgctctgaccccggtgttctccatcggcgaccagatcaaggaagcgctggtcacccacaatccgaagatgaccgaacagcagattcacgaccgctccatcgagctcatgaacctggtcggcatcccggacccggaggaccgcctgaagtccttcccgcacgagttctccggcggcatgcgccagcgcgtgatgatcgccatggccattgccaacgacccggacgtgattatcgccgacgaaccgaccaccgcactggacgtgacgatccaggcccaggtgctcgaagtgctgcgcaaggcccagcgtgaaaccggcgcggccgtcatcttcatcacccacgatctgggcgtgatcgccggcgtggccgacgacatcgtcgtcatgtacgccggccgcccggtcgagaaggcggacgtcgactccatcttcgaccacccggccatgccgtacaccatgggcctgctgggtgccgtgccgcgttccgaccgcgaacgcaacagccgtctggtgccgattccgggctccccgatgaacctggtcaacatgcccaagggctgcccgttcgcgccgcgctgcccgctggccaccgacatatgccacaccaccgagccggccatggagccggtgccgggccgcccgggccagttcgtggcctgccaccgcacccaggagatcgtggacaagggcctgactttccacgacgtgtacacggtggccgaggccgccaagtcgaagttcgccggcatcccgcgcgacgaacgcaagatggtgctcgacgtcaagcacatgcgcaagaccttcccgctgaccgccggcggattcctgcgccgtaagatcggcgaggtcaaggccgtggacgacgtgacgctggacgtgcgcgaaggcgagaccgtggcgctcgtgggcgagtccggctcgggcaagtccaccacgctcatggagatcatggagttcaagcagccgcaggacggcgagatcgagatgttcggcaccaagctcgaacacaagattccgcgcgagaagcgccgcgagctgcgttcggccgtgcagtatgtcttccaggacccgatgagttcgctcgacccgcgcctgccgatctacgacatcctggccgagccgatgaaggtccagcactactccaaagagcagatccgcgaacgcatcggtgaactcatgcgtctggtggagctgaaccccgaccaggtggaccgcttccccacgcagttctccggcggtcagcgccagcgcatcgccatcgcgcgtgcgctgtcggtcaacccgaagctcgtgctgctcgacgagccggtctccgcactggacgtgtccatccaggccggcgtgatcaacctgcttgaggacctgcagaacaagctgggcgtggcctacctgttcgtggcccataacctgtcggtggtgcgccatatctccagccgcgtggcggtgatgtacctgggccgcatcgtggaatccggcgacaccgaagacgtgttcgagcacccgttgcacccgtacacccaggcgctcatcagcgccgtgccggtgccggacccgaaggcggaacgcacccgccagcgcatagtgctcgaaggcgaggtgcccagccccaccgagacgttcgaaggctgcccgttcatgggccgctgcccgctcatgcccaagctgagcgccgaacaacaggcccgctgccgcggcgaacgcccggcgctgcggccgtatgacacttcccgaccgagcggccatcaggttgcatgccatttcgcatgacggtcggaaccatatagaggaggaaataacaatgaacaagacacgtaagctgaccgcgctcgccgcggccactgcggcgcttgccatgctgcttgccggctgcggcgcgggcaatggcaacggttccagcaacgcctcgagcgccaccgaaccgccggccggcatcgattcgtcgtacaccggcgacctgcccatgccgaaggtcaccgagcgttacgacaaccaccagagccgtgacaacgtcaaggacggcggcacgctgaccctgtccatcgtcgaaatcggcccgaactggaactacctgtcttccgacggcaacaccggctacatgtccgagctgtggagctggtaccagcccagcctgctcatgaccgaccaggtcaatggctccccgattaaggtgaacccggacttcctgaccgacatgaagctcgtgagcaaggacccgatggtcgtgcagtacgacatcaacccgaaggccaagtggaacgacggctccgacatcgactggaccgccttcaaggccacgtgggaagccaacaacggctccaacccggactacaacccgccgagcaccgacggcttcgaccgtatcgctagcgttgagcagggcgacagcccgaagcaggtcaaggtgacctacaagaccccgtactacccgtggcaggaagtcttcggcactctggtgaacccgaaggccgccgacccgaagaccttcacccagggctgggtgaagaacccgcacaacgagtgggccgccggtccgtacaaggtcgactccttctccgactcccaggtcaccttcgtgccgaacgagaagtggtggggcaacaagccgaagctggacaagatcgtctacaagcagatggccgacaccgcctccctcaacgccttccagaacggcgagatcgacgccgtggaggccaacaccaaggacgacatcaaggccatccgttccgtcaaggacgcccagctgcgcatcggctacagcaccaagacccgcgtgctggagtacaacagcaagtccaagccgcttgacgacctgcaggtgcgtaaggccatcactcaggccttcgacgtgaacacctacaacaacgtgcagttccagggcctgaactggaaggccgagcagccgggctccgagctgctgctgccgttccagaagggctacgagaacaacctgcccgccgaggccaagtacaacgtggacaacgccaagaaaacccttgaggccgacggctacaagatgggcaaggacggctactacgccaagggcggcaagacccttgagatctccttcactttcttcggtgacaacgccacccagcaggccctcgccaacgcctaccaggcgatgatgaagaaggccggcatcaaggtcaaggtcgtgaacgtggccgagtccaagttctccgacaccgtgtcttccggcaactaccaggtgctgccgatggcttggcaggctccgagcgccatgaccttcgtggtgtccgccccgcagctgtacacctccgacggcccgtccaacttctcctacgtgggcagcaagaagatcgacgagctcgtcaagaaggctggcagcctctccgactatgacgagcagaccaaggctgtgaacgccgccgagaaggaagccctcaagctgtacggcaccatcccggtctccaacccggcttcgtacctcggtgcgaagaagggtctggccaactacggcccgtccggcttcgccggcaacctgccgcaggacatcggctggcagaagtgatgacgtctgactgacgtctgacatggccaccgcgccgggaacggccggccgcacgcatcgactgcaaggctttcgatgccggacgcggcctgcggcaggttcccggcggggtgtgaccgcggcagcatatgccttactctccttatttctgcatatgatgctgcggttgggaagcctcccatttgcgcgcttatgcgtcgcgcgcgaatgggaggcttttgcatacttgccgcgattccatcccggcaacgatttgtccaccttgctgcccgcgcggctgaaaccgtatccaccttcctcttcccggatttgtgacgctgacggttgccgagcgtcacaaatccgggagatagtcgcccttacttgttgtcagaacttggtgagcccggatttgcggatatggtcctcccagccatccggcttaggcagtgtgaccagttccctcattgtcactgcagggatcgcggccgccacgatgcacaagcccaaagccacggacgtgactgagtaaccccagtgttgcatggcgatgccggacagaaatgtgatcaccggggcagcaatcgtctcaatcatgcccatgccggcgaatacgcggcccatatgctccttgttgatgagcaatgattggaatccgttgattaccgcattgccggccggtagggccagcagcgaaattgccagaaacgccatacgcgcaagaatccacggagccagcgctgcgccgagcgcgccgatgctcatcagcacgtagaacgatacggcgactatgccgccgcgcacatgctgaaccagcacggaagagatgagcgagccaacgatgacgcccacagacacagaaacgttcatgaaactggctgacaccacatgtgatgggtcggagccgatcgagagcaccgtaatcagcaggaacgagttgaagcacgcgaacgccagcgcgctcgacaaaatcaggcgacgttcgaatcgctcgctaagaagccagcggaatccggaaaacatctcacgccaatactgtgacgcggatgatgtcgtggtcgttgcctgctcgtcagcggcctgagtgatgttggccgcatcgccattctcatcggcctcatcgtcggcaagggcgcggccctccgtattggtccgcccgccacgatgccagtattttgtgatccgcatcgccgccgcggtttccaatagattcagcagcgcgctgactgcgaatggcagccatagaccgccgccgatcaatacgccacctactggtgcgccggcgagttcgagggcggcatcgcggccatcattgaggcttgacgccttgggcagcaattgatcgggaacgatgcctcgtagcatcgtgttgctcgtggttcctaggaggcctgagcgtatgccgaggcatatcgcaagtaccatcagcaccgggtatatgagtaatcccgcccatcctagggccgcgcatatgccgaacagtgcgaaaccaatcaggccgaacgcaatcataagttttttgcggtcgtacttatcttgtaccacgccacctggcagccgcaataccgacgatatcatggtcatgattgaatccagcagcgtcgcctgtgccggtgagcccgtgacggtctgcgcgatgagtggcattgcgaaaccttggatacttgatgacagcgacgtgcatgaatccgctacgaaccatttgccataatccgtgccgcgccatagcgactcggtggtgttgctatgtgaattgtgaccgttgggctgtgttgaagattggttgttgactgttccgatgtaatcagccattgtgatcatctccgtattcatcgatgcttgagatattctattatgttcgtcttcaagcgccgcaccggactcacccccggccaataccgcgacgccttccccgcccgcctttacaacaccgtgtgattagggaaggtcagggtactaaccctgggaaaagtgcagtattctgcattattaaccctaggaaaaatgtaattttggacaatcgcaaccctaggaaaaatgtagaatacgcgaattgcaaccctaggaaaagtgtgtattgcggtataaatttatttttggccacatcgctcgtggcgctcgggcggcgcaatatgaatccgcgattcagcagattgtcgattctggtcttgcgttgcgggtgtatcgcgtcgaaaaacctgcggcaccattgccgtcataccgtgatgattccgcgttcaaactgtatctccatgatgttgggctgctggcagcggccctggatctgactcccgcaagcgtgatccttggtgatgacgggctgaccgaattccgtggtgcgttaacggaacagtatgtttgccagcaattagtggccgccggcatcacaccgatgtactggtcgaatgcgaacagtacgggagaagttgattttgtctttgcaggtaatggcgcaatcattccgttggaggccgaagctggtaccgagcgtcataagcgtagcttgaagtggctgtgcgacaaatacgggatttgcggttaccgtacgtcgatgcggaattacaaggagcaggattggctgaccaatgtcccactgtggatagtcgggagctacttccgcccgtggttggcgagtgattatgagccggatggcggagctgatttagggccgctaccgaatactgatgataaaggatgactgaagccgcgagatatggttcggccagttgctgaattggaagaaccgtaaaaccaagtagggcttattggtcacgggtgcccggcaggtgggcaagaccacgctgattgggcagttcggtgcagaccattatgagcatgtggctgaggtgaatttcatcgaaatgcctcaggcggtcgaaacggtaagcaaggccaaggacaccgaagacctgatactgcggttatcggtactttccggcgcggaaattacgccgggcaagactctgctgtttcttgacgagatacaagcgtgtgaggacatgcctacgtgttccatgatggcaacgtggagactgttggacgaaccgaatacctgcccatatacatgctgggttgtttgagcgtgatatgacatgcgccactttcccgggaatgtgtcgcggattgggtctgttgcccgtcctagaggttcggtccattgacccagcctgttgcttcacccttaccgtccgcaatggagtgaaccgactaatccatatccgcaaaatcgacaagcgtcactgtaccgtcttgcgccgcgcgggcggcgacatgctcgtcgaagcctgatttggagaacagcatgtaatggctggcttcggggtgcagcagtctggcgcgattgcgcagcacttccaactgctgcagaccggatggcacgctgcgccatttgcattcgcagaataggagagttttcggtttttctcctgaagccacgatgtcaatttcctcctgactgcgggtggtcggattggcgccccaccaacgtccggcatcaagcatgaggaaaggcaatgcctcggtaccgttatgggaccatatccactgaacgcagatgtcttcgaacacctgccccataaagtcggagatagtgcgcataacacggtcggcggcgagatcggcatggccggattgaatgagggacatgttgttcggcacatatcggtaccagaatcggaagaacgagttctcgatacggtagatcgtcttgcgaggagcgtcctcgccgaaaggtgtctccttgcgaacgattcccagatcgatgagattgcgcaaataggtggcgcatgaggacgattccatatggcatgcggtggcgatggtgttcgaccgagatgccccggaggcaatggcctggattacggcgttgtactcggccggactgcgcagctcctgcttcagcaagttgtctggctcctcaaacagatagcagcttggatcgaggatgttccaacggatgttgtctcggatgctgatgccgtcgtccagttgccgaagatactgcgggataccgtcggtaagtccgtaagcaatggcggcgtcctcgttgctgtatcttggcaagaacttgcggacatcggcgtagccgaatggctccactttgatttgagcggtgcgtctgccgtacagggggctctcatacccaagcacctggcgctccatgaacgacatggaagagccgcataacaccatcatgagctgactgtcatccttatggcggtcgatggcatgctgcaggaccgaattgatggtccggtctgctttggccagatatgggtactcgtcgatgacgaaggcgatgcgttgctttgcggccagcacgaacaccgcttccagtgcggattcaaagctgcggtatacgggcgttgtctcgaacgcctctgagcccttttcatacagagcaatgctgcggcttaacgattcgagattcttggaagcgctggattcgattgccgaaaagaaaatcgtggggcgatcttcgaggaagcggttgatgagtgtggtcttgcccacgcggcgacggccgtagaccacgacgcactcgaactgctgtgagctccagcggcgttccagtgccgaaagctccttatctcgcccgacgaacatggcccttgtctccttgctttgctgtctgcctggtgcacacgcgcaaattatagaatcgtaatttacttaattatgattctataatttggtcgactggtatgcaacaggtctcgagcgtgcattgccgcatgcgcaacgtttcgcgcgacacattccggggaatgttgcgcttagcgggccgtgccgcgttgctaatgcggggaacacgcagagttgtgggctgttgcgattggacgcaggccgtctagactagtacgcgtttgcgaaagtcgaacgtgcttcgaccgatgaaggagagctccggtcgtgcggccaatgacaggcgcagtgcgaagcacggctgatcgtgaatcgtggcggcagcgattgccgcgtgcggcgcaggagcatgccgcaccataccataagcaaacaatccccaagaaacggtgatcccctcacatgtacgtcgatccgggaatcaataccagtgcaagcaacctcaaatgggtgctgccatactgcaaaccagacctgccccgcgtggtaggcgcgctcctactgttcatcgccaataacacgatggccctgaccattccgattctgtccggtatcatcgtggaccgcgtcatcgtcggcggacatgccgacgaactgccacgtctgtgtggactgatgatcctcatgaccatcatccgcgtgggcgcgcgatacggctaccagatgtggatggagcgtttcggccagaactcggtctaccgcctcgtctccgacgaatacgagaagctgcacgagctcgacttcacgtacttcaaccacacacgcaccggcgacatcatgagccgcctgacctccgacaccgacgcgatccgccactgcctgagttgggtgagctatcagatcgccgactgcgtggtcatgttcgtgggcgccctgtgcgtgatgttcgctatcgattggcgactcgcgctcgtcctggcctgcgtcacgccgttcatttttgtgctcacgcgcggcctgtccacgcacgctcacccgctgttcttcgccatccgcaactcgctggcctccctcaactccatggtcgaagagaacatcgagggcaaccgtgtggtcaaggcattcgtgcgcgaaccgtacgagaccgaaaagttcgacgagcacaacgacgattacatgcagcgcaacatggccctggcctacaactcgcgcaagtacatgccttggctggacggcctcggcttctcgctgcagctcatcacgctcggcctcggcggctttcttgtcatcaagggctacatgaccctcggcaatctggtgagtttcaactccttcctgtggatgatcgacggcccggtgcgccagtccggctggctcatcaacgactggcagcgattcaacgccagctgcatcaagattcgtaagctgctcaccgaacagccgcgcatcgtggagaagcccgatgcggccgaagccgtcaagcaggcggtcacgatcgtcgagcaagtcaagcacgatgatgaggctaccggagcgcccggggcttccggaacatccggtgcccagcagtccgccgaacgcaagtcctgcccgctgcacatcaagggcgacatccgcttcgaccacgtcagcttcgccttcccggacgacccggagaccccgatcctcaaggacctcgacttcaccgtgcccgccggctccaagctcggcatcctcggcgaaaccggcgcgggcaagtccacgctcgtcagccttatctcccgcttctacgacccgaccgtgggccatgtgctcatcgacggcatcgacgcacgcgactggccgctgaccaccttgcgctcgcaggtgtgcatcgtggcgcaggatacgttcctgttctccgacaccatcggcggcaacatcggttttggtgccagcgatgatagcgacgaccgatatatccagaaaatggcccagatcgccggcgcggacaatttcatcaggtcgatgccgcagggttatgacaccgtcgtgggcgaacgcggcgtgggcctgtccggcgggcagaagcagcgcctgtcgctggcccgcgcgctcgcggacaatccgtcgatcctgattatggacgatacgacctcggccgtcgatatggagaccgaggcggagatccagaagcacctcaaggagatggacggcggcaagaccatcgtcgccatcgcccaccgcatctcgtcggtcaaggattccgacctgattctggtgctcgagcacggacgtatcgtcgaacgcggcacccacgccgaactcgtggccgcacacggccgctactgggacatctaccacaagcagctcggactccagtccggcgccgcacaggggttttagaagaggacttatggcacaacgcaatacattccgcgaggatgaggagctggaggagtccatcaacctccacgacatcgctcgcgtcggcaaatatctcaaaccgtatatggcacaggtggcgcgcattctcgtcgtcgtcatctcgatgagctgcatcgtcgtcgccgtgccgtacctgaccaagatcatgatcgacgaggcgatcccgaacaaggacctcggcaagctcggcatcctcgccgtaatcctcgccgcgctgatcgtgctgtacgagttcgggctgcgctaccgcacggtggcgatcacgcgcgtcggccagctcatgctcaaggacatgcgccgcgatatcttcacgcatatccagacgctgcccttcagctacttcgattcgcgcccgcacggcaagatcctgatccgcgtggtcaactatgtgaacacgctttcggacacgctgagctccggtctgatcaacgtgatctccgacgtgttcaccttcgtgatcactctgatcgtgatgttcgtgatcgactggcagctggccctgtggagcttgatcctgttcccggtgctcatcatctgggtgcgcgtgctgcagatcttccagcggcgcgccttccagaagctctccaacaagcagagcaacctgaacgcctacatccacgagtcgatcgccggcgtgaagaccacgcagaccttcgcgcaggagcaggcccagttcaggactttccaggagcagcagggcgaggtgcgttccgcgtggatgcacgccgtgcacatccagttcctcatgtggccgggcgtgcagaccatctccgtgatgaccatctcgttcatctacttcgtcggcgtgatgggcttcgggggcgtgaacgtgaccaccggcgtgctcatcgcgtttgtcggctacgcgaacaacttctggaatccggtgatcaacatcggcaacttctacaaccagctcatcacctgctcggcgtacctcgagcgcatcttcgagacgctcgacgtcacgccggagatccgcaacaagcccgacgcggcggacctgccgcagatccgcgggcgcgtcgacttcaacgacgtggtgttccgctacgagaaggacggccgcaacatcctcaacctcgtggacttccacgtcgaaccggggcgcacgatcgcgctggtcggcccgacgggcgccggcaagacgacgatcatcaacctgctgtcgcgcttctacgacgtgtccgagggctcggtgacgatcgacggccacgacgtgcgcgacgtgacgctcgcatcgctgcgccggcagatgggcgtgatgctgcaggacaccttcatcttctccggcaacgtgcgcgagaacatccgctacggcaagctcgacgctaccgacgaggaaatcgaggcggcggcgaaggccgtgcacgcgcacgagttcatcatggaactgcccgacgggtacgacacggtggtggaggagcgcggatcgaccctgtcggccggccagcgccagctcatcgccttcgcgcgcgtgctgctcgccgacccgcgtatcctgatcctggacgaggcgacgagcaacatcgacacgcgcaccgaggaggcgatgcaggccggcctgcagcatctgctcaaggggcgcacgagcttcatcatcgcgcaccgcctgtcgacgatcgagaacgcggacgagatcttctacatcgatcacggccagatcgtcgagcacggctcgcacgcgcagctgctcgccgccaagggcgcgtactaccgcctctacgagtcccagtacgcgatgattcgcgtggccagcggagcgccggaagagtgacgagatgttgcgcacaaggatgcgtttagcggcgtttcacatagcgggtgctgcgaccggcaccgattttgatgatcgtaccggagtccaacagtgatttcagcgtgcgctcaatggtggtggtgctggtatcgggcatgcgagcgagaatatcggccttggagagtggaactagggatcgatcaagcagtgcttcaatccgcgttcccttggtggctactcgcggtgctccctgcgctctgccgcctgccgtgagattgatgcgtccgtcgaattccttgcacgcggacagtatgatgccaagcaggtagttcgtgaatggcgcataatcattggcgttgtcgtcccatccttgggtgcttgcggccagcgcctcataataagtgcttttactttgctcgataaggtgttcgatactgatgtatttgccgaccatatagccattgcggtacaacatcaggagcgtgagtagccgactcatgcggccgttgccgtcattgaacggatgtatgcaggtgaaatcgagaatgaacatggcgatagcaagcaatggatcggtatgtccatctcggattgcttgcgtgtaggcggaacacgcgcgttcgatcagtattcgatgtagtcgaatgatctcatactgcctcattttctgcatcatacgaacttttctgcatcatattttatcaaaatgaggtagaaaatgggctgatgaggcagaaaaggcggcaggatggtggccatctcgcttgccggttgcgctactttcccgggaatgttgcgctcgtggcaagagacggcaagttcaggcggccgagattggcgatacccgtcgtgtagtcgaacgtcttaccggactgccttacgagcgttgctgacggtagcctacactgagaaacagcctacactgagaaaccatgagcaagcaccaccatcgcgaccgtagctgggccccggcacctgaagcattgccggacgacgcccagaccatcgacaaccacactcacgtggcctccgtaatccctttcgcgcgcgctatgagccatgaggcgcaggagaaggggcagcccgaagtcccggtgtacgacgtcgaccaattgctggcgcaggcgcaatctgtcggcattgggggtatcatcgactgcggttgcgagctgccgcacctgatgaccgccgtccagatggccctcgatcatccaggtaacgtgcacgcggcgctcgcaatacaccccaatgagtccgtgctccacgggcatcgcggtgtgccggggccggatggtctgcccctcaaatacaagccttaccatgacacgtctttcgaggacgcgctcgccgaagtacatcgcctcgccaccacataccccgagcaagtggtggctatcggcgagaccggcatggacctcttccgcaccggcgaaggtgccaaggaactgcagcgcgaggctttccgcgcgcatattgccctggccaaggaactgggcctgcccatgcagattcacgaccgcgactcccatcgcgaggtcatcgaaaccctgctggccgacggcgcgcccgaacgcaccgtattccactcgtattccggcgaccgtgagatggccgagattgcgcgcgaacatggctggtatctgagcttctccggcaccgtgagctacaaaggcaatgacggtatccgcgaatcgctacggattgtgggtctgggccatgcgatggtcgaaaccgatgcgccgtatctgacgcccatgccgtaccgtggccgcaccaacgcgccgtacatgatcccctacaccttgcgggccatggccgatacgctcgacctgtccatcgcggatgtggcgcgcggcacccgcgataccgcccgcgccgtatacggactgtgagggccgggtgtgcggccgtcgcggcgatgtgttgacttgtaaaatttgtcagaattgtgaacgaggtctaccatgatgtacctgacataagcgagggggatgatctccacctcaatggaggactgaacgtatggctgagtcgaaccaaaggaccgcacgcgcccaaaaagcctcaaaggcccagacagcccaggctggcgccgccaaagccaaggcccgacaggaagaagaagcactgctgagggccgacacctttaccaacgctcccaaggtgtcccgccgcactctcaccaaggaggagcgcgaggcactcgccaagcagagggaagccgaaaccaaggaagccgagaaaatcgccagcgcatggtcgaaaggcggcctcggccgatggtgggcccgcttgcaatccagcccagacaaggttacctggggcatggcgatcgtggcgctcggcgtggtgtacggcgacatcggcacctcgcccctctacaccgcgcagaccttccttgccggtcagggagggcttggcagcgtaaaccgagaggccgtgctcggcatgctgtcgctggtcttctggtcgattacgctgatcaccaccgtcaaatatgtgctcatcgccatgcgcatcgacaacaatggcgaaggcggcatcttcgcactgtactcgttgattcgcaagtacggcgcatggctcgcgattcccgccatgctcggcggcgcggcattccttgcggattcggtacttaccccggcggtttccatcagttccgcagtcgaaggcttgcagaccctgccgccattggaagggttgttcgatgaaaacccaagcctgaccctgatgattaccgtcgtgatcatcgtgattctcttctccgtgcagtcgcgcggcaccgaaagcatcggcaaagtattcggctcgatggtgctggtctggttcagcttcctcgccatcgtaggcgtcacgaatctctctaacgactggtctgtgttcgcggccctgaacccggtgtacggcatcaaattcctgttcagcccggacaatgctgccggcatcgccctgatgggcaccgtgttcctctcaaccaccggtgccgaggcgctgtactccgacatgggccacgtggggcgcggcaacatctacttcacctggccattcatcaaggttgcgctggtgctcaactactttggccaaggcgcgtggatgttggccaatagcgataacccgcaatacaccgcgatgaagtcgctcaacccgttcttccagatgatgaccccgaacgtgcggtacctggccgtgattctgtctgtttcggccggcgtgatcgcctcccaggccctgatcacgggcgcgttcaccatggtttccgaggccacccgcctcaactggatgccccatctgcaggtgcgttacccggcccgtacgcgcggccagctgtacattccggtggtcaacggcgtgttgtgcgtggccacgctcgccgtgctcgccatcttcaaggattccgaacacatctccgccgcgtacggcctggcgttgaccattacgatgatcaccaccaccgtgttgctcggcgtctacttatggcattccggcaagcgggtcggtgccatcgtgttcaccgtgctgttcttggcgattcaggctatgttcttcatcgcgtctatggccaaattcctgcacggtggttggttcaccatgttgctgaccgccgcgattctgttcgtcatgtacacgtggaatgagggcaccaagctcgaacgtgcgcaacgccgtcacatgcggcccaacgacttcctacccgcgctcgacaagctgcacggtgatttccgcatcccgtattttgcggacaacatcgtgtacctgacctccgactcggaaaccaagcgactcgacacggatatcttcttctccatcttcgccgaccaccccaagcgtgcccgtgcttggtgggcagtcagcgtggaaaccaccgacgagccgttcacccgtgaatactcggtggaggacttcggcacgaactacatctaccgcgtgcgcttccgtttgggcttcaaggtttcgcagtccatcccggcgtacatccaccagatcatgcacgacctgtccaaaaccggcgaactgcctaagcagaagtcgatttaccccaaggtcgacgccgatccggacatcggcaccatccgttacgtgctgattcacaaggccctgatgccggaatccaaggtttccgcacgcggtgccctgtcgttgcaagccaagtacgcaatccgccgcatggccggctcgccggttaagtggttcggtctggcaccttacaacccgctggtcgaggtgcagccgctgttcgtctccacccgccgcccaccgcgtctgaagcgcaccgatacggccaagaccatcacgacgcccacgccgactcgtgcagtggccgacccggccgccgtccccgacccgatggacaccacgtccgggctcgggcgattggtacaggagctcgatgccgccgtatcggccgaggaacggaagatcgctgaggccgctgccgccgctgcggtcgctgagcagggcgataagggcaaggccaagaacggcaaacccgccgccaagcctcagcgctcctccaaacagaagcgataacataccagtttgcagcggcgctgatgcgctctataaagaatggctataacggtcgccgcacgtcgccgcacggtttcggtaagttgaaataccatgtgcagattactgggatacgcgacggcaggtttcaacctgagtctcaacgccgtgttggggcaagacaatgtcgaggatttccgtgaactgtctgaaatccacaatgatggctggggtgtagcccagctttccgatcccgccgaagcgccgcacgtgcgcgacggtggcgcacccaccccggaaaccggcacccgaatctacaagtcgaccatcgcggcccgtcatgacagcacgtttgaggcgctggccgacgaaccgtctcgcggtgccatctggcacctgcgcttggcaagctccaatctgccgctcatcatggagaaccagcacccgttctatgcgaacggcctgagcttcatccacaacggcgatatctcggacgccaatggccgcaacattgtcaccaaccgctcatacccggtgaaccacagcgtgctcctctccaccggcggccgttccgactccgctatcttcttcgcggtgattctggactacatcggcttcggcttcccgctcgacgaggccgtggcccaggccgtgcgcgaactgcgccaagcctacccgaagtccagctacaactgcatgattcagtccgaggaccagctcatcgccctgtgcgccgccggtcgtgagaagaccagcccgcgcatcgtggaaatctacgatgagtatggccgtggcgagcaggccgccgactaccgtgtgatgcgctaccgtgagctgcgcgacgacaacggcgactccgccggtgtggtggtctcctcttccggctatgagcaggaaggctggaacgtgctggagaacgaccagatgatcatcgcctccaaccgcaacggcacctaccgtctccgttctatctgaaatagcttcataagccgtctctgacgaggggccttgagcctcaaatcatccgcatcccatacttctccgccaacgccggaatatccggcacgccatacttggccaccagatccagccatcgttgtttgttctctccgccaaatcgctcggctcgggccgtatacgcctcgacctgcaggaacttcggcggcactgacttgctatggaacttgtcggcgtacatcaccacttcctgctcgagattcatcggcacatagtcggctggtggcaatggcagctcctggcgcaccacatcctcgcgcgtaagtcccacgccggtatggttgcggcagaactgggcgatggactcgtccacgccctcgtcgagcagatactcgtagcccttaagaccgtgcagaatgtagcgtttcttgctgaatttgagcggttcgtcgtcagagccgtcatgcttgaacacgcggtaggtgccgatgtcatgcagcagtccgccgatgagtactaaatgctcgtcgagcagacgcggcggcacatgaccgccggtgacgcctgcggtgggcggtacctccgcgtccttcggtaatgtgcagcggcgcgtgaacagcgcgttctgccggcgcacgatctggcagccgatggtcgccacaatcacgcaatgcgtgtgcaccagctcgtacgccgccttggacggcgcgattttgcggtgcaattcgtcgatctgctccagtgtgggaatatatccggtcatgattatcaggtttcgcctcgtacggtcagatttatcttcagattagcgcggcaatgagccgcatcaggattgtcaggagctgattcggacatctcgacatgcctatctccgtttcaaggggctgattcggcatcctcctgaggtctacttccgtttcaaggggctggtgcccaagtatacgcggtgtaaaaacggcggaatgacgttggcatgaagccgtttatactcggggtttggcggatgaccagccccttgaaacggaagtagacctcccggaacacgcaaatcagcccctcgaaatcgaaaaagctcacgatgtttggtatgtatccgaacatcgtgagcttcaggagcctgtgctggtgtgtctggtgtgtattgctgccggacagatcagatcttgaagagtgtgtcggctgcttcagcgagctcgcgcgatgcagtgagcacgataacgcaatgcttcgggtcgccggtgtgcgccagcttggccagcgcggcgaacacggtcacctcgtcatccgcgttcagccctcgtgtcggctcgtcgaggatcagcacttcggcctcggtgctgattgcacgggcgatggccaccaaacgctgctgcaccaaaggcaacgtgccgacggccacgccgctggtggcctcggagaagccgaccttggccagcagttcgcgggcgatcaccggcttgggcttcaggaagttgcggttggacgcatccatggcgtacagcacgttttgttcggcgtcgagattcggttgcacggcgtgcagctgcggtacgatgcccagacggtggccgcgtagttccacgggctcgagctcaacaatgttggcgctcttgttcatcaccgtgccagacaccggcgtggccaaaccgctcatcacgcccatcagcgcgcgacgtttggcgtcggcggtgatgcccgaatcggggtcgtcgctgatcagcagcgcgtatgcgtgtccggagtagcagaagaaattcgcgccatcgaggatgttgaccttgcccttgggaccggcgaccgtcaccttgttcagggcaaaggtcgggtaggtcttgagcagaatgtcgtcggaaccgccgcccaccaacacgcgatcgatacgcgaggccagcgtcatggtgggttcggccgctttgccctgaggctccgcatgctcggccaatgcgtctttgtgatcggttttggccagtcggagtgtttcgttgacgcgggcggcattgcgctcggtcacttcggcggatgcgttggccgaagcgatggcgtctgcttcggcctcgctggtctcgtcggttgctccggtttcggcagatgccagtgcgctgtaaataccatcgtcaacagtgccttcgtcatcaacgtcatcgaaggtcacgctgaactgcacggagtcagctggaacggattcaatggcgtcgttcgtctcagtctcagaagtcacttcgtcagccgttgcgtcagtggtcttctcgagttcctgatcgttattcttgtcgctcatgcctgtgcctccgcatcgtcggttgtggtggtcgtcttattggcctcgccagcatcatgagcggtggcctcagcagcttcatcggtctcagcagcgccagtggcttcggccgcttcaatctcctcggtctcgctcacggtgccccagtcgccatcggcggcgaacagcttgttcgcgctgaagaacgcaaggcgcagggcggcaagaatcgccaggatcaggattgaacccagtccataccagaccatggtccaaatcaggtccgatgtcaccgggatggcatggccggatgccagagcaggtccgatcggcttggcggcgaacgcgcctccgaccagaccaattacgtagaagggcagggtgacgatgaacacttccagcatgaactgccatcccaaacgcccgcgagtgacgccggacaccagtgccatgccgatctcgtcgtcacgcttgggcgcccacacgcctgacagcacgaggatgagcaacagcacgccgcccacggcaaccaacgcaatggtgccggtcttcgcgcgcgaggatagcgtatccagcggctccagagaagcgttgtaggattccagcgaaggggaagacacctcgtatcccttggcgggcagcttggacttcttgagggtggataccaaggacttgtatgtagcgggatcaccggtgtcgaacaccacgtccagatccggcaccgcccagccggaggcggtcttgtcgttggactgtgggtcgagtccggccttggcgaaggtctgatagttggtgaagatcgcgttctcgcggttgcgggcggccgtcaccggattggcgacggcggattcggatgtgtacttgtagatgccgcgcaccttgagctcggccgtggtctgggcgtccgaggcggccgccaccttgagcgtatcgcccaccttcaggttgttggcggaggcaaacgcttcagagaccagtgcgccggtggtgttcgggttggaggacttgttgtcgtagctcaggtccttgccgtccacgatttcgaaggtaccgaggtcgctggccttggcggcatcctcggtccagaaggctcgccaaatgagctggccgccggtctcatcatcggaggccgagcccagcgatccgccgtccagggccttcaaatcaccgctcacgtgggccggcacggtttcggtaaccgtaaagttcaacgagttggtggccgaccggacgagcgtggcgtattcggtgtatgaggtccacgtcatgtaatgcttggtggaagccgagtccgtagcggagaccttcttccacgtagccgcagtcgggcgaatggccaacgtggccttctgctgatcgtacgcggtggtgtgtgcgttggtatcttcttgaatgatggccagtccggcgactgtgccgaaggtgaccgccaaggtgatgaacgcggtcagggccgtacgtcctttagaacgtgtcagggcccgccaggcgttgctgaggacgaacatctaattgcctctcccgttctcctaagccgaacaaatcaatacggctttaactattgttgcgtttagtgaccgttttcttgcgcaatactgttatactcctcaatgaagtctgagaacattctgacagcgatgtggtggtcatgaggggatttgcacccggtatgggataaaccctcggtctatttcggtggcatcggtacactggcatgagatatgcgtggcgtcacgtgtgctccggcatgtctgcgattccggattcgcccggagtccggcatccggaagcgtggccttgcgccgttggataagagtatgagctgagcagattttcgggtaggataagtatgcgattcacttcagggcattcgagccataaggctgtggggcgtaggagaagccgccatgccggtaacgggaaatccaatcgctccgcatctacgaatagcgttgcaaatcagcagacgggtcccgtaaacctgaagactccccagcacgtgggtggcgacggccgttcgctgatcagccgtacaccgatatgggtgcgagtggtggttgtactgctgctgacgttgctggccagcgtcacctgtgtgggcacgctctacgcggcatccgtctcgagaatggccacggatgcgcagcgtgtgctgacatccgccgaaagtctggccaattcggcacttggctgcggcagcgataagagtctgtcggacatctcccaagagttggtcaatgccaccagtgatctcaacgaggagctgaacggcccgcagtgggacttcttccgcgaccattcgcgatttggcagcgacatcaccgctgctcgcgaaatgctggcttccgtggatacgctggtcaacggtccgttcactgatctgctgaacctgtccaaacgattgcagggcttctccctgaagaatggctcggtggacgtcagcgccctgatggatatgccggatatcgtcaagcaggtgcataaggatatctcgcagcagctcaccaagctcaacaaggtgccgactccgagcgtcgccaaggtggccaccgtgctcgaatccgaaaaggctgcgctcaagaccgtggattcgatgctcagcgaatacgatggcctcattaacttgctaccgcaactgcttggcgaggacggcaagcgcacgtatctggtgatggtgcagaacccggccgagctgcgttcggcgggcggcatggtgggcaccatcgccgcaatcacggcagataagggcacgattaccatcggtgatttcgccaccacttctggttgggacattcctgagaagccaatggatgctacggtgctgaaggagcgccaggtatttggcgacacttttgaccagtacccggccaccacgaccatcgaccccgaattccagcgtgtggcacagatgaacaaatacatgtggctgtatcagaaaggcaacgaagacgagaacgtagcgggtgtattgtcattcgatcccgtattcctccaggcattgctgggagccacaggcaaggtcaagctttcggacggccgagtgctggatggcaccaccacggtgccgttcttcgcttcagacctgtacacggattacccggacttcgagcagcagaacaacttcgtttccgaagcggctcaagcaattatgaaccatgtgcttggcaacgcgaatgcttccaccgcatccccgctgttgaaggcaatcagagataccagcgctagcggtcatttcaagctatggatggctgatccggatgagcaggaggcgctgattgccaccggacttatcgacgataaggccagtggcgagttgtctgctgacagtcaggtacctgaaaccggcatctatctttcggagctgcagcaaggcaagcaggattggtatctgaagacctccaccacggtcacaaaaacctgcggcgacgcctcggccagccggaacgccctgtattctggcgtgctggataagcgcatcacgacagctgtgcgtaacacgcagctgggtcagtttacggaagatcagctcggtgacgaatacacggtcaccttcaccatgaagaacacgctgactaaggctaaggccgaatcgttgcctgatttcgttaatggcggctcggagaatccagtgctcggtggcatgctgtaccgcgtggtgcttaccgccccgtacggtggcgaaatcaccgctgtgcaggctgatatagattcatggggtaccaacaccgcgagcctgtatgaccgtcagtacattatgttcaaccagcagtggatcgagcccggaaaagaattgacgattgcctataccgttcgggtcagcagcgatgccacacatccactgaacgtggtaaccacgccggtggtgaatgcggatggcgtcgagacgggctccaacggtaaggtgacggatgagtgcccggccgatacgaacggcgccgatggtgcgaacggcgccgatggtgcgaacggcggcaagaacgacgcgcataagggcgcgtcctccgatccctcggccggcctggacaccttggacaagctgaagagccagatcagctgcccggtcgatctgaagtccctgacgggatccatgtgatgaccatgcccgattccgtttccggcgtcgccgtttccgacgccaccgtttccggcgtcgccggcaggccgcgcgacgtgaactacgatctgctgcgcgtggtggcgatgtgcctggtcatcggcgtccacgtgatcaacaactacatgcccgtcaagatggccctcgccggcagcgcggaaacggtgcgatccgtgctgttcgcgttgttcatggtctgcaatccgctgttcattatggtgtcgggccggttcaacctgacattcgatgccgaccggccggtgagcacccactcagcgggccgtctgccgggctctggctctgatgcccgggcaggcggcggtgccggccaagccgatcccagcagcctcgcgccgtacgtgcgctactactacaaacgtttcgtctcgctgattgtgccgtatctgctgtatgcgggcggcatggggttcgtcgcctacctggtgattgatcatcgttcggttggcggcgctgtgtctggaacgttgtttgatctgttttccgggtatggcgattccgtctattggttcgtgttcatgcttgccggtttcgtgctggcgacgccgtttctggccgcgatgatgcgcgcgataggccggtcgggtgcctggctgctgatcggtctggccgccgccgtggccgccgccgagcagatctgcaatcttgccggatacccgttgacgttcctgcagtcgttcccctggcggggactgctggtctactatctgttgggattcgtgttggaatactatccgccgtccgcgcgtatacggcacggtgtgtatgcgttggcaccattcgtcctggcctggaccgtcgccacgccgtacctgttcgccggccagcagatgcaggttggccgcacggtcacggttgcgtttgcgatggtggtaatggcgacgttcctgttcttccggtacgacgtgcacatcacgtcggcgcgggtgcgtaaggcgattatctggctggccggatattcctacacgatttacttggtgcactcaccgctgtccaaggtgctgatcggcccgcggattcccgcgcccacggacggatggtcgtatgcgggtatcagcgtgttgatgtttggcgctacgttgctggcggcgctgctatttgcggtgattgccgataccgtggtgctcaagcccgtgcagcgtctactgcggaaggtacggctgtagatttggatacggcgctatgccacggtatcaaagccaggaatcccagcagcagaagcggggtgaacgtgaatttcgacatgcccatcagcacgcctacggtcatgagcgcggtcaatcgtccgttgccggcacgcggatcggccatgcaggaaaacagcagacacgcgaacaataggcacagcgcctgtgccatggaatcggccgagatggcgaacgaatagcggaagatcaacggcggtgagaccaagagtagggccgtaggcaagcgccagcgggggagtgcggctacggcggcgaacatacaaccggcgtacaccagcaacatgattacttccgcgagtacgtatgtggtgccaggggtgagcgttgagtctgctcctatggcaaaggcggccaattgcggcagataggcgaagggtgaattaaccgctgcattgttgtagggcgtgtccacgcaggtggtgtttgcggtgctggtgctgttcgtgccgctgcccgctgcagtgctgcccgtgccgtaccgttcaagaaaatcggcattgacggcagccggatcgtaaccgtcgtaatggtcgatggagaaccggatccaatcacggctcacgcacccgcccacattgccgctgcccgaatgcaggatgctggtcgagtcgaccggccgagccagcacatccccgttaacgatgccgtcaatgcgatatgtgtgcgcccatacgtctggaatatgcccggcaggcgtcaccgcaatcagcacgaaacccatcagcagaatcaccgcttccacgcagcgttcgccgccactcgtgagaacacagtcaaaggagcagaaacagcatcagaggcatcggaagcatcagacatatgtcccactatatgtgaggtgttggtggtagtagtgatgcataaaagaaatcggcctttcgctgtttggtgtgggtgaagcgggttaggcggtgacgacggtagggtagttttggtggcatggataccacaatgctgttctttctgcttttctattgtttttcacagtctgagctagacgctaaaagatggggacacaacaaccgtaggttgcgctccccatcacgtttctatatggcgcttagtcagtgtcttttgttgtatgcgaatctgttggtgccaatgaggaaggtcttgcggtcgttcttggccatgacgtcgaggatgatgccggcgatgatgagcagcagccccgtgatgaccagcatcaccgcgccgatcagcgtggggaagtgcgtggccacgccggccttggcgaattcgaaggtgacggtgccgcacagcacaatgccgacgatgccgatgattaggcccaatccgccgaagaaggggaggggcttgtattcgcggaccatgcggaagatggtgctcatgaccttgatgccgtcacctacggtgtccagcttggacactgagccttcgtgggcggtcacggtactggatcggcatctcgtagagtcgcaggttgttgttcagcgagtggatggtcatttccatctcgacctcgaagccgcgcgacagcacggggtaggttttgacgaacgtgaagctgaacgtgcggtatccggtcatgatgtcggtgacgtgcgcgcggaacaggtggttgatggagccgcgcacgaggcggttgccgaagttgtggaacgggcgcttgttctcctggaagtatgtggaggagaggcggtcgccgatgaccatatcgtagccttcgagcaccttggcgaccatgtcgggcgcggcggcgatttcggccgtgcggtcggtggagttgttgtcgtacacgtagatggccgcgtcgggcagcgccgcacggaagtcgcgcaccaccttgccaatggtcacctcttcgttatagcaaggcaggagaacggcgacggtctcatttctgcctcaagcagggggcattgctatacgcgttgactcgtgtgatgaggacaaaatagatataatccaagcactgtaggaggggccgtccgctggccgccggcccctcctacagtgtggtttcgatgcggtaacgggggcgatgtttggattccatataaattttgccgacgtattcgccgacgatgccgagggagagcatgatgagtccgccgatgagccagatggagatcatcatggacccccagccggcgatggcgtggccgaacccgagcgagacgagcacgtacacgaacatgccaatcgctaccaggatagacagcagtccggcaccggtgacgaagctcagcggtttcgtggagaacgagctgatgccctgaatcgcgaaggcgatcatcttcttcaacgggtatttggattcgcccgcttcgcgctcgccgcgctcgtagtagactttgctggtctggtagccgagtgtgggcacgatgccacgtaggaacaggttgacttcgtggtattcgctgagcgcgtcgagcgtctcgcggctcatgagacggtaatcggcgtggtcgggtaccgtctcggcacccatccactcgaacaccttgtagaaggcttcggcggtggtgcgcttgaaccatgtgtccttcttgcgtgcggaacgcactccgtagacaacctcgtcgccgttgcagaatccgtcgatgaacccgtcgaccgcgttcacatcgtcctgcaggtcggcgtccatggagatggcggcgtcgcagccgtaggcgcgcgcggtcatgagcccggcgaggagcgcgttctgatggccgcggttgtgggagagctttacgccgccgaacaagtgtgcgtcgcgttcgtgcagattgcggatgatgctccaggtgccgtctttggaaccgtcatcgacgaacaggatgcggctttgtttgctgatccgtccggtttcggtaagatgtgcgactttggcggccagcacgtcggccgtgtgcacgagcccttccgcctcgttgtagcagggaagcacgaaatacacgaccggctggtcgcggcggtcggcgcgctcgccggaaccatcgccaccggcgctcgtgatgtccgatttctgcgtgtttgtctcgaagatcatcttcccatcctcatactcagttcgaagccgtctcatcccggtcccggcccatactcatgtgctatagatagtttacccgcgtaatgtcgtgcgtgatttcccgtgattttcttggttcggtcaatttcggtatttacatgttgatgcttgcgttcaggttcctgttgctgttcggcatgcgtgttcgtgccgcttgtcataaaccggttcttgatgtcatgagcttatcatgatgcaatcatgataagctcatcatagagtatttatcttcacgttatcatgagatttcagacgtgggtttgaagtcgattggaggcgaccgcttggatccatgtggccgcaacaaataagacaaatgagctgatcaagggggatgatgatgtggacgaatgacgatatcgccgaggtgctggaacatctacgcgtccaaggcaacgatgatgcccgtttcgaggcgaaatcctgtgctcggaccatcggcgccagcgtgtgggagagtgtgagcgcgttcgccaacaccaagggcggcgtgctgttgttgggaatcagcgaggacggggatttctcgcctgttccgggattcgacgccaaccatattgcatcgcagttcatggatggtatgggagatggcaatccgcaaggagcacggttgacgaatcctccggagtatgacgtttcccgatgcgagcagaacggctcgtcgttcctggtcatcgacatccatgaaaacggcattcagcacaaaccctgctatcttacggcgagagggccgcaaaccggtgggtaccgccgtgtggacgacaaggatttgagattgtcgccaaccgaagtgttcgaaatgacccatgccctgacgctcagttccgcggatcgtatggttgtccctgaagccgacgtctccgatctgaatgccgaggcggtggacagggtgcttgctgagcatcgtaattccaagacgctgcgcgggactgatactcgtcttgagcgcatgaccagattgaatatggtgaacaaggttggagaggtgcgtcttgcgggactgttggccgccggacagtacccgcagcagtactatcccaagctgatcattgacgtcgtcgcacatccgggtgtcgagaaatcggcggttgagggtccgcgtttcgtggatcgtgtgcaatgcgacggcaatatgccggaggcaatcgaacaggcggtggagaccatcgccaaaaacctgcgggctcccacgttcgtcgtgggggtcggagcccgtaccgatagcgagattccaaaggaggtgctgcgcgaggtcgtcgccaatgccgtggttcacagggaatatgatgcgcaattcctcggagaatccgtgaccgtggacatctaccccgatcgggtggaggtgtcgaatcctggcggattatggggtggggtcacgctggccacgatcggcagcggcgtgtcatgctgccgcaatgcgacgttgatgcagctgcttcatcagataccgtatgacgatgcgaatgatgtgaccgtggaaggcggtggctccggcatccctctggtgattcgcgagatgaaatcccacgcactgggggaacctgtgttccgcgcgactcccgatcggttcacggtcgttcttggacgctacggcgtggagcagcaggagaaccgtgactggcttgatcatgtgggcgtccccttgactcgtcatgaacgtatggcgttgctcttgttgaagaggcatggcgatatgacggttccgcagttgcatgtcgcgctgtatctggattccgacgacatcagggtgattctgcatagattggtccaagcggggttggccgatgaaatcggccctgatcggtacgcactagcggagaaggtcgatggtggggagccgaatgggggccgtaaggggcttacggcatcggaatccgcgatactgtccgtattgtcggcggatacgccacttgatgtccacgaaatcggccgtcgctcggggagaggccttcctacgacgcgtaaggcgttgagccggctcgttgagcgtggagtcgttctcgccactgcgccgccgcgcagcagaaacaggaagtatcttctcaaaagataggatgatgccgtcgccggaatgtgcggtggagttccgctgattttgtccgcttcgctccgcccgccttatccgccgcgcacattagactgagacgcggttgaaaacgttgggattacgcctattcccgcctgcctgttcccgcgtgtgagagtccggtcgaccatcggaacgcgtggcggtgtacgggtgcgcgggatgggtgcgtcaaggagttacgcatggtggaaaagaagtggctcgacggctcggattcgaagggcgcgacgggtgcggcgcgtgcgacgggcatgctgcgtgcgttgcgtgcgcgtgcggcggcgtccggtgcggggcgcggcgtgatcgcggcggtgacgtccgtcgcggcggcggcgatgttgggcacggtgtgcgtcactccggccagcgcgctcgcggatgtgaacgccgatgcggacgcgtccggcgtccggtccgcggcctccgtgacggcctccgcggccgcctcggacggaacctcatccgacgcgcgctcgcaggcgcggtccgcgacttccgcgacgcgtccggtcgcgaacggtgtgacggtcgccgatgagacggctgccgacgcgatgccggacaatccgaatgccgagctgccggataaggtgtccgccgagatctccgatgacgcgacggtggtgtccgagcaatatgcggctacgccggaaggcgagttgaaggacatcgagacgggcgagacggtcaccgatccgaagatcgtgggcacggagagcaagcagcccgatccgttggcgaagacggatggcgagtcgttcattccggtgagcgccgcggatgtgaaagagaaggtcgctgcgaacggcggtgacgtgaacgcggtctcctcgaagacgcgtgccgacaacgcgtcggtgaagctcgccgcgttgcagaacaacgagtacggtgcgcactggggcacgtacaacggcacgcaggcgttcttcgacgcgcgcaacaacctgttcgcccagcaggcgaagggcgtgatcgacgtgtccgcgtggcagaacacgattgactggcaggcggtgaagaacgcgggcgtcgagggcgcgatcatccgtctgagctacggctggggcaatggcttcgacgtgcaggcgaagcgcaacatcagcgaatgcaagcgtctcggcatcccgttcggcgtgtacgtcttctcgtatgcggaaagtgcggccgacggcgcatccgagggtgcggacgtggtggacctgctgcgccaggcaggcgtgaatccgggcgacctgagttacccggtgttctacgatctggagaactggacgtacacggggcacaagagcccaacgagtccgagcgtgtacgacggtatggtgaactcctggtacggcaaactgcaggcggccggttacaacaatctgagcgtctactcgtacacaagctacctgaacagtgcgctcaacagcggcaacatccacggcaagacccgctgggtggcgcagtacggctccaccatgcagtacaccgcgttccccacgaacgaccgcggctggcagtacacgagcagtggacagattagcggaatcacggggaacgtggatttaaacgcgttcgggtaccggactccggccacacgatatcgggaagtgctcattgacggaaagtggtattacatcgacgcgacgacgggcaagaaggtcaccggttggcagtggttgtcgtcgagcggcggcaaatgggtgtactacgatccgaccgatggacacatgctgtatggcgagcagaagattgccggcaaatggtattacctggacccgggcacgggggcgcgcgtgacggggtggacgtacctcaagggtgacgtgaacaagtggacctactatgatcaagatggtgccatgctgtatggcgagcagaagattgccggcaaatggtattacctaaacccggttagcggtgcgaggatgaccggttgggttgtattgccggacggcaggaatgtatactactccccctacatggtttatggggagcagaagattaatggtgcttggtattacctggatccggtgaccggcgctcgcaagcagggctggcagcggctgaaatccaacggcggtaagaccgtgtattacggttccgacggaaagatggcatacggagaacagacgattgacgggaaacagtattatctgaaacttggtaccggtgcacgtttcgccggatggcgacgagtcgtgactacgcgtgaccatcgtggcgataagtgggtgtactacggttcggatggcgcgatgctgcacggagaaggaaaggtgtcgggttactggtacttcttcgatgatggcacctccaagtcgaacggacgtgtgacgtacggttggaagaacctcggctccaaaatcgtgtattacagctggcctgagggcaagatgcagtatggggagcagaagattggcggtgcttggtattacctgaatccggtgaccggcgctcgtaagacaggctggcagtatctgaattccaatgggggcaagaccgtatactatggctccgatggaaagatggtgtatggcacgcagtatatcgacgggcaaaagtactacttcgacccggtgaccggagcgaagcggtaggagtgtgcaaggggttctgggccgttatctcggtttcaaaccccttgcaataagtggaattatttagattgtacttgcttaagttggctgtaaatcattttgcgattagtgaagatgatatcatgccatcctgcagctgcgtaaggtatcagcagcaagaaataggggagcacataatccgatttagtttcccagaataggtggaaagtgaatccaccaagaaatatcacaatcagagtaatttgtttagtggtcaagcccctccatctaaagataagacaataggatgcgccaatatagataatattctgtataatgtcgcaatatactatatatatggcgtgcaacctgccacgcattatctcatgctctagctttgattgtgttaggtccgcacgctctccgccggtgccgccatatgaaatccatagggactgaaatgttggctcagcccatgtagtggctacctttcgagtgaaaaaatgcgcagcatatagggggtcctgtgtgaatgcttggatgcgttgggctatagcctcctttgccattgcatctacctgattattgtcgtgaggagcttccttgtaaatgtttacaacataattgttgtaccatcctggcgcacgctcgcgagactcttgtaggcccatggcaatccaagccgttttgggggtcgggttgtccaaaggaacgttgattcgactttccataaggaagatcggtatcgccgaagccgctatatatgcgactgcccccaatatgatgaatgtgatgactagaacgcgtttatgcgcaaacaagatgacaagccatataagttcgatcccgataaggaagatgagactgttgggcttaaaccagagtgcaacgaagagacaagccgctgacaatgtgccgtacgcaagacgttttcttatgtcgtcgcttgcttgaatggcagccatctggagcaggcaggcaaggagacaaaacgcgagcgacggtatgttgccgtaaataaatgtcgcgaataaaatgagggggaggaatgccgtggacaatacaatggtcgctttggtgacggcatcattcttgaacattctctccgtgattttacatagagttttcaatgaaactataatcatcaggagattaaaaaggcgaatcggcaacatgttgttcatgccgaaaagttgccccattagagtgcagaataatatatacccggattggaatggatattgttgtaggtagtcatttgcatgcagatttcccaaatcgttgttttgtagccatattgataacgtgattgaggtgccttgatctgcgactggagatgtggttgcaattgatagccaagtcaatccgatgaaaagagctgtataggtctgtatcctatagaacgttttcaacgagggaagtctcttgaattttaaatgtttgcccgtatagtaggctgcccccgcgagaatgaagaagcctacggttcccacgatgctgtatttgagagaatttgtaggcttttcagagtaatccaaggggaaaatcatcgtatgaaatagagcggcaattcctagacaggtgacaatcagtgcggcaaggagtgtgataaatcgattgaaaatgtcttctattttaagatgcgtgttttcttgcgtcgttttattcattaatgttgctcttcacatctgtataattatcatgttgtcttataggggaacgtgttgtgtaagggctgattgggattgctgccaaatcctcgattgccgttaacctgaaccgtgttaagccaactcatggcatcgcgtttattggttgttgcgatatggtgcagcatcgcgaggcggaagaggatggggccaatgcctttttgcataggcgaacctgttggcatccactataaaggttttgcggtcgttcttggcgatcacgtcgaggatgatgccggtgacgatgagcaggaggcctacgatgacgagcatgatggcaccgatcagcgtggggaagtggacgaccatgccggtgcctacgaattcggcggtgacccatccgcacaacatgatgccgatgatgccgatgatcaggccgagggtgccgaagaacggcagcggcttgtattcgcggatcatgcggaagatggtgctcatcaccttgatgccgtcgcctaccgtgtccagcttggagacggaaccttccggcctgtcgcggtactggatgggcatctcgtagagtcgcaggttgttgttcagcgagtggatggtcatctcggtctcgacctcgaagcctcgcgaaagcacggggtaggtcttgacgaaagtgaagctgaacgcgcggtacccggtcatgatgtcggtgacgtgcgcgcggaacaggtggttgatggagccgcgcacgagacggttgccgaagttgtggaacgggcgcttgttctcctggaagtatgtggaggagaggcggtcgccgatcaccatgtcgtagccttcgagcaccttggcgaccatgtcgggcgcggcgtcggcgggataggtgtcgtcgccgtcggccatcacgtacacgtccgcgtcgatgtcttcgaacatggagcggatgacgttgcccttgccttgacgcggctctttgcgtacgatggcgccttccgctgtggcgatctcggcggtgcggtcggtggagttgttgtcgtacacgtagatggccgcgtcgggcagcgccgcatggaagtcgcgcaccaccttgccgatagttacctcttcgttatagcagggcaggagaacggcgatggatggattcttctcttcaagcatgggtaccactatatccttcatgctggagtatcttgcagattgctacgccgagaaaaggggtgcgctacaacgttatcagtggcccgcatcgcatatgtggagagtggaattctccgtatccattggagattgtgggtagagaatggatacgaagaacccccgacgtcgtgaactaaagctcgggtatcgtctagtcacaattccttaagcgtaagtaagggaatggtggcaatcagcggtagcgtgaagaaaagcggcactacatagcgcacgcacatcactggcgccaaagccaatgtcgcccaatacaggagcgggaaagcccaagcgatgagcaggaccttattccctttgcgcttgatcagaagaatcacggaaagcagtaatgccaaaaacggcagagccggggatacccaaaccgtcaacaacgggtgtccgcggaacatgttccaggttccggcatagagccatgcaagatatcccggcaatttggtggtctcattgtagtcggacacctgattcgttgatccgccggcatcaatggttttgccgaattcattccacggagacaatccggtccaacggttcactgccgagctcgtagggtataggtacccgatttcaccccaaaggaaagcacggacgtaatcggacatgtgacctttcatcacagagaagtacatcctgacgtatcccaagggatccgagttgaaagcctcatccaacaatgccgctttagcggggtcggaaatcggagccaaatagccggaccccgtttccgtatcgtagaacatgccaataggggtaggatcccaaggcttgtctgtggtgcgtccagcctcgagggcatccaagtcataataggcgccgatgccctgtatctgctcgttcgtcaacgtgtcatagtcgtacatataggtacgtgcaatttgctgagaaggcacggacagcatctctcgtgcggaatccgcgcgcgtggttgcggtattcgcgaccacaccggagaaggcggccgataagatgaaaaccattgcgatagagatcaacgcggtcagtcgtcggcgccactgcctcaagaatggcagagcaatgagcatcacgatgatggccacatatacaccctgcttacgcataaggcacatgccgagtacggagagtacccacttcgtggcaaatggcactgaagctagtgcttccggagtgcggagcatctcaatcagtaacgtcaccgtaaggatgaagaagacagcgaatagggaatccttggcagtggtcaccgcatatgtctgaatcacgggattgaacaccgtgattccattcgcgagcaggaccagccatataggagcgccccattcgataattttattggccgcatacgccatcgcgaaagcaagggccaacgcctgcaacaggcagaatagtgatactcccgcgttgtatgagccgaacaacagattgccaagctgcataagaccgacaagcaacaatgtatgcgctgccggccaatgcagatcgacaacgccatcattcagaagatacgttgcctgaatcgggccgtcgctcgaatagttgccgggatagaatgcaagaaatgcgggtatccacaagacgaagatagtgatgccgaacagcgcaacgcgtttgtatgcggtgagattcgtcaaccacaatgagaatcttgacggaggtacctcgatgcctttatggccgtcttgataccaattccacagaaccagtatcgcggcaattgctatggctgcggcgcagccatagcaaaagccgcgaatccaaagccaactgtctttgaaggacatcagtcctaaagacccataaaaggacctgcctacggaaaacaccataccgagggcaaaaccaataatggctgacgctacgacatcgatgctcgtgagtgaagccttggcctgagaaagaatctgattgcttgttttcagaatcaacggttctccctcttatactcacggttaagcgtctgatagataatgccgaattgcagattcggattctcaaacggcgctttcacagtgaaggcttccggccaacggctcatgaactcgccgcgctccttcttgaagcggatggccttctcgccggaggcatccgatccgcgggacacggactcgtaatggtggagttcggccgtgggcacgaacaccacgcgcaactgttcacgaatcaccttcaggcagaagtcgacatcgttgtagttcaccgcaagctcctcggtcatgccatgaaccttgtcgaaggcctccttgctgaccataaggcatgcgccagtgaccgctcccagatcacgagccagcatggtggcttcgaaattgccgggatagttgcgggacatctggtagtacaggtggccggggccgtccgggccgaagctgatgccggcatgctggatggtgttgtccgggaacaacagcttggcgccggtgattcccacatcctcacgcatgcaaggtccaagcagctcctcaatccagttcggagtgatgacctcggtatcgttgttgagcagcaggtagtagtcgcctcgtgcctgctcggctccgaagttgatgatgcgggagaagttgaaggacgtcataccttccaacttcacaaccctcacatgcgggtcatcctgttgtgccatctcatagtattcgaaggtgaacgggtccacgctgttgttctccacgattacgatctcgtagttgtcgtaggtcgtgaatttacgaatcgaggacaggcagttgtgcagaaccggcacagcatccttgttcgggatgatgatggacaccaacgggtggtcggcgaggctgtaatcgaccttgaaacgacgcggcataagtggtgaatcaacgaccttgcccttgatgccgcatcgctccaaatgcgtttcgacagaaagacggctgctgtcgagcgtatagtccttctggtcggcacgagcggcagtcgactggctgtggacgcgccaatgataaagcacgcgaggctcatgatgcacgtaccgcgactgctcgccgatacggaacgtcatatgccaatcctgcgagccgtcatactccttgtccggcaattcgagcttgtccatgatggacttgcgtacggtaaggaaatggcacacgtagttcatgcccaacagcagatcgggattccactcggtcttgaagaacggctctcgatacttgccgttgtccagcttgtcctcatcgcaatacagcatgtccgtgtcgggatgctcgttgatggctcgcgtgtagcagaacagcgcatccggctccagtacgtcatcatgatccaggaagcacagaaaatcacccgaagcgattttgattccctcattggtgttcagtgtgatgccctggttcttctccaaagtcacatgctgaatacgatggtccttcgcgcacagtttgtccacggcctgattgaggtcggcgacttccggagaagcgttcaccagaagcagctcccaattccggtaggtctgcttcatgacggagtcggccatggcatgcaggaactgaatcggcgtcttatacaacggcacgatgatggaatacttcggctggacatcgaaaaccgtgcgctgctgaatctccagctcgttagccgaagcgcgctggcgggtacggaaccacttatcgtaatcgccagcggcacaggccggctccgtctgtgtggcccactggtggtgcatcaagtgcgtttgcagcggcaaagagcacaggaacgaatcctgacggtcgctgtccgggaacttcacccagacgatgaacgtatcgacttgggggatatgcagcgaataggagatcttacgcacgcgcaatccgggaagagccggatcggtgtcgagctcttcgcccatgcaaatccaatcgcccatggaaatctggttgccttggccgtcgagcgcgatgatatccacataatccttcgcgctttcgtcgcctaccagcggaacggagacatggccgtggatgatgtctgtggcatcgaggttattgataagcgcatccacaacgacatgtgaatcacccaatagcatcgctttatcgcaattgtgaatcgtcgaagcctccgcgttatgcgacagcctattggcataggacatcagctgcgcggctcgcctgttgaacgttttggaaccctgcgcgcgcgtgcgtccatccgagtctaccgcgctcacggacaccgtctgagattgcgcgacgatgggaaacaccgcgaccgggtcgctggcggcctgtacgaccttcgcaggaacctgcttgccgtcggacgtggtcgagctgatgcggaactgccaatcgtcggagagatgttccgcatgaatcgcggaatagattttgcccggtccacgcaccgtcgcgccaaaattcagcgtttcgatttcgccggtggtgccggttgcagtggcaggccgctgtccgtcatcggtgttgcggaagtagacgcgctgcagatcgatgccgtcatagcccttgtcatacagatacgtgaggtacatgccgcaaatgcgctctccaaggtagccggagacacggcgagccaccggagaataatgagagaagtcgcgcatcttttcgtgcgtggacagcacgtcgaacaggaacgcggagtatgcgcggaacagttcgcgacgcatcacgaacatattgcagacatataccttcgtctggttgagatacttctgcgcgctcggccagatatccgggtacttcagacggatgttatccatcacggtatcaaggtcttcgatatggtggccgaaggaatcccggtactgttcgtagacggtggttttctccaacgcttcgatcggttcgggggcgatgaaatcatgggcggtgatgaccttgcgcatggcttcctcattgaagtcgattcgctgcaacgtctcatcgtcattgcggtcgaacgtcacatcaccgaaaatgaacggctcgtgatgaatcggatattcggttttggagaagttgaagtacctgcggtagtgcaggaagccgtaataatccgcgtcggtgttctgccaagcccaatactggccggtcagctcgcagtaggagcggttcttctcggagatggaatcgccctcatcatcatgcagcagattgggcatccgggaagcggcgagagccgctcccacctgaatgggctgcagcagggcattgtcgggaatatgcgtgtccagtttatgacaggagacgaacagcttgatgtcttcagacatggatgagctactttctttcgctgacagatgctgtgtctaggatacgtcgttccctctatgtgaggaatcgaccggagcaacggccacagaggctacacgtcaccgatgtcgtccgtacgggcgcaacggtaccatagtgcccatggctgatgaagtgtttactcctcataacatcattgtgaccggtggctgtgggttcatcgggtcgaatttcgttcattacgtgtacaacaaccatccggacgtgcatgtcacggtgctggacgcgctgacgtatgcgggcaacctggagaacatcaagggcatcttgggtgaccgcgtggagttcgtgcatgggaacatctgcgacgccgagctgctcgacaagatcgtgccgggtcatgacgcgatcgtgcactacgcggcggaatcccacaacgacaactcgatcgcgaacccggagccgttcctgaagacgaatgtggagggcacgttccgcctgttggaggcggcccgcaagtacgatgtgcgctaccaccacgtgagcacggacgaggtgtacggcgacctggccctggatgatccgaacaagttcacggaggagaccccgtaccatccctcgagcccgtattcgtcgacgaaggcgagctcggacctgctggtgcgcgcctggcaccgcacgttcggcatccgcgccacgatcagcaactgcagcaacaactacggcccataccagcatgtggagaagttcatcccccgccagatcacgaacatcctcgagggattgcgcccgaagctgtacggcaacggggagaacgtgcgcgactggatccacacggacgaccactccaccggcgtgtggaccatcctgaccaagggacgcttgggtgagacgtatctgatcggcgcgaacggggagcgcaacaacatcacggtgctgcgcgacatcctgaccgtgatgggccaggatcctgactcattcgactgggtcaaggaccgtcccggccacgaccgccgctacgcgatcgacagcacgaagctgcggaccgagctcggctggaagccgacgcacacggacttccagaagggcctggaacagaccatcaagtggtacacggacaaccgcgactggtgggagcccgcgaaggccgctaccgaagccaagtacaagcagcagggccagtgagcggaatatgaaaatggccacacctcgaaggtgtggcccctatagcactaagaaagatacacatatgaatttgaaaaagcaagcggacaatgccgtgatggcgagtcgttttcttgctgacgcgcggttccaagtgtatctcgattatgcaagacggcatgtggatacagtcgatcgggaacggctggtcgatctggcggtgaggctgtaccgctggaacgtggaggcatccgccatcacaatcggttatatcggctatatcgagatattcgtcagaaacgcaatcgatcaccggctttgcgaatgggtgtccgggcagcagataacgggcatcccggactggcttgaagccggcaaaagcgatccgatcgggaggatacgggctttgatcaacagccccgagcgcgactatatcgcggaggcccggaacacggcattgcgcaagcagcggcattggcgttccgaccagacgcatccaaggcacggggatgcgatcacccgcgacgacgtgttctcccaattgacattgggcacgtgggatggcatgttgtcccgttccggcaaggaccctgaactcgcccatgtcctcatgggcgcgttccccaacatcgcggatgcatgggcgtcggaactgcgtcgtatgccgaagggaaggcttcccggcaacgacggcgacccgtttgaggacaggctgcgcaaggaactggtggaccgcctcaaatcggttcgtaccatccgcaaccgtatcggtcatgatgagaaccttctgcgggtcgagttcgcgaaactgagatacgacatgttcttcatcctcgatgccttgggccccgaatgcccgaattgggctttccccgataaaggggaggccttgaaaacgcttaatcctgcacgctgcatagcaacgtggcaaaacgattctgaagatagaaagtagggaacgtatgtcgttcgaattcgagaaggacttgaaggtcgaggagacgaacatcccgggcctgttggtgttcgacctgccggtgcatggtgacaatcgtggctggttcaaggagaactggcagcgtgcgaagatgaccgcgttgggtctgccggatttcggtccggtgcagaacaacatctcgtttaacgcgacgaagggcgtgacgcgcggcatccacgcggagccatgggacaagtacatcagcatcgcgaccggtgagatcttcggcgcgtgggtggacctgcggccgggggagagcttcggccaggtgtacacgacccgcctggacccgtctcgcgcaatctatgtgccgcgtggcgtgggcaacagctttcaggcattggccgatggcaccgtgtacacgtatctggtgaacgcgcactggtcgttagagcagaagaagacgtacacgttcgtcaacctcgccgacccggagctgaacatccactggcccatcccgctggaggagagcgaacgctccgaggcggacctgcatcatccgatgctcaaggacgccaagccgatggagccgaagcgcacgctggtgacgggctgcaacggccagttgggccgtgcggtccgcgcgtacgcggaggcgcatggtctgcgtggtttcgagtacacggacatcgacgagttcgacttctccgacccggccgcgtacgacaagtacgattggagcctgtacgggacgatcatcaacgcgggcgcctacacggccgtcgacagggccgaaaccccggagggccgtccaaccgcgtggaaggcgaacgcgcagggcccggctttgctcgccagggtcgcgaaggaccatcacatcacgctggtgcatgtgagctccgactacgtgttcgacggcaccgcggacctgcattcggaggatgaggcgttcgcgccgttgggcgtgtacgggcagacgaaggctgcgggcgacatcgcggtggcgaacgctccggagcactacatcctgcgttccagctgggtgatcggtgagggccgcaacttcgtgaagacgatgatgatgctgtcggaccgtgtcgcgaacccggacgaccagctggagcaggtgacggtggtggacgaccagtacgggcgtctcacgttcacgaaggacatggccgaggcgatcttccacctgctggactcgcatgcccagtacggcacgtacaacctgaccggttccggcgcggtgaggaactgggcgcagatcgcgtcccgcgtgttcgaactgacgaacggcaacggggagaaggtcaagccgatcagcacggccgagtacttcgcgaacgcgaagtcgccggtcagcccgcgtcccgagcattccgcgctcgacctgtccaagatcgaggccgccggctacacgcccgccgactgggaggaaaccttggaagcatacgtgagcaaggaactcggcaagtaggacagatagggcaaaccggaaaggtctgtcagcccattccgacggcctgatgtcagtgtgaaaaccgcgcagaatgacctgcgcggttttctgtttcgccactgtcttggctaagctggtgtgagctgattacgactgtgaagaaagcaggtccttatgaaaggcatcattctcgccggtggctcgggtacgaggctgtatccgttgacgacggtgacatcgaagcagctgctcccggtgtacgacaagccgatgatctactatccgctgagcgtgctcatgatggccggtatccgtgacattctcatcatctccacgccgaaggacctgccgaacttcgaacgcctgcttggcgacggcagccagtacggtgtgaaattctcctacgtggtgcagccgtcaccggacggtctggcgcaggcgttcctgctgggcgaggagttcatcgcgggcgagccgtgcgcgctcgtgctcggcgacaacatcttctacggcaatggactgggcgccacgctgcgcaaggcgaaggcgaaggcggagaacggcgagggcgcgtccgtgttcggctactacgtggacgatccggaacgttacggcgtggtcgagttcgacgcggacaagaaggccgtgtccatcgaggagaaacccaggcatccgaagtcgaactacgcggtgacgggcctgtacttctacgacgagcgcgtggtggagtttgccaagcaggtgaaaccgtccgcgcgaggcgagttggagattaccgatctgaacaagatgtacctggaggcgggcgcgctgaacgtgcgtacgctgggccgcggatacgcgtggctggacactggcacaatggactccctgtacgaggcgggcgagttcgtgcgcaccgtgcagcgcgcgcagggcctgcccatcgccgtggccgaggaaatcgcctacgagaacggctggatcacccgcgaacagttgtttgaggccgccgagaagtacggcaagagcccgtacggcaagcacctcaaagatgtggccgacgacaagatcatcgttaagccgaaagctgcctgaagccgtttgaagttttcgcacggaggaagaagtatgcccaccgtttcatttgtcgtcattgcgtataacgtcgagcgatatattgccgattgcctgcagagtctgcaaaaccagaccaatccggatttcgaggtcgttgttgtggacgatgcgagcaccgattccacgaaatcggtcatcgaatccgcgatacagaatgattcacgcttctcgttgatcgctaaagacaaaaatgagggtgcgcatcttgcccggcgtacgggcgtctcccatgccaccggtaagtacgtggtgttcgtggatggtgacgaccgtctgcaggataccgcatgcgaagtgctttcctcatatgcgtccggtcggaatttcgatattctgcgattcggtcgtaccgtggtcccccacggttcggccaatcaggatacggcgctccaggaggagcggtcgttcaatctacataccgaagacatgcatggtgaggatgtgctgaggtcggtgttctccgaagatttcggaacccgcaacacgtggagtcttatcgactgcatattcgacggcgaattcgttcgtagtggattcgccgcaacgtatgatgaaccgcttggacgcatgcaggattcatacgagttcttcgtattggcttcacgggcgaaaacaatgcggttcttcatggaataccgtggtcttcgctacaatctgggtgccggggtgtccggttccggtcttgagacgttgcagaaattcgagcatggccatacgggaatccattcctccatgaatgctgtgctgcggtatgcggccgactccggtgacgacaacatgactcgttgcgcgcaatggtacaggcatgtggtgcttggaatcgtgggacgtgaatgggtgatgaggttgacggagaccgatcagattgccggtatgcgttcgctgcgccgtgtttggggtgatgagaataccgcttacatgttgttggattctcttacggcacgtgcgcagtggttcgtcgaccatgatgcggtcccgtcggatgcggatccgtatcgtcgctggttgacgttgctgaacagtctggatttgaacggcatttccgatacggttattcagcaacgcgtgaacggtttcctcgcgttgaaagggaaactggacaagcacgagttcgaaatcaaacaggcgaaaatagccgagcaacaagagcgatatcggcagcaactccagctggaagagcaacgccgcgtgttgaaaacaggaacgcccattcgccgtgtggttgatgcggtgttcccggaaggtagcgaacgacgtaacctactgcgccgtgccgcgcatcggattcttcaccgttaaaaggaacggagatatgactgtgccatccaaaggacgtcaatggaaacgatgcggtatttactgcatctacgccaaatacggtcatgtagcgcgctacgtggattatttcctgagcaagctcgtgaaatcactggaccagctggtcatcgtcgccaacggcgaactggacgcggactctcgtaagaggcttgaacgattcgctgataggatcatcgttcgtgagaacaagggccttgatatcgccgcataccgccaagcgctgctttcaatcgggtggagcaagcttgccgcctacgatgaggtcatctgcctgaacgatacgattctgggaccggtttttccgttctcggagatgttcgaaacaatggacggcaagaacgttgatttctggggcatcaccgcatatccgcacgacgtcgccttcggcgaggagattccgacgcatctgcaatcatattggcatgcgtatcggaaatccctgatcacttccaaagcgttccagcgttattgggaaaccatgcccgtgtatgaagactacgcggaggcgacacgtaagcatgagatgacgttcaccaaacggttcgccgatcttggatttacctgggcctcatatatcgactatgacaagtaccggtcgcgttcgacgtatccgatgctgtacgacccggtttccctgattcgcgacgaccgatgcccggtgttcaagaagcgttccttcttcgttgaataccagtactatttcaaccagaccgccggtcagcccggtatggaactgttggagtatctgcgccggcataccgattacgacaccgatctgatatgggacgcggtactgccggcatacaatattgcggatatcgcaaaagccgtgcatctcaactacgtgttgccgacccgtaccgtcaatcctcgtgaggacggggatgctccggtgcgttcggcgttcatctaccacgtctatttcctcgacttgctggaccagacgctgggatatcttgccaatctgcctgaggacaccgacctgtacatcacgacgaatgagtcgaaaatcgacgacatccgcaaggcaatggataagcgtggcttcactcatacggtcgatttcatcccggtgcaaaaccgcggtcgtgacgtgtcggcgctgctcgtcggagcgaaagacgtcgttctcggtggaaaatatgatgtcgtcggtttcgcgcacgacaagaagtccgggcagaaccagcagaacgggcatcaggggaccgagaccgaaggattcgcctacaagctgctggagaacacgctcggctccaaggattatgtgcggaatatattgacgttgttcgcgaataatccgcgcttgggtatggcgactccgccgccgcctatccacgccctttatttcgcgcatacggtgccgcacgattggggcatcaacttcgacatcaccaaggatctgctggaaaacaagcttcacatccacgttcctctggatgaacgcaagcccagcgtatccgccatcggatcgtgctattggttccgtgtggaagcgttgaagcccctctacgaatatgggtggcggtacgaggacttcctgccggaaggcaagatgggtgtcgatggcaccatctcgcacgccatcgaacgggccaatggctatatcgcccaatcgcaggggtattaccctgcatgggtgatgtccgacaagtacgcacgcatcgaagtggactccctgtactacaccgcgcagggcttcatggacaccaccagtggcgtgcgacgcggcgaaagcgtgatggagagcctcggcagcctgaggtcgtcgttgacgttcgttggccggctgcgccgtacgacgcatcttgcgctcggtaaagtgttccgtgcggtgacttacccgctacccaaacctatgcagagccggttgaggaaagccgcttgggtgccgattcgcacggcatatgcggtgctgaagaaagtacgctccggtttgcatcgatagagacgagtggcaggtggattcggcggagaaagtcgggaaatcccctgtctgagtagaataaggtgtttatgaagaaagcatgggacagactccgcgaccgttaccattactcactggtggtgttcaaggagcttgtgaaaaccgatttccagttgcgctaccaaggttccttccttggagtactgtggtcggtgctgaagccgctgatgttgttcgcggtgatgtacatggtgttcgtccgattcctgaagttctccgacggtacaccgagcttcgccatctcgctgttatgcggtacctgcctgtggagcttcttcaatgaatccacatccatgggcatgtccgcgattgtgaaccgcggtgatctgcttcgcaagattcatttccccaactacatcatcgtcgcctccaccacgatgggcgccatgatttccctggccatcaacctgctggtcgtcatcgtgttcggcttcttcgccaatgcgcattacacgtggcatgtgcttctggtcccattgaatatcctgcagctatatgcgatcgcactcggcgtggctctggtgttggccacgctgtacgtgtatttccgtgatgtcgcgcatatttgggaagtcgttttgcaggcgatgttctacgccacgcctatcatctacccgattacgatgatcacccagcgtgcgcctgaactggcttgggtgaccaagctgctcatgttggttccaaccacgcagacgatcatggatatccgacataatctcatctcaccggaggacgtgccgacgatttggacgctggtggacaaccgtttgctgtgcttgttgccgtacatgctgtctgtagtgattctgtggttcggtatccacgtgttccgcaagcatagtgccaagttcgcggaggtgctctgatgactgtcgttgagaataacgtcaatactggcaacgccgccacggctgcagatgtggcggatgaacgtccggtcgtgctgaaggtcgaccatgtcgccaaatccttccgtctgccgacggaacaggccagcggcctgaagatggccttcctgaactggaccaagggcattaagggctataccgaacagaaggtgctccgcgatatcagcttcgaagtgcatcagggcgacttcttcggcatcgtcggacgtaatggttccggaaaatccaccctgctgaaaatcatctcccaaatttatgtgccggaacagggcacggtggatgtccgaggcaagctggtgccgttcatcgagcttggcgtggggttcaaccccgaactgaccggacgtgagaacgtgtatctcaacggtgcgctgctcggcttcacccgtgacgaaatcgccgccatgtatgacgatatcgtcgagttcgccgaactgggcgagttcatggaccagaagctgaagaattactccagcggtatgcaggtgcgactggcgttctccgtggccatcaaagcccagggcgacattcttgtgctcgacgaggtgcttgccgtcggtgatgaggcgttccaacgcaagtgcgacaacttcttctctgaggtcaagaaggatccgaccaagacggtcattctggtgacgcacagcatggactcggtgaagaagtactgcaataaggccattctgattaagaacggcgaaatcatcgagcgtggtgataaggacgtggtggcggaccgttacacgttggagaatttcgcaacgaagaaaaccgaaaaggaagacgatgcggataatgcgtatccgaccggtctgaatgcacgtgttccgttcctgaagatctggccggtttccaaccagctgtcggatggtgttgaaccgttccgcttcgatgtcgaatacgagttcgcggaggatgtttccttctatctggccatttctttgattgacacgaaacgaggtggcgtcgtctgcgattcgggttcggtgccgatgaagcagcgtggacggcaacgtgttggttttgagattccggtcagcgacttcaacaacagtgatttcaaactgcttgtctcgttgcgtctggacaatcccgaagaccccaacaggacggatatgatcgccttcaccaatgacgacaattcctgcttcttcgctgtccgaaacaacaggaacaagacctacgcgttgttgagcgaccgcgctctgcaattcaagatgattcagtgacgaggcgtcttttcgttcgaatcggatggtgtctgcagctcgattgaggtcggcaatatagctaagtgactattgccggcctcaattcgtatgtgctttcgttttgtggattggagccaatgatgacaattaaacataaacatatgagtgaaaccgtcgatgatatgaccaccggatggcgacggatactgattggttccggcttcttttgcctcagcgttatgatgctgtggtggtggtactgcgcgatcagggcgacgtcgccacaaatgattgacattgatgtgagtgggaataatcgttattcaacgattttgctggttgttctgcttgtattcattgtggcggtatcggtgtttgcaaaagtgagacaggccgttcgtggcatctggcatatgatggtgaggtataagtggattcttttcgtcatcgtgatttgctggcaaatcgtgatgttcttcgcattagggccggcaacgggctttgatgccgaatgggttattgactatgtcgtcaatccgcaagtcattacggacaaagggttggacggagcttcctatctttccaattcccctaacaactacctcctgttcttcgttgaactcgggatttacaaggctcttccctttgtgacaagccttgaagcgctgttgcttgtaatgcgagtgatttccgttctggtagttgacgtttgtgctatcggaatgtatgcagtggccaagcggtatcttaatgattcggtagccaatatcgttctcctgctttggtgtatcctcctcggcctgtcgggatggtgcctgcatccgtacagcgataccttttgcatgccgttcacggtgatcaactgcgctttctgcttctggctgctgtcgcagaaaaccattgataaggcttttctgtccagttggaagaatccggttcttatcttcctgtttggcctgaatctggcggtcacctataacttgaagccatcagctgtgattcctgtaatcgcattgttggttgcattgcttctgaaaatgaatcgccgacactgcgtcgcattgctggcgtcactcattctcatggccggtggcttcctgtgtgcgaatgttccctacaaccatgctgtccgcactcagcagctcgtcccctacaaccatgagctgtcgctgtccccacagcattatgtcatgatgggaatgaccggcaccggcggatatttggaatccgagtaccaattcaccatgtcgcatctcacgtatcaggagaaggtggatgcgaacaatgccgtcatcaagcagaggctgcgccaatatggcgttgtaggatactccacttttctgctgacgaagttcagaaacttcacctcggatggctcgttcggcgttcagcgatatgccggcaatgtcttcctgcctagaccatttgcgaatgagccactgaacgccgtccatgaaaatctttttatccaaaaagtatcccatctttacactggcggttccaactccaacagaacgctgattcagatagagcagattttctatattttgttggtgagtggaatcctgatgaattgtttgagaatgtctaggactttctttaaggaggaagaggtactttcgatagagaagttcggagaacatgtttcttacgatgtatggctcgccattgccatggtcggtgcaatcattttttactgatttttgaatccgggcattccaggtatctgatacagttccttccgattatgttgttcatgtcggggattgggctttcctcaatttcgtatgtgcggaaataaacgcaggaataagcgttgtcccgcctcttcggaggaagagacgggacaacgcttattcgtctgacgcgaatcacgcgattctaggtatctccacttccggactactcagaacgattcgatcagtccctgcggaacaggtcccttgtgtagaccttgcctgccacgtccttgaggtcgtcgttccaacggttggagatgatcacgtccgcttcgcgtttgaacgagtccaagtcgtgcgtgaccttgctgccgaagaaatcgggggcgtcgagcgtcggctcatagacgacgacctcgatgccgcgcgacttgatgcgcttcatcacgccttggatggcggactgacggaaattatcggaaccgctcttcatcgtcagacgatatactcccaccacaggtttggcgatgccgttcgccttggcccggtcgacgagctcctcgatttcgtaggcgatgaagtccttacgtgtgcggttcgactccacaatcgcctcgatgaggttctgcggcaccttatcgtaattggcgagcagctgcttcgtgtccttcgggaggcagtagccgccatagccgaagcttgggttgttgtaatcgtcgcggatacgcggatccatgcacacgcccttgatgatttcgtgcgtgttgagaccgcggctttccgcatacgtgtccaactcgttgaaataggcgacgcgcaacgcgagataggtattggcgaacagcttgatcgcctccgcctcagtggtaccgaccaccagctgggggatgcccctcgacccatccgggttgacgcggtccttctcctccggggcggcaccgtgggcgagcaggtccacgaacgtgtgcgccgcctgcacggcctccgcatcatcctgcggcgcgccgaccacgatgcggctcggatgcagattgtcgtacagggcgtggccctcacgcaggaattccggagagaacaggatacggtcatcgtggaaccgttcgcgaatctgctgggtgtaaccaaccggaatcgtcgacttgatgacgatccatgcggtttggtcgtacttgcggattgcctcgatcgccgcctccacgctggacgtgtcgaagtagttcttctgggcgtcgtaattcgtcggcgtggctatcactgcgtaatccgctcccgtatacgcctgttccgggtcgagcgtcgcctggaagtccaacggccgctcgccggaccggtccgcatcgaggaatgcggtgatcttgctatccacgatggggctcttgccgttgttgagcagctcgaccttctcaggcacgatgtccaacgcgtgcacctcattatgttgcgacagcagcaacgccaccgacaatccgacgtaaccagtaccggcaaccgcaatcttcacgggacactccttctacgatgcgctacacgtaattctagccgtggtcggagcgcaacagtaaagatgctacgtgattctatcgtgaactgaactacgtgacgatgccttcttacctatgctgtgtgttcggtacattgaagaaatcggtattggcgagataacctttgccggcagtcatgtcgtattggatgagccgatactctttgagcagggttttctgctgtttggagaggtccttgcgtttcacaacatcgccgttcttgtccagatatgtggtggatgtatcgttcgtgaaaccgccctcgccgagcacgagtcgttccacggcaggcagcttggtgcgtacggtggacaggaacgcgagataaggagacactttcgcgttcatgtgctcactggccatttccatgaaatagttcggtgatgtgtagttcgtgccggctttcgatgggctgagcttcataccggagccggccccattggatagagaatggtcattgccggtgttaggtgtcagttttggtatgttcatcgccttctcccgtatgcggttccgctcgagactggtcaattccgtggcatcttggactctgggggtgtatcttattacggatcatccgttcgtccgcgaattgctttggactcagtggtttgccttcgataagtactaccagacgagattgccgattgtatggatgctggcgatttctgccttcgttttcgtcgtcgcgctcatgctcgaggtaattcgcaaatcgttgtttgcgattatcttcaatcgggaaggtgtttttgaacgtatgtggggcattgcggtacatacgattggttccgtttccaatatcagataggaacagtgtcaatcacaacaacggaggtagcgtgcccagctcatgctgagatggatcgaatgatggagtgaatccctacttgcttacttcatgttcttgaccttgcggtcgtagacgtatttctccagcaggcggatgcggcgggtaatagtgcagcggaaacgctgctggcgggaaaggttggcgagcagctgatcgagttccgccttatcggccttgtgctgggcctgattctcgggcaggttgaagtcgggggacgtggcctcttccgtgcaggctcccaccatcgtgtagtagctgcgcatcggcagcacgccgtgattcaggcagaagcggaagttgtgcgcgccagcggcgaaattgtcatggtagaaaccgaagctgcgttcctgatgtgtgactgatccggcggactgcagccagttgtacaggttcacgttgaggtcggcgactttgttcatgcgggcgtacagttcgccggcgaccatcacgtcctgcgcgtacatgccctccgggaatcgcacgccgtcccacagttcgcgcttgtacaggcggcaccagttcgcctcgttgaaatagcgggcctccgtgttgcgcccgagcttgtctccgatcaggcgcaggctcttgcagaacacggtctggtaggcacgcagcggattcgtggacacgctcacatgttcgggttcggcggcgccttcactggcttccatcgcgacttcctcgatctgggagacgccgaactgcctccagcgggccttgctcatatccgcgccggtagaaatcagcgcgtgcagcagcaactcgatgttgcgacggtcgaggatatcgtcgttgtcggcgaatgcgatgtactcgccatgcgccgcatccaatccggcgttctgagccttcgcgatgccgccgttcgtctggtggatgacgcgcacgcgattgtctcgccgctggtattcgtccagaatcatcgggctggaatcggtggcgccgtcgtccacgaggatgatctccagatgctcatacgactgctgaagaatcgagtccacgcagtaacgtaggtatttctcggcgttgtacaccggcacgacgatcgagacaagcggcgaaacctgcgtcatggcgaatccttcttcacgtgtctgcgccctgcggtcgtagccggcaggccgccctgtttatgcggacatgaacagtatgccacagggtaggcgcacgtcgcgcgtgcaccaagtaaagccgaaaacccagcctgcacaagccggaagcctataggagccgctgaattcggaatcgcatatgtacataggtgcttctcgctatactggtggacaatgaaacgcgtgtggaattgcacatggaatcatgaaaggttttgagtcatggcaaatgcggcggagaatacgcagcacggcccgtcggagggcgcgcagtaccccgatctcgtcattgtcggcgcgggcctgtttggcctgacggtggcgcagcaggcggtggagcatgcgggtgcccgtgtgcatatcatcgacatccgcgaccacatcggcggcaacgcctactcgtatatggatgaggagaccggcgcggagatccacaagtatggcgcgcacctgttccacacgtccaacaggcgggtgtgggattacgtgaatcgtttcacctcgttcaccgactacgtgcatcgcgtgtatgccacgcatgacggcgaggtctatccgctgccgatcaacctgggcaccatcaatcagttcttccacgcgcgttacacgccggccgaggcacagaagcttatcgccgagcaggcgggcgagctggccggcaccgatccgcagaacctcaacgacaagggcatccagctcatcggccgtcccctgtacgaggcgttcatcaagaactacacgggcaagcagtggcagaccgatcctgccgagctgcccgcgtcgatcgtcaagcgtctgccggtgcgcttcaactacgacaaccgctatttcaaggacacgtgggagggtctgcccgcggacggctacaccaagtggatggaacgcatgatcgacgatccgcgcatcacggtttcgctgggcgtggacttcttcgacgaatcccagccgtacaacaagaaggccctgcgggccgcgggcgtgccggtggtctacacgggtccggtcgaccgttacttcggttacgagcttggcgacctgaagtggcgcacggtggacttcaaggaggtccgttacgatgagggcgaccatttcggttgcccggtgatgaacttctcggacgcggacgtgccgtacacgcgcgcgatcgagttcaagaacttcaacccggagcgccgcgatgcccagaacccggacaagaccgtggtgtgggaggagtacagccgtttcgccgagcgcggcgacgaaccgtactacccggtgaacacggacgcggacaaggccctgtacgcgcggtacgaggccaaggccgcggccgagccaaacaccgtgttcggcggccgcttgggcacctacaagtactatgacatgcaccaggtgatcgacaccgccctgaccgcctacgaggaacaggtcgcgccgctgctgaagaagtagaccgtcgtttcaccagaggattaacgatttagcttgaaaccgactgaatattgctgaggcaatagccggtttcaggcttctgtgttttttgggaagccaaatttcctggggtacttaaggctcgccacgaggagtacagttgtctgtaacgcacaatgtggcgcgtaagacgaggggcgtatctcgcaagtggggtgcgatgcagttgaaggagtgcatgtcatgactgatccgaatgccaatccgaacggccaggtgccggggcagcgagctgacgccaatccgactgagccgttaaatgcgatgacgggggaagcaggaaccgccgccaacaatgctccaacccaagcactcgcagcgggcgaacagcccactcaggcgttcactcctgttgagcagcctacgcaggcgtttacacctgccgagcagtccacccagcctcttgcgccggtcaatcagccggtaccgcctacgcaggctttgccaccagtgactcctgccgctgcgcccgcgcccgcaccgacagcgcccgcgcctgcgcccgcaccagcagcacccaattcgccctatccggggacggctccggcaggcggatcggttcctccggtctacggcagcgtcagtgctcggtatccgggcggcggggccgtgcctccgcaaacgccctataacccgtatatgcaaggcggccaaccgaacggccagccgggatggtctggttcttacggcagtgtgccgcctgaagcgaaccagaagtacaacggcctggctattgccggttttatctgctcgttccttgtctcactccccggtctgatcctgagcatcgtgggcctcaaccagattaagaaacagggcggcaagggcaagggcttggccatcgccggcatcatcatcagtgcggcgggcatggtgatacaggtaatactggtcatcgcgctgatcgtcggcggtgtctcgtacaccagcaaggctatagatgaggcgaaaaccgattccttctatagtcagtcctcttcgggcaacggtgatagcagcgataagagcaaagctcaagataatcttgacgatgcgctggacgacacgttggacgaaacccatgacgatctaaccgacggcgattatgggctgtacgattcgattcaggatttcgtcgactattcggaattcaaggactccattgaatccgaagcggatacgtttgcagataccggcatcaccttcaactaccgtgtcgacggtgacaccttggtgtacgagtacgtgctcgacgacagctacgcctcgctaggcgataccgtcgcttcctcactggatgctatggacagcacctatcaatccaccgcgaatctgctgggctcgatgtgcaagacctccagcggcaaggcatcattgcgcgtcatcatgcacacgcaaagcggccagtcgctgtacgacaaaacctggaccgaaaagtagcaatcccagcgaacgtgcgttttggtcgattgaaggccggtctgcttgctccttggacggatgcttctgcggaaggaactgccaaggagtaggcttacaggcatgagactcgcacgtttttctttgaatgattcgccgcgctacgccttcgtgcagaaggacgaaacggacggcaaggactacctcatcgaacttgacggtcatccgctggccggcgaccaggtcaagcccaccggcactcgttacccggtcgacggcgacggcatccgcctgctctccccggtcatcccctccaaggtttacggtctggccaagaactacgaggcccacgcccagttcatgcacgaggccggccactccgaaatcgcccacgcgccggaagacatggtgatcttcaccaagccgtccacctcggtgattggccccgacgatccgatcgtgtacccggcctgctccaaggacatgaacttcgagccggaagtggccgtggtgatgggccgtatcgccaagaacgtgtccgttgaaaacgcgatggattacgtgctcggcttcacctgcgtgaacgacgtgacgttgcgcgacctgcagggcatcgaccccacgtggacgcgcgccaagggcttcgatacttcctgcccgcttggcccgtggattgtgatgcgtgacgacctcgactggaaggacgccaagatttccttcacgctgaacggcgaggatgtgccgatggcgtctggcaccaccgcgaacctgattcacggcatccccgagcagattgccgcgatttcgtcgttctccacgctgctgcctggtgacgtcatcatgaccggcaccccgaacgcctccggccacctcgacccaggcgacgagaccatcgtgcacgtcgagggcatcggcgatctgcgcaacgtaatcgttcgggcgtgactcgttctggatcccctctctgaggggagccgtccaggcggagaagctgactgaggggaaccaagaacgcgccttacgctcccggcagaagtgcgtgcagggcggtcatcaccaccaagctgatgatggccgtcactgtcagcgagaagccggcgagcttggcgttgccggttagcgaatcggtgaacttggttgagaagatcgtgataggggcgaacgagcccaacacgatgatctcgcgaatcctcatgtcgaatggcagtaggaaccaggcggccacggcgataatcgcgccgaataccatgcgccagacaatcaccttgcccaactccaccttgtccttgcgattgttcggaatctccatcatcagtccgatcatggccatcgcgcagaaggcgttcgcattggcgaacggggtgatgagcgtaacgatgggctgtgggatcgtgatgtgcaggaacatgaacaccagcatcagcatgtagatgtcgaaggaaatcgagcttaggaagtccctggcaatattgcgcagacgcaggatgagcggtagcgacttgaaattgtcatccatatgcagcagcgtgcgtgtgatggtcagtgacccggccgtggccacggtggcgttgccgatatcgagcatgatgatcggcagaccggcggacgggcccatgaacgtctgaaccacaggcaggcagaacgcgcccaggttcaggcccgaggcgttgagcatctggaaggcgcggtagttcttctcgtcgccgcgagaaccgaaatacacgatgaacagcggaatcgcgcaggcgaagaagccgaacaacacgatccacagcatgcgcatgtcgtgcttgttcgtggcgaacgacaggataatcgcacaaggaagcgtcagattgaataccagaccctgcacgattttgtaatcacgctcgccgaaaatgtggacatgtttgagtatgtagacaccgatgataacgagcagcagcgaaccggcctgaaaaatcatgttcttctcttatcccacaagcacccgccgcagcaccggcggcggtcaggcgcataacaaaccagccgtgagtataggagcgttcgcgcggcgctggcgcggggcggtgcatattgtggacagtcccgtaacgttgatatgccatgctggcgagatgaatatatccaataccaagtggagctcggcacgatagagaggtaggaaaacatggcagagcagacggtcaccgtaggcgttggggcattgagcatcgaggacgttatcgccgtagcgcgcggcggtgccaaagtggcgatttcggacgaatcgaagcatgagatggcgctaagtcgcgcggttatcgatcatttggccgacgacaccgtgccgcattacggtatctccaccggattcggcgcgctcgcctccacttccatccccaaggaacagcgcgcgcagctgcagaaaagtctgatccgctcgcatgccgccggtgccggaccggaagtggagcgtgaggtggtgcgcggcctgctggtgctgcgcctgagcaccctgtgcaccggacgcaccggtgtgcgcccagaaaccgcgcaggtctacgccgatatgctgaacgccggcatcaccccggtggtctacgaatacggttcgctcggatgctccggtgatttggcgccgctcgccgcctgcgctttggtggcgatgggcgaaggcgaggcccgcaacgctgacggccgcaagatcggcggcggcgaagcgctgcgtgcggccggcatcacgcccgtcgatttgaaagagaaggaaggcttggcgctggtcaacggcaccgacggcatgctcggcatgttgtgtatggccatcaccgatctgcgcctgctactcaagacggcggacatcgccgccgcgatgagcgtggaaggcatgctcggcaacgaccgcgtgttcgccgccgacttgcaggcgctgcgtccgcatcgcggccaaggcgattccgccgcgaacatcgtccgcatgctcaagggctccggtctgatcgaggccggccgcccgggctccaccgtgcgtgtgcaggacgcctactcgctgcgctgcaccccgcaggtgcacggcgccgcccgcgacaccgtggaatacgcggcctccgtggcgggtgtggaactcgcctccgccatcgacaacccgtgcgtcacgctggacggccgtgtggagtccaacggcaacttccatggcgcgccgctggcctatgtgctcgatttcctggcgattccgactgccgacgtagcctctatctccgagcgtcgtactgaccgcttccttgacgtggcgcgcaaccgcggcctgccggcgttcctggctggtgacccgggcgtggactccggtttcatgatcgcccagtacaccgccgccggcatcgtctccgaaatgaagcgcaacgccgtgcccgcctcggtcgattcgattccgagctccgccatgcaggaagatcacgtgtcgatgggctgggccgccgcccgcaagctgcgccggtcgattccggcctttgcgcgcgtgctggccgtggaactgctgtgctcctgccgctccttcgacttccgcaagccgtaccgtccgggtgcggcgggcgccgccgtataccgcgtggtgcgccagtacgccaacgaaatcggccccgacgtacgcgatacctggaccaccccgcaaatcgaaggcgtagccaacgccatcctctccggcgaaatcctatccgccgccgaagctgccgtcggcctcctgaaatagatgtgagctccctcatcagagggggctactgttcaccctccccaccaaaatccaaaacttgagtcacttgcactcaagttttgggaatagaatgggttccaggtcggttgaccatatcagacaacgacaagttgcggtctgcggtggcgcttgcggggctttcgaagcccgcgagccgctccgcgcgggccgcatgatatggaggaatacgatatggaacagaagttcaccaccatggcccaggaggccgtcggcgacgcgattcagagtgcgtccgccgcaggaaacgcgcaggttgagaccctgcacgtcatggatgcgttgctgcgtcaggaaaacggcgtggtgcgctccctcatcgaggccgcgggcggaaacccacaggccatcggcgccgccgtgcgtaacgctttggtcgcactgccgagcgcatccggctccagcacttcgcagccgcaagccagccgccagctgaccgccgccatcgcccaggctgagaaggaaatgcagcagatgggcgacgaatacgtctccaccgagcacctgcttatcggcatcgcggccagcaagccgaaccagtcggccgaaatcctggagaagaacggcgtcaccgcagcctccctgcgcaaggccgtacccggcgtgcgtggcggcgcgaaggtcaccagcccggacgcggaaggctcgtacaaggccctggagaagtactccaccgacctgacggccgccgccaaggaaggcaagctcgatccggtgatcggccgtgatcaggaaatccgccgcgtgattcagatcctctcccgtcgtaccaagaacaacccggtgctgatcggcgagcccggcgtcggcaagactgccgtcgtggaaggcctggcccagcgtatcgtggcgggcgacgtgcccaccaccctgcaaggcaagaagctcatctcccttgacctaggctccatggtggccggctcgaagtaccgtggcgagttcgaggagcgcctgaagagcgtcctcaacgaaatcaagaacgcggacggccagatcatcaccttcatcgacgagattcacaccatcgtcggcgcgggtgcggccgaaggctcgatggacgccggcaatatgctgaagcctatgctggcccgtggcgagctgcgcctgatcggcgcgaccacgctggacgagtaccgcgagaacatcgaaaaggatccggcattggaacgccgtttccaacaggtgttcgtgggcgagccgagcgtggaagacaccatcgccatcctgcgtggcctgaagcagcgttacgaggcgcaccacaaggtgacaatcggcgatgacgcgctggttgccgccgcgaccctctcgaaccgttatattccgggccgtcagctgccggacaaggccatcgacctggtcgatgaggcggctgcccacctgcgtatggagctcgactcctcgcctgaggagatcgatgaactgcagcgcaaggtgacccgtcttgaaatggaggaaatgcagctcaagaaggctgaggatcctgcatccaaggagcgtctgggcaagctgcaagccgaactcgcggacacccgtgagaagctcagcggcctcaaggcgcgttgggatgcggagcaggccggccacaacaaggtcggtgacctgcgtgccaagctcgatgacctgcgtgtgcaggcggacaagttcacccgtgagggaaatctggctgaggcctcgaagattctgtacggagagattccggctattcagaaggaactcgccgccgcggaaagcgcggatgccgaatctgccgatgccggcgcggccaacccggccgatgagccgatggtcccggaccgtgtggacgccgactcggtggccgagatcgtctccgactggaccggcattcccgttggccgcctgatgcagggcgagaacgagaagctgctgcatatggaggactacctgggcaagcgtgtgatcggccagaaggaagccatcgccgccgtgtccgacgcggtgcgccgttcgcgtgccggcatctccgacccgaaccgtccgaccggatcgttcctgttcctcggtcccaccggtgtgggcaagaccgaactggccaaggcgctcgccgacttcctgttcgacgacgagaaggccatggtccgcatcgacatgtccgaatacatggagaaggcttcagtctcgcgcctgatcggtgcggctccgggctacgtgggctacgagcagggcggccagctgaccgaggccgtgcgccgccgcccgtattccgtggtgctgttcgacgaggtcgagaaggccaatccggagatcttcgacgtgctgctgcaggtgctcgacgatggccgcctgaccgatggccagggcaggaccgtggacttcaagaacacgatcctgatcatgacctccaacctcggctcgcagttcctcgtgaacgaggacatggacgccgacgccaagaagaaggccgtgatggacgccgtccacatgaacttcaagccggagttcctgaaccgtctggatgacatcgtcatgttccacccgctcacgcgtgaggagcttggcggcatcgtggatatccaggtggctggcgtggcccagcgtctgaccgatcgccgcatcacgctggacgtcaccgactcggctcgcgaatggctggccaacaccggttacgacccggcttatggcgctcgtccgctgcgccgcctggtacagaccgaagtgggcgaccagctggcccgtatgctgctggccggcaaggtccacgacggcgacaccgtgctcgtcgaccagaccggtggtgagcatctggacctcaccgcctgggccagcgaccagatcgtctccgacgacccggatgtgagcgtggacaacgtcaccgaagataagtgacaatcactggctcccctctctgaggggagctgtcagcgaagctgactgaggggagttcgggcggtttcgcaacagtgatttttctctgcaaaatctcttaaacaggtgggtatggtagcagtcatacccactttttcgtctttgtgggtctatctcgatttcgaggggctgatttgccccctttcggaggtctacttccgtttcgaggggctgctcttctgccgaaccgcgagtatcagcggctttatggcaacgccattccgccattgttgcgccgtgtctacttggctaccagccccttgaaatggaagtagacctcctacaacatcgaaatcagccccttgaaacggaagtatctgtccgatccgtctcaattgtgttccccaagagtggaagaaccgtggcatcaaggtgttcactgtcgcatatggtaggaaagtgagtgttaacggacgaagggagagccagtgaccggacgattggcgccgacgccgtcggggcgcatgcatatcggcaacgtgtacgccatgttgggtgcatggctttcggcccgttcgcgtggcgaccgcatgctgatgcgtatcgaagacgtggacaagccgcgcgtggttgccggtgcggaccagctcatgatggacgacctgcattggctcggcctcgactgggatggcgaaccgatgttccaatcccagcacactgaacgatatgaatacgctctcgaatgcctgcgctcgcagggcgtgctgtatccctgcttctgttcgcgcgccgacattcgcgccgcctcggcccccaacgagggcgacggcttcatggtgtaccccggcacgtgccgccgcctgctgcacgaccatcccgacgaggtccgtgcccgtctgtctcgcggcgaccagcattccatccgtatcgccatgccgaaaccggcagcgggagaaaagcaacgtacagtgcctgacgattccgctgcgctgtcgggagccgtgccgccggaacagcagggcgatgccggaatcgttgatggtgtcgcatgctttaacgaccgtgtctatagtccacagcactacgatttggcccgcgaggtaggcgattccgtgattcgccgagccgatggactgttcggctatcaactggtcgtggtcgtggatgacctcgatatggatgttgatgatatcgtgcgcggccgtgatctgctgcgctccaccgcgctgcaaatgtggattcgccagtgtctgttggctggcggctttgagccggaatgcggcaacacggaaaagcctctcgccgagcaccccgagtatgcgcacctgccgctcatcgacaatgcggccggtcggcgtttagccaagcgcgaacgttcgctggatatgggagccttgcgcgcccgcaacgtaacccccgagcaaatcatcggatactgcgcctggttgctgcgtctgcaacccactccaatcccttgcaaacccgccgatctgctggcagatttcagctgggagccgctgcgtgccaaccacctggaccgcgcgctgaaaccggacgatccaaccactccacaatggctggcagaagcgttaggctagaggcagcccaacaggaaggattccaatgtcgtcgaagctctggagaaacgtggcgctggcaggcgtggccgccgccggtgctgccgtgtgggccgtggccccgcgcacgttcaatgacaagcgtcgtaatttcgtgccctccattccgaaggtatggtatgcccatcgtggcttgcatgatgcgggttctggtttggtcggctataccgatatcgctgattatggtggggataattcggtcagcgcccaagccgataccactgagcgatccatcgccgaaaacgatgattatgtgtcgcttgcccgtcgcatggctgtcaaggccggctacggcagtgcggatatgaccggtccgatcgctcctgaaaactcgctggccgcattcgccgccgcctgcgaggctggctatggcatcgaactcgacgtgcagcttacgctcgacggtcaagtggtcgtggtccatgacgccgatttgctgcgcgtggccggcgaccctcgtcgcgtcgaagacctgacgtacgacgaactgacccgtattccgctgttcccgaacggcaagtccggtgacttgaaggccgaaccgttgccgggtgccgacgcgaacccgccgctggtggtcacgccgtccgccgcgccgaaggggtactaccagcatgtgccgctgttctccgatgtgctggacgtggtggccggccaggctccgctgattgtggaatacaagttcagcgacaacaaggcttgggatgagcgtagcgaagagctcatggaaaagggccacgccttgcttgaggcgtatgacggcccgtacgtgatcgaatccttccatccgggcgcggtgaattggtacaaggagcatcaccctgaggtgtgccgcggtcagctgagctggccggcgaagctgagcaagaatggtgcggctgaatgggccgccggcttactggcgttcgactggctgtctcgtcctgatttcgtggcctatgactggaccggtggcgctacgccgcaagtcaagctcgctcgttcgatgggtgcgatgccggtttcatggaccgtgcgcagcagcgacgagctcgcccagtgcgcgccctacttcgaccgccacatcttcgaagcgttcgtccccgacgcagtgtgaggttgagggcgttattgatgtgctcatggggcggttacaggctcatcgggcggtaacttgcccatggggcggtttgaagaatatgtgaaaccgcggaattaagccattttggcataccgccccatgagggttttaccgccccatggggcaattaccgccccatgggggatttcccgccccatgaggtatggcgttttacttgtgatatggctcgccagcgttgatcttataagcgcgatagatctgctccagcagaatcacgcgcatgagctgatgcgggaacgtcatcttcgagaaactcagcagaaaatcagcacgacgcagaatcgcgtcgtcaaggccgattgagccgccgatgaccagctgaatatggctggtgccacgcaatccaaggtcgttgattttggcggccaattcttcgctggacagctgcttgccattgatggcaagggcaataacaaacgcgccgtccttcagatgcttggcgatgcgttcgccttctttggccttgatctgtcggtcaacgccttcggaggcgtggtcaggcgttttctcatctgccacttcaatgatgttgagcctgcagtagcgcgaaagtcgcttggaatactcgtcgatggcgtcgcgaagatattgttccttcacgcgtcccggcgcaataatgtcgatttgcataaaaagcccatcacattggctcccctctctgaggggagccaggaaaatcagtcaattacgccatagagacggtcgccggcatcgcccaaccccggcacgatgtagcacttgtcgttgagcttctcgtcgaccgcgcacactacgaccttgaagtcgatggacggatcgatgtgctcttccacgaacttgatgccttcaggcgccgcgatgatgttgatcgcggtcacgtccttggcaccgcgctcggccagatagtgcgtggcagcaaccagcgtgccaccggtggcgagcatcgggtcgatcaggaagcactgacgaccggacaggtcctccggtagacggttcgcataggtgacctgctgagtggggtgttcctcgtcgcgcttcataccaaggaagccgacttcggcggtcggcataagacgggtcatgccatcgagcatacccagacctgcacgcagcaccggcacaatgatcggacgcggtttggccagcttcttaccggtcatcggagcgaccggtgtttcgattggtgcggcaactacggacaggttgcgggtggcctcataggcctcgagcatcacaagctccgagacgagctcgcggaaagtggaggaaggagtgttcttgtcgcgcagcacggtgagcttgtgctcgaccagcggatgattcaaaacgtgaagttccatactctccagcctacccgtagttcgcggggaagtcacttgggcggcagtcgcgcgcgtatcgcacaccaatgtaaacagcgttcgacggcgggccgcgtaacaccgttgattttgtaacgtgagcgttatgtatgagacgcatatgaaatattcaggcaacggaaattcacgcaggcactgccatcgtatagtgcagtcggccggaagccagccgtcgatatccggcaagtggttcagcacgatatcaggcatcagggcacggtacggcaatcagcgtagacattccgcgggcgggcaacgttcgcggaatgtagtcgtatgtggggaggaagagccatatgactcgattgcaaagactgaagatgggtgctgcggtgtgcattgttgccgcagtgcttgccaccagcggttgtggctggggtcgcaccgtggccgagaaagaggcccaagagaacaacgcgactgcggcaagcgacacctcatcatgtgtggacacctcaggcaacaccatcaaaatcggtttcgtgaattcgctgtctggcacgatggccatttccgaacagacggtgagtgattcgctgcacatggccgttgatgagattaacgcaaagggcggcgtgctgggcaagcagctcaaggtagtgcagcaggacggcaagtccgagccggctgtgttcgccgaaaaagccaagaccctcatcgaaaaggaatgcgtggccgcggtgttcggcggctggacgtcctcttcgcgtaaggccatgctgcctgtgttcgaggcggataacgcgctgctgttctacccgctgcaatacgagggcatggaagccagcccgaacatcttctactcgggtgctgccccgaaccagcagattgtgcctgcgcttgattaccttaaggagcaaggctacaagaagctgttcttggttggctccgattatgtgttcccgcagaccgcaaatcgcgtggtcaaggcgtacgccgagggcaatggcatggaagtggtcggcgaggaatataccccaatgggctccaccgacttcaccaccatcgtcaacaagctcaagttctccggcgcggatgcggtggtgaacacgctgaacggtgattccaacgtcgcattcttcaaggaatacaaggcttccggcctgaaagccgccaccacgccggtgatttccatgtctatcgccgaggaagaggtttccgctatcggcgttgacaacgtcaaggaccagctcactgcttggaactactaccagacgctgaacaatgcgcaaaacaagacgttcgtgaagaacttcaaggcgcgctacggagccaatcgccccacctccgacccgatggaatcggcgtacacatctgtgtacctgtggaagggcatggtcgagaaggccaagtcgttcgatgtggacaaggtcaaggctgcagcagacggtgtcaccttcaatgcaccggaaggcaaggtcaaggtggacggcgaaaaccaccacatctacaagacctcatacatcggcaagatcggctcagacaagctcatccacaccgtctggaagtcggacggtcccatcaagccggacccgtacctgaagacctacagctgggccaagagcctgagcgccagcgtcgagagcaactgagagaagaggacacaacaacatgggtatgttatttccacaaattgtggcaggtctgtccaacggatcgattctgctgctcgcagccctcgggttgtcgttgaccttcggccagatgggcgttatcaacaacgcccacggcgaattcatgatggccggcgcatacaccgcatacgtcatgagcatggtcatcggcaataaaacagtgtccctggccgtggcgctggtggtcggtttcgtagtagccggtttgcttggtttactgctggacgtgttgctgctggagcgtatgcgcaatcgtccgcttgatacgctgctggttaccttcggtgtatcgctggtattgcagcagctcgcacgcgatattttcggtgccactccggtctacgcttcggctcctgaagcgctgaccaatccggtgaccatctttggctacagcttctctgcaggccgactgttcatctttattctgtcgattatctgcgtggctgcgctgtacgcgatcctgaagctcacgccgctgggtcgccagattcgcgccacttccgagaaccgcgacctcgctgaggtttccggcatctccaccaagatggtcgaccatgtgacgttcttcctgggctccggcatcgccggtatcgctggcgtggcgctgagcctgctgaactcgattagcttcaacttcggtacgaccttcatcgtgcaggcctttctggttgttgtggccggcggcgttggccagctcaagggcgcggttatcgcctcgttcgtgctgggcttgtgccagtcgtccatcgaactgccgacctctgcctcgattggtcaggttgccgtgttcctgattgtggtggtgttcctgcagttcaggccgcagggcttggtctccatccgctccaggaacctcgcgtgagtgcttcagaagggtaaggaaacgacaatgaagatgactttgagcgaatacgccacgaaatataaggctttgatcggtgtggtcattgccgtggcgctgatcttcctttctccgactgtgctgagcgtgtacaacctcggcctgctgtccaaatacctgtgctacgcgatggtcgcggtcggcatcggcctggcttggggccaaggcggtatgctgacgctgggccaaggcctgttctttggtctcggcgcgtacgtgatggctatccacatgaagcttgaggacattggcgtgggccaagtgccggacttcatgtcccagtacggcatcaccaaggttcctggattctgggaactcttccgcaatccggtcatcgccgtgattggcgtggctgcggtaccgggcattatcgccgcaatcctcggtctggctgtgttcggccgtggcgtgcgtggcgcctacttcgcaattctttcgcaggcgctggttgccgcgttcgccgtgctgcttatcggccagtcgaaaaccaccggtggcaccaacggtctcaacgatttcaagggattctttggttacgacttgactgataacgccaacaagcagatgatcttctacatctgcgcgttcctgacgctggccatggtgcttatcgtctactggattcgcaaatcgtttatgggcgacctgattatcggcgtgcgcgaccaagagaaccgcatgaagttcttgggctataaccccgcctccatcaaggtgttcgccttctcggtggctgcaatgttcgccggcattggtggcgcaatgttcgtgccagtggtcggcatcatttcgccgtccgatatcggcgtgacgccgtccatcctgatgctcgccggcgtggtgatcggcggacgtgccactttgctcggcccggtggtcggcacgctgctggtgcgctttgcggaaacgcagctgtctgaggcgtatccgtccgcgtggacgtacatcgaaggcctgatcttcattctggtgattgcctttgtgccgaagggcttgggacagttcaagggcgtatggccttggattaaggagaagatcgggctcggaaagagttcggttggagcttcggctggtgctggtgccgttgccggtaccggtactgctactgcaaaggcggtgaacgcatgagtgaggagaagaacatgagctcgaatccatcggctcccgcacctgcatcgcaggccgatttggagcagttgcgcgccgaaatgattgagatgcgcgacgaagccaagcgtatgcgcgacgaagcggcccagatgaaggccgaaatcgttgaagagcgtacgaagctgcacgatcagcttgcggtgctggatgatcgcggcggccagtggagcgattatctggaagttcgtggactgcacgttgagttcgatggattcgtggccgtcaagaatcttgatttgactgtgcagcacggcgatttgcgattcctgatcggcccgaacggtgctggtaaaacgaccatcatcgacgcgattaccggactggtgccggccactggttccgcggaattccgtggcgagcagctgttgggccgcaagccgaacgacatcgtcaagctgggcgtcgggcgtaccttccagaccgcatcggtggttgaagagctgtccgtgttggagaatctgcagctggccgagggcttccgcaagaagggtcgtgagctgttccagccgatgggcggcgtttcgcagaacatcgaatacatgatggacgtgtgcaatctgactgtggatgcaaacaagcccgcaggcatcctgccgcacggcaagaaacagtggctggaaatcggtatgctgctcgtgcaggacgcgcacctgctgctgctcgacgagccggtggccggcatgactccggccgagcgtgtgcagaccggtgagctgctcaagcgatgcagcaagaaccgcacggtcatcatcgtggaacacgacatggatttcatgcgtcagttcgccgattcggtcacggtgctcaaccagggcgaaatccttgccgagggttcggtcgaagacatccaaaacaacgaagaagtagtccgcatctacctgggcggcggagaaaactaactccctgtctcccctccctgaggccgaggcgttaagcaaacagcccagtgggctgtttgtagccgaaggcgagacgatagtcgaaccagcaggttgcaggcaaggcccgtccttaattgcggacgagctgtcaccgaaggtgactgaggggagtaggtaagaggaagaagcgcaatatggaccgcactgacaacaaccatcgcatcccggaatgcgctttttcagtgcatattgagggtgatacaacgcgcctcaacatcaatatgcacgacgccgtagaaagtgaataatcatggcaatgcttgaagtaaaggatttgaacaccggttacggcaaagtgaccgtcgtcaacgacatcagtttcgacgtggccgccggcgaatgggtgagcatcgtcggcaacaacggtgccggtaagaccacgctgttgaaggcgattctgggcttgctgcccgtttcgtccggttcgattagtttcgagggcaaggacattaccaaggctgcaccgaaccaacgcatccgcaagggcatggcgttcgtgccgcagggccagcagtcctttggcaccatgaccgtggacgaaaacctgcacgtggtcgccgaccgctacggttcagaggccaaggcccgttacgacgaagccgtggaaatgttcccggtcttgaaggaatttgctggccgacgtgccggtctgctgtccggtggccagcgtcagcagctttcgattgcccgcgcgctgatcacccgccccaagctcatgattctcgatgagccgaccgaaggcatccagcccaatatcgtcgccgaaatccagaaggccattcgcatgatggccgaagacaagggtatcggtgtggtcttggttgagcagaaggtccaattcgccgtcgagcgcgccgaccgctactacgtcctggcctccggccgtttcatcgccaccggcgaaggcggccccgaccaagtagaagccgccaaggaatccatgagagtgtgattaattcgacccccgtttatggccatagagcgttatgagaaacgtcccgttcttataacgctcttattattgggcgatgttagggctcacattggtgtgcctgaaaaactccagtcaacaacagaggatgttatgagacttacaccacgagagactgacaagttgatgctgtacttggcggggcagcttgccaaagaccgcaaagccagaggcgtgaagctcaactatgtggaggcgattgcgttgatttccgccgaatgcgttgagcgggcgcgtgagggaagcactgtggcggagctcatggcatacggtcgcacgctgctcaagcctgaagatgtgatggatggcgtggccgagatgctggaagtggtggaggtcgaggccacgttcccggacggcaccaagctcgtctctattcataaccccatcgaatccaccgagaagttggtgccgggggaatatctgctggctgacgatgatttggaactcaatgaaggttccgaagacatcgagctggacgtggtgaacactgcggatcgaccgattcagattggttcgcacttccacttctttgaagttaataagtacctgaagttcgaccgtaaggcggcgtatggcaagcggttggatatcgcggctggtacggctgtgaggttcgagccgggtgaaacgcatcgagtgcggttgattgatattggtggcacgcgtgagattcacggcttcagcgcactggttgaggggaagttggatgaccctgaggtgcgggaggccgcgtttaagaaggcgcatgagcttggattctcgggaatctgagctaagggccaccctcagtcagcttcgctgacagctcccgccagcggggagcagactacctctcagtctcgcttcgcgagccagctcccctgacaaggggagctgaaaaacagcaaggacttttgacatgaagattattacgcgcaaggattatgcgggaatgttcggaccgaccacgggagaccgcgtgcgactcggtgacacgaacctcatcatcgaggtggaaaaggactacacgcactacggtgatgaactgaagttcggtggaggcaaatcattccgcgacggcatgggccaaagctccgtgcagctcgacgttgaatcgccggataccatcatcaccaacgccctcatcgtggactacaccggcatctacaaggcggacatcggcatcaaagacggcaaaatcagcgccatcggcaaggccggcagcccgcagaccatgagcggtatcacccccggtctcgaagcgggctccggcactgaagctctcgccggcgaaggcctcatcgtcaccgcaggcggactcgacacccacatccacttcatctccccgcagcagattcgcactgccctcgccggtggcgtgaccacgatggtcggcggcggcaccggtccggccgacggcaccaacgccaccacctgcaacccgggagccttccacctgacccgcatgatcgaggccgccgaagcgctgcccatcaacatcgcctaccttggcaagggcaacgactccagccccgaaccgttgcgtgagcagattcgcgccggtgccgcaggcctgaagatccacgaggactggggtgccaccccggccgtcatcgacactgcactcggcgtggccgacgaaaccgacacgcaggtggctatccacaccgatactctgaacgaaggcggttgtgtggaagacaccatcgccgcgttcaagggccgcaccatccacacctaccacaccgaaggcgctggaggcggccacgctccggacattattcgtgccgctggcttcccaaacgtgctgccgagttccacgaacccgaccatgccgttcacgcgcaacaccatcgacgagcatctcgacatgatgatggtctgccaccacctcgaccgcaatgtgcccgaagacatctctttcgccgactcgcgcatccgtcccgagaccatcggtgccgaagacgtgctacacgacatgggcatcatctccatgatgagctccgactcgcaggccatgggccgcgtgggcgaggtcatcacccgcaccatccagaccgccgacaaaatgaagaagcagcgcggtccgctccccgaagacgaacacgacaacaaccgcaacgacaacttccgtgtcaagcgctacgtctccaagttcaccatcaacccggccatcacccacggcatttccgaatacgtgggctccatcgaagtcggtaagatggcggatctcgtgctttggcagccgtccatgttcggcgcgaagccggaaatggtcatcaagggtggctccatcgcctactctcgtatgggtgacgcgaatgcttctatcccgaccccggaacctgtctactaccgcgatatgttcggcgcgctcggccgtgcgcttggcaagtcctgcgccacgtttgtttcgcaggccgccgtggatgacgatatcaagggcaagctggagctgcagcgccaggtgttaccagtgcatggctgccgcacggtaggcaagaaggatctgaagttcaacgacgtgctcgccgacattcaggtcaatcccgaaaccttccaagtgacggtggacggcgaaccggtccactctgacccggcgtacgagttgccgcttacccagcggtacttcctgttctgagagaactggtggctctcctcaaaggggagagccacttggttttagccttcggccacgaaatcggtcacgaaatcggccacatctcgaatgaggtcgaaggcgtcgtcgcctcgggtggtcagtacacgcaagcagatgccattgattacgcggctcacgccgagctcgccggtgaagccgatggcgtctgcgtgttcatggatgcgagtgatgagcgcgtcttcggcggcgatgcgggcagtctcgatgcgctcgcggatggcggcggaggatgcttctttagttgcggcatcttgtacagcgtcgctagggtcgagttcgggcaggtgagcgtagagaacgccgcagtgggtgaattcgcgccacatgccgagttcggtgtagtcaaaagcatcaggttccaacagcatgcggtcagcaaaggccagatgttcgcgcggttgggcagcggcggcttccgccttggaaggccggcctcggcgatgtgcgtgctgttgcgccaattcggctgcggcggccttggtcacggcttcgggttcggccacatatacgcgcatacgattcgtaaaacgtttcatggcccaacgctcatccatcccaacgcggccacatgtcgccacatccgcatacacgaatgctgactcggcggaaatatgcgcggtggtcaggttcatgaatgagctgttcttgaacggaatcactgggaacggcaggaacacggctttggcattgccacgcgccctgagttcgatggtgcgttcggccgagccgtccgcggtgtcgaacaccttctcgtagctttgcgttttgatggtcgaatcggtgcctgggccgaagtcgatatcgatatgggcttcatcgcccctcaggaagccaggggaggcgagcatcacgacgaaatccgaatgacgtccgttggtgaacggggtcatcagtttgaacggcgcctcgaaataaatatcgtcgattttggtacgtccgtggcggaatgcagtggatagacgaaaagtgctactgcccatggacgaatcgctgccttcttatgattggtgcctgacgatgacatgggcaattatgccgcacttggtgcaacggtatgtttcggcccgtccgtttttggatacgggcgggccaaaacatcacatgtcctcgaacagcacgctcttcttgatccatgcgatgacgtcgtccactccggcaccgcccatcaggtcggtgaagatgaacgggcggtcgccgcgcatcttcttggagtcgcgggccatcacgtctagatcggcgtgaaccaacggggccaggtcggccttgttgatcaccagcaggtcggagcgggtgacgccggggccgcccttgcgtgggatcttgtcgccctcatcggtggcgatgacgtagattgtggcgtcggccaggtccgggctgaacgtggcggacagattgtcgccgccggactccacgaacatgatctgcacgtccgggtgggtgcgggccatttcctcacaggcctcgaggttcatcgagcagtcctcgcggatggcggtgtgggggcagccaccggtctccacgccgacgatacggtccggcgcgaggcgtgagtgctcgataaggaactcggcgtcttccttggtgtagatatcgttggtgaccacgcagatgctgtattcgtcagccatcttgcgggtcaggcgttcgataagcgcggttttgccggaaccgaccggtccggcgacaccgatgcgtacgtatgacatggggtttctcctttatgtgggaattagttaggtatgtggtttgcgggtgaggttatcctggctcccctccttgagaggagccaggataattagctcatgtagagcctcgagtacaagatttcatgctgcatggcggcgatgtcgaggtaagctccggagatgccgagatcctcgggcttcaacgtcatcgcgatattcaccgcgcgcacgaggcgcgggaacgaatcatgcagggcgacttggccagcgtactggctgagcggaatcgccttcgcggcgcacatggtaagcgcgctcaacagcgaatatccatacatgatggccgcgtcgcgcacgtcgttcgcatggtcagccgcgtacaggcccatcgcgatcgaatgcaggccacggcagcggcgctcgcgaatcagcccggcatacaggtcgagcgacggcgagccgtacaggccgtcggcggcatcgtgcagctggtggcgttcggtgtgatgctcgtgcacggcgatgatgctgttttcgcgcgaatccgcagcggatgcggtggcattgtcggcaggacttggcttggcgaacccacgatgcccatccgaggtctgcgcctggccggcatccatctgctcggccagcttgaccaggcgggtacacatgcgctcgctgccttcacggatttcacgtgcggattgcagggccgaggccagctcgtcaagttcgatgagtcgctcggccagccctttgcgggagactcgcgaatcggtggcgtacttgccggccagcaccatctgcccgatttccttgtacggtgcgacttcgaggtagttcttcatatactcctcgaaatcggcgccacggcgcaagaagtcgcgctgtacgaaggtctccatgccgttggacagcgcgaacgcgcccacggggaagacgctgtcgcacacctgcagcatggccagacgtcgcgattcggtttcgttgatgttcatggggctatcagtgggtgtgccaggtgcggccgccgtcgtggctgtgggagccgtccgggcggtgcagcacgccgttcatctcatattcgccgggctcaccctcacctgcgtcgtgtgtatgcacatccagatggccggcggcctcctcggccgggaattccttgtcggcctcggcttcctgctcctcctcggccacgtctcccgtggtcttgttggtgcccggaatcagtgtgccggtgccggcgtgggccttgacgatcaggaagccgtcaaacccaccctcgatgatatgcggttcataaccgatcttcttcgtgtattccatggtcggatggtcgtacggcaccagcacgcggtcgttctcgaccttgagactcaggtggcggttgcccagttcgaagcacaggcgtcccatttccttcatcgagttaaccggaatctcaatcagctgtgcggttttaatgcgtgcgaaatagcgcttgtcttcggtttcggcgagcacatcgccgtccttgatggtcttgccaaccatgatgccgaactcggtgccgtcctcggccaccttgcgcatgcgcttcttatcggtttcgaaccagtcgaaggcaatcgacacattaagtttgccgtcgctgtactgctgactgatgatgttgccggtgatttctttggcgatcatccgttctccttggagaaaattgcttgtggcgtgagaatccccacgtccttcatgccacagtgtagagagcctgttgcgtcactttgtaacgaatgatcgaaatatgcaaaaaatatagcggaaaaatatccgaaaacacggaaaccggatatatggtacacggtgtgtcgctagtaattgcaagctattttgcatggttgtgcattagacgaatcacagttgtgatattacatatcacgttcctggagcgggaggttgtggtcgagctccgaaatcaacaaaaagagggaagttggatataatcgaagtacctgacaccgtcacattggcgatgcacattccggataatttcatttcgccgtccaccggggcgttgttctacgccatcatgattccggtgtgggtgctgtgcctacgctacgtgatccgcaacagcacgccggagaagatggcctacctgggcgccggcgcggcgttctcgttcctcatcatgatgttcaacgtgcccacgcccggcggcaccaccgcgcacggtgtcggcggcgcgctgatcgctctgctgctcggtccccagtacgcgacggtcgccgtgtcggtggccctgctgctgcaggcgctgctcttcggcgacggcggcctgatcacgctcggcgccaactgcttcaacatggcgttcgtgctgccgtttgtggcttacggactgtacgtgttgctacgcaaggtgctgcccgacggctggaaggaacgcgtggccgaattcgtgtccggctatatcggcatcacgctcgccgcattctgcgtggcgctggaactcggcgtgcagccgctgctgttcaaagccgctgacggccaggcgctctacttcccgttcacctttaacgtgacgattcccgccatgctgatcccgcacctggccgtagccagtgtggtcgagggtctggtgaccgtggtggttgtcgaattcgtgcgccgtaccgcaccggagattatcgaagacaatgcccgtgtgaacttcgccgagaccgccggtgctgacggcaaacaggtcgcgcacgccggactgcgcaagtctgcgtggattgcgctggccgtggtggcggtgctttccccgatcggcctgctcgccaccggcgacgcctggggcgagtggggcgccgaggacttcatgagtgccacggggctcaactacgtgccgcagtacatcgcccatggcttctcgtgggatgcgctgttgcctgactactcgctgcagggtctgccggacatcgccggctacattctctccgcagtgattggcatcgccgtgctcactatcgtgttccgtctgctggcgctcgcggtgagcggcaacggcaagacatccgcgcgttgacgatacctgcatggatgcgtgagtcggaggattacgatcctccggctgacaagtcatccttcatcgaacacaacctggggcatttcggcagcgtactcgagcaggttggtcatgcgttgccgattgagtcgagcccggtcgacaaggtgctgggctcggtcaatccgggcgtgcggctgctgggcatactggccgcgattgtctgcgtcaacatcacatgcaacatgctgttctcgtacatcatgctggcggtggtgctgctgatgatggcgacccggccggcgcgcctgatgagggcgttgctcggcccggtgctggccgtatgcatcctgagcctggtcgtggcggtgccgagcctgctgattgggcagtacagtgcgccggtccggctggtggtgcgtgcgttcgtggcggtgtcgctggtgatcgcactggcgcgtacggtgccgtggaatcgcctgattgccggactgcgcgcagttggctaccctgattcggtgatttatatctgcgacgtgacgattcagttcatcgatattctcggtcgttcgatggtggagttgctggatgcgctgcggttgcgcagcgtgggccgcgaccggaccaagctgatgtccgccggccagttgatgggcgcgctgtttctgcgtgcgaatacgcaggcgcggcaaatggctgaatcgatggtgtgccgggggtttgacggtacgtatcatatccaccacgagcgtctgctgacgtggcgcaacggggtgtatgccgtgggcattgctgcaatgattgcgctggcggtgtattcgggatgagggtggttcgaatgaatggagcccaataatgttcggattaaagcgtaatcataaacaaactgcagccatgcagccagataactcatggttccgcggcgacccgctggtcgaactgaatcacatcgacttttcctataaagattacggcgacgccgacgatgaaacctcgtcgcacgccgtgctacgtgatttttcgctgaccgtcgaacgcggtgagcgcgtggcgctgctcgggccgaacggcagcggcaagaccacgctgatgcgcatcatcaatgcgctggaatttccggactcaggcgagtatcggtttggcggtactccggtggttcgcgaggaagtcgaggcgaagaacagcctgttcgccaaagcgctgcatcagcgcatcggattcgtgttccaaagctccgacacccagctgttctgcccgtcggtggaagaggagattgcgttcggtccgttgcagatggggttgccggatgccgaagtacagcgcagagtcgatgacatggtgacgttgttcggcttggatcggatgcgggagcggacgccataccgtctgtctggcggtgaaaaaaagcgtgtggcgattgcctgctgcatgtcgatgaatccggacctgcttgttctggacgaaccgaccgacggcttggacgagcgcaatactgacgtagtggttgaggtattgcgcgccttcactgatgccggcaagactgtactgttctccacgcatcaccacgacatcgtggagcggctcgacgctcgcatcgtgcgcgtgcatccgtcactatggcaatgacattcacgtggcgtctattggatatcttcatcgaaaaaagcagaaaggcatcggcgaggatcgcgagtccggcgagaactgcgatagtcgctttggtgatggttgccttcatgagagtttccccaagttgttgacgttgatttcatgagattcgaaaaagagcgtatctaggccgaaccggacagtaagtcaacggtttctggaaaccagctgaaaaagctacggtattgtgaaatatgtctcatcggaatgggtcaagtttggcctagcgctcgcagtcgtgcgcgaagattcgttggattgattctcggtggattaagtcataggaagaaactagacaccttgcggtgtaaaaccgggaatcggaatggtgtaaaaccgggaatggaaatagtgtaaaatcgggaatgagaaaggtgtaaaatctatattgaggcgattgggtagctgagaaaggccggaaaatgaacgatttgaacaatcgtagtgataccttgactcaacctgattatcgtgctcgcgtggtcgatggcaggttaggtaagttacttaaagcattcggcgcggtggaaatcgtcgggccaaaatggtgtggaaagacatggacggcgctttcccgctcgcgaagtatggatcgtctggatgatgccgctacctttgcggccgcacagactgatccggcattggtactcatgggtaatgaaccgcatttggtggatgagtggcaagatgtgccgcaaatttgggatgccgctcgtcgtcatgtggatgacaatgcgaatcgcaaggggcagctgattcttacgggctcggccattccgaaggaccgagaaacaattcaccacagtggcacaggtcgaatttctcgcttgcgtatgtggcctatgagtctgtgcgagtcagggcaatctaccggtgtagtgagcttgtctggtttgtttgatggacaattcgagcctgccgaatgtgcaaccaacattgaagatattgccagatggtgctgtcgaggtgggtggcccgcaaatcttgatttggatgacgagtttgctctggaaattccgagtgaatatatcaagagtgtgcttgatatcagcgtgcccaagatgaacaagaaccctgaaaccgcgcgtgcactcatgcgtgcgctcgccgtgaacgtatcgcaggcaccaaaatatgcgacgctggctgcggatatggcctatggcgatgagcgccgtgaaccggatacgcagacagtaaagagctatttgggaatgctcaaggacttgtaccttctgacggatttggagggttgggagccgccactccgcgcaaagagtcgtgtgcgaaccaagcccaagcgatatttcgtggatccttcgttgcctgctgcggttttaggtgccgcgccgaatactctgatgcgcgatacacagacgctcggcgatctgtttgaaacgctgtgcattcgtgatttgaatgtatatctgtcggccatgccgggcgcgaacaatcgcatcgcctactaccgcgatgacaaggggcttgaagttgatgtcattatcgagttgtctgacggcaggtggggtgctatcgaaataaaactcagtgaccttaaggtgaacgatgacaatgcggataagctcaaatccttccgcgacaaaatctgtggcaaccccatggcccaagttcgcgaaccagagttcatgatgttccttaccggccgaggtgggaaggcctatcgccgcaatgacggcatactggtcgtgcccatcgcaacgttcggggcgtgaatcgggtaaaagaaaagaagcgccgaaccgcgaaagcgcctgtcggcgcaagggccgctcgcggcggcaaaaaatggagcccggggcttaagcacggtccgacgcggatacttagtatagcttgcgatggggctcgccgcgccgggggaggtgtggtgttggctggtagctgattgttggggtgcggttggtgggtctctccctcagtcacgggcatcgcccgtgacagctccctcatcagagggagcctggagcagggctactccaaccgtccgcgacgccagaggttggcaccgtgctggaaatccttggcggtggccatgaggctgccggcggtgtgcataaggcgggcggctttggtgcgcacggccttctcatcggcatccgaggagaaggcgccgttggcctcggcccgggtcaccatgcgccgcgcctccacgcgcaagctcaacgccaccacatcggtaaacgccgccgcacgctcaagcgccacggcaaaatcgcccacaaaagcaccggagagaatcgaatcggccaatcgcacgatgtcatcttcactgggagcctgatccacgccggcgatggcggaggcggtagtggccaccggctcacccaagcgccacagatgcgcgatcgagtcgcgattcgatcgcatccacgtacgcaacatatacagtcgccacagcacaccaggcagcgaatccggctcggcatcgctccacagttcggcgatttcatccacgccgaccgtctccaccaacgtgagcacccgctcaacaaccgccgggtcctcgctatggcgcacacgatccagcaatgcggcagcggacagatggctcatctcgctcaacgcctgcgggtccatgccaccggccaatccatcggccacagccgggtcgagctgagccgggcgcgaggggcgtgaagaacccatgcgagcaggtccgaatgccgctccggccgcacgcaacgagccgaagcccgggcccagactgccggcggcaccattgtgcgcggcatgagctgcagcggcagcggccgaggagttggatgaatcaggaaatgcgggtctagtagacaagcggttgaaccttctgaatatcgatgattttgggaccatgaggcgtcggagtgacgaacagcgccaccgccgtgccggtcggcatgaacggtgtcttggcgatcaggcgtttgctcaaagacggcgcaacgcacatgctgcgcaggtgtccgaacataccaccaatcaccggccggtgcatgcatatcgctatgggctgacggcgctcaagtgcgaactcgatttcgctgagtagacactcccatgcggtgtccggcgcagcggcgtatgcatcttcggtgagcggatcgagatgaaccatgtctcgtccggtctgccacgcgaacatctccaacgtctcctggcagcgcacccaaggcgacgtggccagtcgggtcggattgaaacacgccagctcgcggttcagcgcgtatgccgcagccgcgccgcgcggcgtgatcggacggttcgcgtccgaacccttccacagcttgcgcgcttccgctttgccgtggcgcacgataatcaccggcaccgcgtccagtgcaccttcttcgacccgatcaacgaatagcgcgaggatgtccttatcggtggaatggctgagcttcttgcgggcctcggccggcgtcagccacaaaacttcgtcgatttcgccgatgtccgcccgatgcaccgggccaaacgcatgggtacgccgcaggttgtcgatggcgctgatcggcgtggccatccagaactggatatgcttggtatccgccgaccgatccttggtatggcgctgtttgctgccttcttcggacagcgggtactcgatgtcgcccagataggggccaagttccacggacaggcccgattcctcgccgatctcgcgtacggcggcatgccggtgcgattcgttcgggtcgaccttgcctttcggccagctccagtcgtcgtatttcgggcgatgcacgacgcacagttcgatgcggttgagtacgttgtccgccgcggccgggctgtcggcctgcgccgggtccggggtgggagccgcgtccgatgcgccgggtgctgccgtggccttgccgtcagaatccgcggtgttcgcgatgatggtgccatcggtggcaatattggatttcgctgatggagacgatgcctgcgtcggctcggcatcatccttccaccggtacagaataccgccggcggcttccacgattcgtctcatactgttcgtacccatctcttgtattataggtcgcgttggaccgctgctacgtagtttttgcgcgctgaacaacgatgcccggcatcctctcgaaagaggagccgggcatcgtaaccaccctcagtcagctcgtgctgacagggagcatcgaatgaaatcagttgtgcgaattggggcggcgctggtgcttgcgaatcagatattcctgactgtcgaccagcgggcggccctcgtcgtccttggtgtgcagcacatacgtgccgtcgggctgcatgtgccagctcatggtggagtcggccatctgcaggtccacgtacttgatgagcccgtcgatctgctccggggcggtgacacgcaccagagcctccacacggcggtcaaggttacggtgcatgaggtcagccgaaccgatgtagacctccgggccggaagccggaccctcgccgatctgcgggccgtccgcattgcagaaggcgtagatgcgggagtgctccaggaagcggccgagaatcgaacgtacgcggatgttctcggacaggccgggaacgccgggcttcagagcgcagatgccgcgttcgacgatgtcgatcttcacgccggcctgagaggcacggtacaaggcgtcgatggtcttctcgtccacgatggagttgaccttgatcttgatccaggcctccttgccagcgcgggcggcgtcctcctcgcggcggatgcgctggattagaccggtgcgcacggtgcgcggggccaccagcagacggtggaagctggactttggcgcgtaaccggagagctggttgaacagacgagtcagatcctggccgaccaccgggtcgcaggtcagcagacccagatcggtgtacagtcgcgcggtcttcgggttgtagttaccggtgcctacgtggcagtagcggcgtagaccgtccgcttcctgacgcacgacctcgatgagcttgcagtgggtcttcaagcccacgatgccgtacaccacgtgcacgccggcgcgttcgagcttgcgggcccacgcgatgttggcgtcctcgtcgaaacgagccttgatttccaccaaagccagcacctgcttgccggcatgagcggcgtcgatcagggcgtcgatgatcggcgagttggagctggtgcggtacagggtctgcttgatggccagcaccttcgggtccgcggcggcctgcgcaaggaaggcctgcacggaagtggagaaggagtcataggggtgatgcagcaggatgtcgcgctcgcggatggcggcgaaaatgtcctgtgcgcgggaggactcgacctcggcgatctgacggttcgtggtcggcacgaacggacggttcttcaggtccgggcggtccacgctgccgagctcaaagagcacggtcaggtccagcgggctgggcagacggtatacctcgtcctggcttacgccgagctggtcggcgagcagctgggagaggaacgggctagtggtgtccgtgatctccagacggatcggcggtccgaagcggcggcgcagcagctccttctccatggcgttgagcaggttctcggcgtcatcctcttccacgtcgatgtcctcgttacgagtcacgcggaaggagcgggcttccttgatgatcatgcccgggaacagggattccagatgcgcggcgatgagcttttccatggcgatgaagccgtaacgctcgtccttggactcctcgtcggtcatgtcgtccaccggcaccaggcgcggcaggttgcccgggatcttgacacgggcgaagtgcgacttgccggaggccgggttctccacaatcacggccaggttgatggaaccgccggaaatgtaggggaacgggtgggccggatccacggcgagcggcgtcaggaccgggaacacctgctggcggtagtagcgcgagagacgctcctgctcggaggaggtgagcttgtcccacgtcagcaggacgatgcgctccttctccaattccggcagaatggtgtcgatcgcgtaatgtgcgtgctcgtcttgcagacggtgtgcggtctcgctgatcgcgcgcagctgctgacgcgggctcaggccggcggcagacggcacggcgatgcccgagtcgatacggcgcttcaggccggcgacgcggaccatgaagaactcgtcaaggttcgaggcgaagatcgcggcgaagttggcgcgctcgagcaggggcatgtcttcgttctccgcgcattcgagcacgcgctggttgaacttgagccagctgagctcgcggtcgaagaaacggtccttgggcagcggtgcctcgccttcctgatcgacgcggcggtcgttgttgtcgttttcggcaatatgctctgcgatttggctgcgcagaattgccttcgagggtgcgtcaaatatctgtgccatagtttatatcgtaagctctggcgtggccggaaaacggctgaacgcgccagaattcaacgggtgttcatgttagttcggtgttggttggttttgagtgtgctagcgtgctcgcgacacgccgtgagcggcggtgaaacgaacgaaaccgaacatcagacgggttcgatgtgaacggttcagctcgttttccgatagccagaaagtgcgattgaacagttgtgataaaaaacgcacaacgactctctgcaggttgcgagaaacgggagtgatgaatagattataaggtacaagaacaactgaacagagcagagcccacaaatagtgtatggtcacgaggactgttacgttggacgggcattggaaagacttaccgttacgacgatgatgttgtgcagagattctgctccagtagttgaacttgtagaaaaggcccgctccggcgggccttttcgtttgtgtgtacagtggagggcatgacggaaacacagcgtacgccagaggggatgtcgtcgaaaccccgtatcaagccggccgatgccgaagacggccgcccggtctctatctctgcgcgtctcggacgactgcaattccactattccggcaagttccgcgtgctgcagattgccgacattcaggatgggccgaaagtctccaaagacaccatcgccctgattgaggccagccttgatgccacacggcctgatctggtgattttctccggcaaccagatcgccggctacgatccggcctttgccaagagcttccgcaaacgccgttggtgcgaagaggcgattcctgaatctgcgttgaaccatacgcgtgaattggtgcgcaaggccatcggtcaatttacctctcctttggcgtcacggggcataccgtgggcggtgacctacggcaaccacgatttccagtgcggtttgagcaatgccgaactcgacggaatctaccgcgagtttcccggttgcatcaatccgccgagcgatgcgctggccaagcagaccgtatatatgtgtcataaggacggctcgcctgcggcaaccaatggtgaagaaaccgatgcgccgatttccgcgtccaccattcccggcacttttgcattgccggtgatggatgtggattgcacgcgcaacgtactgggactggtactggtgaattccggtgactatgcgcatggaggcggtttcggcacgccttcgcccgagacattggccttcctcaaggctttgcccgaacatatcggagccaaatcaatggtgttccagcacatgccgctgccggagtattaccaggtactcaaaccggtggccgccaatgcggctttcgccatgcagggctaccgcaagcatgcggatacctattatgtgctggacgaggatcgcactcaagccggcgggtatctgggggaaggcatttcctgcccggatgagtcggacgagtttgaggcgctgcgcgaggggtatttcggcgtcgtagctggtcatgatcatcgcaacggtttcgtcggcgaacatgagggtctgttgcttatcgctacgccaacctgcggattcaatacgtacggaccggctccggccaaacgtgccacgcgattgatcgaatttgatatccgtcacccttacgagccgcgtacgcaattgctggagtttggcgaactggtgggcaagcccagttccaaacgcgcctacacctatgcggtgaaccaaaccgcgcctggcgagggcgagggtgatgatttgctgcgcaagccgtcgctatggagccaactgtccggcctgtttaggtagcgcataacaaaactgcccccgccagcgggggcaatgtatgtgatgactagcgaacggctttgaccagtgcctcggtgaggtacttgccggcggccatcaccagcggcgcatagcggcgtccgggggcggcacccatgcggccggtcgggccggaaatcgagatggcggcgatgacctggccggaggcgttgcggatcggggcggaaatcgagcacacgccctcttcgcgttcgttcacggactcggaccagccgcgcttgcgtacggcggccagcttggtggcggtgaacttggcgtggcgcaatccctggtgcagacggtcggaatcctcccaagccagaagaatctgggcggcggaaccggcttccatcgacagcatggcacccaccggaatggaatcacgtaggccggaggtgcgttccacagcggcgatgcacacgcgctgatcgccttggcggcggtaaatctgcgcagactcgccagtgcgatcgagcagggtctgcaggatcgggccggcggcggtcagcagacgatcctcgcctgctgcggcggcaagttcggcgaaacgggagccgagtacgaatcggccatgctggtcgcgcagtacgaaacggtggcgttccagtgcaatagccaaacgatgtgcggtcggtcgagcgagaccggtggcggccacaagctggcccagcgtagacgggccggattccagtgcgtcaagaatctttacggttttatcaaggacgccaacgccggaatggatttccccatcgtccttggcggtggtgtcttcaaccggctcggactcggtcaagctgttgttcaatggttcttcccgggaatcagtcataataagggcgattatgccatctcacatagtgaaatggcaaattggggaagtgtctcacagggtggccatgaagttgaaagggcgttcgtggatgccgaagagacatgtctggagcggaaccgagtcatgactaggtcatgttcgagtcgggtccgagtcatattgaggccatcatttgaccgtatctcaatatccggcatgctcatggccgggcccatcgcaagcacataggctaataccacgaacaaggcgcgaacacaatacctcgcgcggaattttttggaggaatcactatgggaacgacactggccgagaaggtctgggccgatcatctggtgcgcaagggcagcgacggagctcctgatctgctgtacatcgatctgatgctcatgcatgaggtcaccagcccgcaggcgtttgagggcctgcgcttggccggccgcaagccgcgtcacgtggatcagctcattgccaccgaggatcacaacacgccgaccgttgatatcgatcgcccgaacccggatgagacgagcgcgttgcagttgacgactttggagaagaactgcaaggagttcggcgtgcgcctgcacccgctgggcgacgccgatcagggcatcgtccacgcgttcgccccgattctgggcctgacccagccgggcatgaccatcgtgtgcggtgattcgcatacgtcgacgcacggcgcgttcggcgcgctggcgttcggcatcggcacttccgaagtcgaacacgtgatggccacacagacgctgtctctgaagccgttcaagaccatggccgtcaacgtcaacggcaagctgcccgcggacgcgacggccaaggacatcattctggcgatcatcgccaagatcggcaccggcggcggccagggttacgtgatcgaataccgtggtgaggcgattcgcaacctcaccatggacgaacgtatgaccgtgtgcaacatgtccatcgaggccggtgcgcgtgccggcatgatcgcgccggacgagaccacgttcgagtacctgaagggccgtccgcacgcgccggaaggcgagctgtgggatcaggccgtggcgtactggaagacgctgaagaccgatgacgatgccgtattcgacaaggtggtggatattgacgccaccaagctcggtccatatgtgacgtggggcaccaaccccggccaaggtctgccgatcaccgcctccgtgccggagccgggcaagatcgccgacgccaccaagcgcgccgccgccgaacgtgcgattacatacatgggtttgaagccaggcatgccgatcaaggacatcgccgtggacaccgtgttcattggttcgtgcaccaacggtcgtatcgacgatttgcgccaggccgccgcgattatgaagggccaccgcaaggccgagaacatccaccgcgtgctggtggtgccggcctcctcccgcgtgcgtttgcaggcggagaaggaaggcctcgataaggtgttcaaggactttggcgccgaatggcgtaacgccggctgctcgatgtgcctgggcatgaacccggacaagctggtgccgaacgagcgctcgatttccacttcgaaccgtaacttcgagggccgccaaggcaagggctcgcgcacgcatctggcgtcgccggccgtagccgccgccaccgccatccgcggcacaatctcgtctcccgccgatctctgagtcaatacacgtgagccccctctgacgaggggctgtcagtcgaagactgactgggggagagatccccgaaaggaaaattgttatggaaaaactcaccacactgaccggcgtgggcgtgccgctgcgccgctccaacgtcgataccgaccagatcattcccgctgtgttcttgaagcgcgtgaccaagtccggcttcgatgacgccctgttctacgcatggcgccgagacccgaacttcgtgctcaacaagccggaatacgccggtaagggccagattctggtcgccggccccgaattcggcatcggctcctcccgcgagcacgccgtgtgggcgctgcacgattacggtttccgcgtggtcatcgcgccgagcttcgccgacatcttctacggcaacaccgccaagaacggcgtgctggccgcgattatgccgcaggagtccgtcgaactcctgtggaagctactggaggaagagcctggtcgtgagatgactgtctcgctggagacccgcactgtcacttgcggcgacgtgaccctgccgttcgaggtcaacgattacgtgcgttggcgtctgatgaacggctacgacgatatcgatctgacgctgcagcacgaggacgacatcgccgcctacgaaaagatgcgcgccgaaaagttccccttcaagcccaagaccatccccgccaaacactgggccgaagaaagaatcgagtccgcccgcgagcctgaggacgcagactggacagggccgttggccgatcgcggcattatttagccgcgatcggcctgctgaaagcccggtgggctttcagcaggccctgtgccgagctgcgacagcagcgaggccagcattgagcctcgccgaaaggcgagtccataattgcaggcccagggccgttggctctgtgtctgattgagattattgggtcgcttgcatcgcatcaaacaaaggtctcactggtgcccgcgccccacatccattgcgcggcgggcaggagttgcggcaatattcccttcagtgccaacaacgccatacggtcgttatccaccgcagccaccaacaccggcgtggcggcgctttcctcaacactcatgaactccgtcctagcgttcgaaatactgtgcctgaattcgtacacatttgtggacataatcacgattcatccagtaatgacggttaggttgagcatcatgaccatgaatgacatgaatccgtcgaacgattccgatacggctccggcgcaatcgctgtcagcgcaaccgttgccacctcgaccggcaccgcagtctgcggcacagtcacagacgccgatgccacagacgccacagtatgttcagcctgggccgagcatgcagccgcaatatgcgggtcagccggaggcatgggcacaaccgctacctccacaagatgtttcacggggtgttccacggattgtttcacaaggtgtttcacaacctgtgccgcaagccgcaatacctgctgtgcagcctgcacaatacgccgcgcagctcgtatacccgacatatcccgtccaacctacgtatcctgcccagccgatgtatcccacgcagccgacgtatccggcgcaatccgcctattccccatacccggcgcaacagtcggctccacagcccctcgctcatccgtactacgctcaaccagtgggctacgcgccacaaccctattccgctgcgccgcaaccattcgtgcaaacggctccggcaatgccagtcacaatgcccaacgcaatgcccaacgcaatgcctgccacgatgcccgcagcaatgcccgtggtcatgccgatcgatcctcgccgtgtatggcgcacgtggcgtcgcaaggtggtcaatcgtgtaatgggactgactctcgcctatgaaggcatgatgctcttgggcgcaatggtcgccaccattatcgtcggcgtaataaccgcgagcgatttgtccggcgtgcagtgggatggcatcatcagcctgatatcggtgttcgtcgcgttcggatttctgctgctcatgcgccaccgtgacatcttcacctgcgaattctggcttggtggccagcatcgcgactcgtacggggagcccaatcagcttggccacatcagccaatatggcggcgggcgcatgcagcctctctgggcgttgatgttcatcgtgctgggcatgggcgtgcaaggcatcgttatgttggtgcaggtcgctttttccatgctgggcaccgatcttgcctctcccacgtcagacagcatcgccgaatccagcgtcaccgtaagcatgtggctgtacgttgggctggtcgctccgatttgcgaggaagtactgttccgcggcgtactgatgaaggagctcaagccgttgggcaagaacttcgccatcgtcacctcggcaatggtgttcggcctgttccatgacgacgtagtgcaaggcacattcgcgttcctctttggcctgattctgggattcgtggccatggaatactcgttggtttggtcgattgcactgcacatcttcaacaatgcgattctttccggcgccatcgatacccttgccggcaactatcttgatgacaacgcatatttgatattctcattgtcgctatctgtgatcggcgtgatcggatcgattatcatattcgtgatatacggcaaagagatgcgccaatatcaccgtacgaatcgtagtattccagacacgtactttggctgggcagctccgacgttcatcatctttgtggtagccaatgccgttttcgccattatttcgtttgtcggcgcgatgatgggttgagtgtgcgtgtgcgcatgcaggttggcttatcgttgaagcatgagtgattttgagccgttttacgatgtcagccgcagttacgaagacaactatgagcaagggccgttcggcgcgttcgccgaggcgctgaaggatggcaacggtgccgatgccgccggaaccaccagcgagggtgccttggccacctttttgggccagccggtcaacctgcctttcggcattcccgcaggcccgctgctcaacagccgtttcaccacggccgctttccacatgggtttcgatctggcgacctacaaaaccgtgcgttcgcgcgcctggggctgcaacccgttcccgaacgtgctcgccgtacaccccaagtcggcggacggttcactgacgccgggcagcgccgaactggacgaaggcgtgctggccgacaccaactatgaacagccgatttccatctccaacagcttcggtgtgccctcgcagagccctgacgtctggcagccggacatgcgcgccgccatcgaggccgccggtcccggtcaagtgctggtcccgagcttccaaggctcgcgtgtggagggcatgagcgaggaggaatacatcgccgaccatgccactaccgcccgcctggtcaaggagaccggtgccaagctcatggtgatgaacaccagctgccccaacgagggccacaaccgcctgctatgccacaatccgctgctcgtgggccgcatcaccgaggccgtgaagcaggagatcggcgacatcccgctgatggtcaagctcgcctacatccccagcgacgacgctctggagcttatggtgcgttccaccgtgggccacggcaccgtgcagggcttcagcaccatcaatacgatttccgccaaactggtcgatgccaatggcaatcaggccctgcccggcgcgggccgcgatcgctcaggcgtgtgcggcaatgcgattcgtggcgccggcctcgacatggtcgcccgtctggccgcgattcgtgaaaagctcgggctcgatttcgcgatcaacggcgtcggcggcgtggtctcgcccgccgactaccaggcgtaccgtgacgccggcgcggactcggtgatgtccgccaccggcgcgatgtgggacgccgaactggcccacaagatcaaggccagccggtaaatcggctccaaaaacaagcaacagcctgtacgggccgtgattcccagacgattcccagacagtgcccatgttgcattgaaactgttgctgttatatgtaatcacggccgaacaagctgcataacttaacctctttcttcttctctcctttctctccccggcgcccatcacgccggggtttcttttttgcggtgggtacagccgtcttactcggccgccgccttcatggccacggctccgacgtagtagaccggcttgtcgaagttcggctggaacaggaagtccacgttggcgagctggtcgatggtgaagccggcctgaatcgccatggaaatcacgtttgccgcgccggagatatcggccttggaacagaactggccgcccttgaccttgcgggtttccgggtcccaggtcagaatcgacgtgactggggtggtggtgagcatgaagtccgggcgataatcctcggtgagcgaggtctcgcggaccgtgagcccgcggcgttcggcaccggcgcgggtcaggccggaggcggcgagcgagagatcgtacagctgcacggcggacgtggcctgcgtgcccatgtacttcacggtcggcgtctcgatgttgcggcccaccagcaggccctggcgcaccgcgttggtggccagcggaatgtaatcgtgctggccggtggggttgtagaacacggtggcggagtcgccggcggcgtacacgcccggcgcggacgcctgcatgtagtcgtcgaccacgatcgcgccgttcggcagcatgtccaccttgcccttgagcaggtcggtgttcggcaggaagccgacggccagaatcgccatctcggccgtgtactcgcccttttcggtgaccacagtgacggtgtcgtcgtcattgtcgcggaactcgaccaccttctggccgagcgcgagcgtgacgccgtgctcctcgaacgcggccgccacctgatcggtgatggtcttatcgaaattattggccagcgggcgatcaaggccgtcgaccagcgtggtcttgacgccggtgacgctgaactgctcggcgatttccgcgccgatatagcccgacccgatcaccactgccgacttggcggttttcgccttttccttgatggcgatggcgtgatcccagttcttgcacagcagcacatgcgggctgtcgatgccggggatcggcgggatgaccgggcgcgagccggtggtcacgaccaatttgtcgaaagcgagggtctgttcggcggggtctccggcctcgtccagcgcgcggtaggtgagggttctggcgtcgaggtccacggacgtcacgtcggtgcgcatatgcatggtcgcaccggcttcggccagagcggcaggggaggagtagaacattttcttcgggtcggatacgtggtcgcccacccacagggcgatgccgcaggagaggaaggacagcgtaccgttgcgctcgaaaacatggacggtccaatcggggtgctcggcgagaatcgaggtggtggcgaacgtgccggcgtgcgtgcagccgatgacggcgactgtggtcatgaatgctcctttgcttgtggccatggcgtctgatgccattgccctgaatcgtagcgtagaagtatggagaacgccgcggcggcaaatgtgaggaagatcacgttatcggtttgattcgacggggggtatgggatccgttgtgcacggtgatcaaagttcggctggggtgcatttcacggagtcggcacatggcttatggcaaactggacggtagcattttttgaatcttgattgattgaggagagtggcgtggctgagaatccggatgacgtgttgcatgtcgagggcggcaagcctttgaatggcacgatcaaggtgcgtggcgcgaagaacttcgtgagcaaggcgatggtcgccgcgttgctggcaccgggcaagtcggtgctgaagaacgtgccggagattcgtgacgtgcatgtggtgtccgatttgctacgtctgcacggcgtggacgtggatgtggacggtgcgaacggcattgtgaccatcgacgcctcgcgtgtgcagctggccgatgtggccgacgtggatacactgtccggttcgtcgcgcatcccgatcctgttctccggcccgctcgtgcaccgtttgggtgaagcgttcattcccgcgttgggcggctgcgcgattggcggacgtccgattgacttccatctggagacgctgcgcaagctgggcgccacggtggacaaggaacacaaggacggcatccacatcaccgcgcccaacggcctgcacggcgcgaagatccacctgccctacccgtcggtgggcgccaccgagcagactttactggcggccgtgctggccgagggcaagaccgaactgtcgggcgcggccactgagccggagatcatggatctggtgtgcgtgctgcagaagatgggcgcaatcatttctgtggacgttgatcgcaccttccgcatcgagggtgtcaaggaactgcaggggtacacgcacacgtcgctgacggatcgcatcgaggcggcgtcctgggcgtccgccgcgctcgccacgcacggtgacattttcgtcaagggtgccacccagccggagatgatcacgttcctcaacgtgttccgcaaggtgggcggcaaattcgaggtgacggacaagggcattcgtttctggcatccgggcggggacttgaagcccgtggcgatcgagacggacgtgcatcccgggttcatgaccgactggcagcagccgctcgtggtggccctgacccaggccaacggcctgtcgatcgtgcacgagaccgtgtacgagaaccgtttcggcttcaccaagccgctggtcgagatgggtgccaccatccagttgtaccgcgagtgcctgggctcgctgccgtgccgtttccggcagcgcaactacaagcattccgccgtgatcttcggaccgaccccgctaaccggacgcgacatcgacgtgccggacctgcgtggtgggttcagccatctgatcgcggccttggccgcgtcaggcccctcggacgtgcacggcatcagcctgatcgaccgaggctacgccgacttccgcggcaaactcgaagccctcggcgccgacttcgactaattcggccgttccgcggctcccctctttgaggggagccgcgattttgttctacaacagcccgtccgcctcgagcgcggcggccatgcggtcgaagcattcctccagtagcgggtagggcatggcgaagttcatgcgtacgcatccatgcccgacctcgccgcattcgcggccgtccgtcaacgccacattggctttcttgaagaaatagtcggccgggtcgtcaatgcccagtggcgagaaatccagccacgcgatatacgtgccctgcggctccacatagcgcaccttggcgaatctcgtgcgcatctgctcgttgaccagcgcgatattgcgctcgatgtacgccatcacgccctcgaaccatgccgcgccgccgtcataggccgcagtggtggctatggcaccgatggtggccgtctggtgctcggaccattccgcgttcctcatccatagttccagatcgtccggattggtgagaatcacctgcgcgcacttggtgccgggaatattgaacgacttcgaggctgaagtggaggtgaaagcctgcatggccgtctgccggttgattgaggcgaatggcacatgcgtgtggccttggtagacgaacggcgcgtgaatctcatcggagaatatacgcacgtcgtacttggcggccaggtcggacaatcgcagcatttcttcgcgcgtcaataccttgccgatcgggttgtgcgggttgcacagcacgaaggcatggcagccgttcgcgaacgcctgctcaatggcgtcgaaatcgaacagccattcatcattgcgcccgctgctctcgccggcgccctcgcacagcatcggaatctcaaggacctctacgccatacaggcgcggcacgctcaggaacggcatataggccggagtcggcaccacgatggagttgccggcgcgcacgatctcgcgcaggaacacttcgaacgcctccagcacgtccggcaccggacggatgcacgtcggatccacatcccagccgtatcgacgctgccatgcggcgcacgagcgggcgacctccttcttccacgggtcgggaatgtagccgagcgcgccacgttcggtggcctcttcgatggcttcggccacgcacggcgccagaccgtaatccatctcggcgatgaatgcgccgatgcagccggggtagcgggtccatttgtccgaaccgacctgcttcagatcttcgatggtcgtcacgtcgatgtgattggcatcaaagcaagaggcaccggcggttgcgctgctcaaagtcgttgactgggaaatgttgttcatgctcataacatgtcattgttcccggtgcagaagggctgctcaacggtctggctccccgaaatcgtgatggcgttcgcaagcttgcttatcgctgtccggctacttggcactcaaatatttgagtgacgtgcgctcgagctcttcgagcaatgaaccgagcgcgggacgatggtcgccggcacgagtcacgatgccgacctcgcgcgccgcaaaatcgtcggcgatgggacaggccaccagatcgccttgcagattgatatgtgtatcgagcgccggcaccagcgagacgcccatgccaacctcgaccaggttctgcgtggcccagtaatcatccgtgcagtggcggatatccggcttgaatccggcacgggtggccagtttcaccaaatttgcgcggcaggtggggcagccggcgatccaatgctcgtctttggcggcggacagcggcacgggttcgccggtctcctcgaatcgtttggcgatgtcgctggagcggcggaccaacaatcgcatcggatcgtaacccagcgactggaaggtcagatcgtcgccgatgtgcaggaagttcgggatgctgctgtaccggaacacggcggcggcatcggccttgccttgggaaatcagaccgatcgcctccggcggctccatctgaatcaggctcagctcgatgtccgtgaacatactgagcttgaccacggtacgggccgcgatagtagagcagattgacggtggggccaccaaatgcaggtgagcaaaccgatgatgccgataatcctcgacctcacgggccgcccgctccagccgatcggcgatggcctcgccgtggcgggcgagcatcgaaccggtggcggtgagttccacaccatgcgaggtgcgttgcaccagagtcgaaccgcactgtgcctccagctttttgatctgctggctgatggccggctgcgaccaacccgtggccttggccgtggcggagaacgaaccatactgttcgatctgccacaacgtgaccaatgattgggggttgagcccggccatatgcacctctttcgcgcgtcgttccattatggccgccgacaatgaccggacgcggcatggtgtcgccatcgccggtatccttagaagaatgagccctgaagccttaagtgaactgatttccagcattgcccacaacctcgtcgccgccggccaggccggcgcgttgaccgacgagctgattccgcccgtcgacaagctcgccgtgatgcgcccgaaggaccgcgcgcatggcgactgggcctccaacatcgccatgcagctggccaagaaggccggcatgaagccgcgcgatctggccgagccgttcgccgccgcgctcgccgaagccgacggcatcgccaaggtcgaggtggcaggccccggcttcatcaacatcacgctcgactccgcctcggccgccgccgtggtggacaccgtactcgccgccggtgccgtgaccgacaccgacaagcatctcaacaaggtcaacgagtacggccgcaacgcccatctgggcggccagaccctgaacctcgagttcgtttccgccaaccccactggtccgattcacatcggcggcacccgttgggccgcggtgggcgacgccatggcccgcgtgcttgaggccaacggtgccaaggtggtgcgcgaatactacttcaacgaccacggcgagcagatcaaccgcttcgccaagtcactggtcgccgcctgggccgaggccaacaagcttggcggcgccggttaccagaccgaaaccccgtgcgacggctacaagggcgcctatatcaacgagatcgccgcccgcgtcgaagccgaagccaaggccgacggcgtgaacctgaccgcgttggcccaccgggatcagggcctgaacgatgacggtgaaccgctcggcgaggacgacaccgaagtgcgcgaggaattccgcaagcgcgcagtgccgatgatgttcgacgagattcagaagtccatgaaggacttccgcgtgaacttcgacgtctggttccacgagaacagcctctacgccgacaagaaggtcgaagccgccatcgaagagctcaagtcccgcggcgacatcttcgacaaggacggcgccacttggtttgaatccaccaagcacggcgacgacaaggaccgtgtgatcatcaagtccaatggtgagttcgcctacttcgccgccgacatcgcctactactgggacaagcgccatcgcgccgaaaacccggctgacgtggccatctacatgcttggcgccgaccaccacggctacatcggccgcatgatggccatgtgcgcggccttcggcgacgagcccggcaagaacatgcagattctcatcggccagctggtcaacgtgatgaaggacggcaagcccgtgcgcatgtccaagcgcgccggcaacgtcgtgaccatcgacgatctggtctccgtggtcggcgtggacgccgcccgctactcgctggcccgctccgactacaaccagaacttcgacatcgacctggccctgctcgcctcgcacaccaacgacaacccggtgtactacgtgcagtacgcgcacgcccgctccaagaacgtggaccgcaacgcagccgccgccggcatcagctacgagggtgccgacctggccctgctcgacaccgaggccgacggcgaggtacttgccgccctcgcccagttcccgagcgtgctcgccactgcggccgacgaccgccagccgcacaaggtggcccgttatctcgaagagctggccgccacctatcacaagtggtacaacgtggagcgcgtggtgccgatggccctgaccgatccggaaacccgtggcgacgatgaggctcgcaaggccttggagatcgccaagaatccggagccggcccgtgccgccgcccgcctgaagctcaatgacgccgtccagcaggtcatcgccaacggcctcgacctcctcggcgtcaccgcccccgagaagatgtgattatgcccatttctccaatttggccggccgctacggctgtgaatgccgaaggctccatcgaatttcatggtcgtaccgccgaatcgctgcttgacgagttcggctcgccgctctatctcatcgacactgatgaagtagtcgcacgtgccaggcacttcgtgcgcgctgccgccgaagcattcaacacatccactacgcacgtgagctttgccggtaaggcgttcctgtccaaagaaatcgtgcgattggtcaccgaggccggcatgttcgtggacacctgcacgatgggcgagatgaaaatcgccctcgccgctggcgttcccggacgtcgtctggtactgcacggcaacaacaagtccgatgaggaaatcgcgctggccatcgaacagggcttcgccaaaatcgtgattgacgagcccgacgagccggagcgcgtcgccgccatcgcccgcaagctcggcaaacgcgcccgtgtgatgctgcgcgtcaccgtcggtgtccacgccggcggccacgagtacatctccactgctcacgaggaccagaagttcggcgtgccgctgctggccgccggggccgacgccgccgtgctcgacgtgctgaacgccctcaaagacgtgacgcctgccgctaccaacgcgcgtatctctgcgacgcattccccggaaaatggcgcggaaaagaccgagaaatcagagcgcgagctgcactacgacgtcaagtacccgtacgacctgagccacgaggaagtctccgacacagacaaggcgctggccgccgcgatggaagccattgcggacggtccatccatcgccgtgctcaagaccatcctcgccaaccaggacgtactcgaactggtcggagcccactcgcacatcggctccaacatccacgatgcggacgccttcattcacgcggccaagcgcatgatgctgctgcgcaagaccctgtgggccaccgacgcctacatcctgcccgaaatcgacctcggcggcggctactccgtggcctacaccgatggcgaagattcaatggacattgacgtggaactcactcgcttggcggatgcggtcaacagcaccaaccgtgcgctcggcatgcccgccccggccatcagcttcgagccgggccgttacatcgtggcgcccgccggcgtaaccctgtaccgcgtgggcgccatcaagcacgtgcacttgtccgatgccaaagacagtgccggcaacccgattgccgagcgcgtgtacgtgtccgtggatggcggcatgtccgacaacattcgcccggcactctacggtgccgactacaccgcgcgtctggcgaatcgcaccggttccgctgaaacgatgcttgcccgcgtgtgtggcatgcactgcgaatccggcgacattgtggttcacgaggtgcagttgcccgccgatttgaagcgcggtgacattctcgccgtgccggttaccggcgcatacggccgcaccatggccagcaactacaaccaggcgctgattccggcggtggttgctgtcagcgagtccggcgcgcacgtcatgctccgccgccagaccgtagacgacctactcaacctcgacgtcagcgagtaatcagcgtgcagaggtgagcgcctgacagtctgtaatgtgcggccaaaaccgtcataatacgaaaagggccgtcagcttgatgagtactttcggtctgctgtcggaaataatccgtaaaataggcgtgggatatagaaaactttttggaaggaccctgaattggctcacaacagcgaaaccccgattcgcgtaggcctgcttggtgccggcaccgtcggctcccagaccgcccgcctgattgtcgagcagaaggacgaactgtccgctcgtatcggccgcccgatcgaactgaccggcgtcgcctgcctcgacccgaaggaaaccgagaagttcccgtggatcgaccagtccatcgtcaccaccgatactttgagcgtggccaccaactcggacatcgtcatcgagctcatcggcggcaccaccgtggcccgcaagttcgtgcttgccgccatcgaatccggtgcttccgtggtcaccgccaacaaggcgctgctggccaagtacggcccggagatctactccgccgccgaggccaagggcgtcgacatctacttcgaggccgctgtaggtggtgcgattccgttcctgcgcccgctgcgcgagtccctggtcggcgacaaggtgaccagcatgctcggcatcgtcaacggcaccaccaactacattctcgacgagatgaccaccaagggtctccagttcgacgacgtgctcaaggacgcccaggccaagggctacgccgaagccgacccgaccggcgacatcgaaggttacgatgctgccaacaaggccgccatcatggccaccctcggcttccacacctccgtgaccatcgacgacgtgtccgtcgaaggcatcaccaagatcaccgccgacgacatcgccgccgccaccgccgagcacaaggtcatcaagctgctcgccgtggtcgagaacggcgaggccggcgtctccgcccgcgtctacccggccctgatcgacgagaaccacccgctggcctccgtgcacggctccttcaacgccgtgttcgtcaaggccgaggccgccgacgacctcatgttctacggccgtggcgccggcggcgctccgaccgcctccgccgtcgtgggcgacgtggtgaccgaagcccgccacattgctgctggctgcaccggcccgtccatcccgctgtacaagaatctgccgaaggctccgattaccgcctccaaggctgcattcgccgtgcgcttcctgatccacgacaagccgggcgtgctggccgccatcgccgccgagttcgccaagaacggtgtctccatcaacggtgtgaaccaggatctgaagcccaccatgaccgaccccggctacgacggcgagattcagcagttgcgcatcgtgacccacctgaccgacgaggaaaccctgcgcaacaccgtcaaggccgtgcaggcgctcgacttcgtcaccggtgacccgtccatcctgcgcgtgctggactgacaccgtctaggctccctctgatgaggcggtcgaacagctgcccgtgagttgaaagctgaatacccaagctcccctgacaaggggagctcctttttaaggaacaaccatgaacccaatctgcaatagcgttcacgtgcgcgtgcccgccacgtccgccaacctcggctccggcttcgataccgtgggtctggcgctcgactaccatgacgagctcactttcacgctcaacgacgacccgaacgacggcattgcccacgtgatcatccacggcgagggtgccgacaccctcccacgcgacgaaacccacctcgtggtctccaccttccgccgtgcctgtgccacgttcggcctcggccgactcggcttcacgctggaagcgaccaacaacatccctcaggctcgtggcatgggctcttccgccgaggccatcgtggccggcatcgccgccgccgcggccttcgcccagaccggtgacctcaaccgtccggccatcttcgatatggccgcccagatcgaaggccacccggacaatgtggccccggctgtgttcggtggcctgaccgtctcttgggacttcgaaaccgcggaaggcgtcggctcggtcgccgttcctggtggtgaaccgctgcacggcggattccacgccgtcaactacccggtggacccgtccatcaccgccgccgtgttcgtgcccgactatgagctgtccactgagaaggcccgtcaggcgctgcctagggaactgccatacaaggacgccgtctacaacgtgtctcgcgtgggtctgctgcccgctgcgatgaatcccatggtgctggcccaggccgcccagcagggcaagtccggcgtcgccgctgccccggctcaggatgccgatacgtgcgcttgcgctggcagaacccgtgaatcgccgttcgctgacgagcttgcggccgctcaggcccagtccaacgcgctactgttcaccgccacgcaggacaagttgcaccagccgtatcgcggtaccctgatgccgccgtccaccgagctcattgcgctcttccgctccaagggctatgccgccgccgtctccggtgccggcccctgcgtgctcgtgctgcactacggcaacgcccgcgaagccatcgaccagatcgcatcggagcagcttgcttccggccactggcgtgtgcttcacctgcccatcaacaccgccggcgtcgaaatcgagcgtcgctaagtcgaggagaaggctcccgctggcgggagctggccgccgcaggcggtctgagagtggtccgccataccggcagagaccaccctcagtctcacttcgttcgacagctcccgccagcgggagcataaggacttaagtcatgtccattccgctaattcttgcttccaagtccaagcctcgccgtgacgtgctgtattcggcgggtatctgccccacaattcgcgtctcgcacgtggatgagcctgctgcgctggaagcggccgcccgtgaggaaggtgtcaccgtcgacgatttgagcatcaagcagcgtgtgatgattcttgccgcagccaaggccgaggccgttcaccgtgcgtatcgcgatgtggccgatactgccgccgccgcaaccggcgatcgcgtgattgcctacccgctcaaggccaaggaaatcaaggattcggaacgcgaagccgtcgtcgaagacctgcgcaaagccgccgctggccggcccatcgactattccaaggcggaagtcgccaccacgcgcgacttctccggcatcgacatgccgaccatcaccgaacccatcgccaccgctattgccggacagccgggactgaccgaggcgacggtcggcccgctgattctcggctgtgattcgatgttcctcctggacggcgaatgctacggcaagccgcacagcgaagccgtggcccgcgaacgactgaagcgcatgagcggcgcgaccggtgaactctggaccggccactgcctgatcgatttcgcgaccggacgtaccgtgcgcggcgcaagccatgccaaagtccatttcggcgaattcaccgatgacgacatcgaacggtacatcgtcaccggcgagccgctggaagtcgccggatcgttcacgctggaaggcttcggcggcgcgttcatcgacagcattgagggcgatccgcacggcatcatcggcctcagcctgccgttggcccggcatctggccggcgaactgggcatcacgtggaccgacctgtggaatgtcggccgtggcgaactggagccggaaagcaaggcctcgggcaaccagcacgctggcattctgccgccggtcgaaaacgtgcatcagcccggcgatggctgggtggactgcgcctgcggccgcaagcattggggcaccaacggtgcgtccggcattctgctggctcgccgcgacccggcgagcggcaaggtgactcacgtggtcatgcagcaccgtgccgcgtggagcgccgaaggtggcacgtggggtatccccggcggtgccactgcggacggcgaatcgtccatcgaaggcgcgctgcgcgaaagctacgaggaagccaacatcacccccgaagacatcgaggtggtcggctcctaccgcgaggaccatggcccgtgggcctacaccaccgtgtttgcctttgaaaagcccggccacaccgtcgagcccaaggcaaacgacgacgaaagcatggaaatctgctgggtcccgattgacgacgtgcccaaccgcaagctcctcaccgctatgaagaccgactggccccgcttcgccgcccgcctggacgagctggcctgtgctggacatcggtagtggtgttggctgggccaatgttttgccgatgagttcacttgggtaatgccgtgtggaccgcgtgtggaccgggacggattctgctgtcccggttcgtcatttcgtctcttttgggacaaccgggacagatttcgctgtcccggttcgtcattttgcctctttttgggcaaccgggacagaatctcattcacctgacgccctatcgtgcgatggtcgccgtcggggaatggcggaattccggggttttggatttgcatatatcgggtgttcatggaagggcctgtcccggttcgccaaaagaggccgaaatcccgaaccgggacagccgaatctgtcccggttcgtatgtcgatcgattgaccccgccaccgggacatcaaccgcgcatagacaggacgcttcaatgcctggcgggcatgaccatatcggatgacacacgttccctcgtgcgtttcgccacgacctccgccccaagtcagtgcgaaaatggcatttttagcggtgtggtcagctgtcgcatgcggaaaatcctaaatcaaccgccgaagagatacatcgccgactcggcggaactcgctggtctgcgcgcaatgaggagtgttgtgtctgaatgcgattcagacaatggtcggcgtcaaatagcggtctccagccattaatcattggtgattgtggacattgagcggagtgaacattctagatgattcagggatatgccgaaaatcatatcgttcagagaatgaaataccgcatctcggagtgactgactgtcggcgtgcatggtttgaaatctgatatccacgcccatcatgcctagcaaaattacgggaatggggttcggactatttcgcctcagccaactgggcttccgaatgctcaatgctgtatgcacttagtgtgtggaaaccagccaatcattgaccaatggcaggccgcagtcgaaaccagaaatatcctcgctcgcagtcaggtgccgaggctcagtgaagttggtcacgtccatatgggatcacgctccaacaattcattcagacgtaggcccataggttcgtttaatgctgcggtgaaatcattccacgctttactgttgagccgaatgatatgagcttcatggatgtcccgatctgcggcggcgagcagattcgataatgcccattgcaacgaagtcatgcctttggactcggccgcttggtcgattctggaacgttgctcttaggtgagtctcatttcaaaacgactgttcttgttattctctgtagtcatactcctgttgtacgacttttgtacggacacgattggtgtgtgcgggatgtcgattgcgatggccatgtgggctcctttgcttggtctgttgtggttccagcttccgaaccggtcttccactgttcctcgtcttctcgagcaatgaacatctgatatatggattgtcgcgtcgactgcgtatctctaatccttgcggatgaggagcgggccggtgatccagaaaggttcataccgcagcccgatggtcggctgggcgttcgctccgtacgctcgggagtatgaacacagcagcatcgcaattgcagcagcctcagccggcgtcgggaccggcggctcagcctcagcagtctcagcaaccccaacagttccagcagccggcatcgcacacccagcagtgggccccggtcatcgaggcgcacgacctggtcatggactacaccgccagcatggcccgcgcacaggcagggcacggcgtcaccggcgtgatgccagccggcacgggagccggttatgcgtcggcgaatcccgctgcggccggaccgggtgccattcaggccggccagccatcccagccagcccagcccggcttcgccatgccgaccatgcacacgctcgccctgaaccacgtgaacttcacgctccgggagggtgagacagtagccgtgatgggcccgtccggctccggcaaatccactttgcttcacgcgttggccggcattatcaagccgactgccggcac

SEQ ID NO: 8 - DNA, 5671 bp, Unknown
  R30_18m  MAG No. k141_1953
cgcgccttcgaggacgacgacatcgtccacgtcaacggcaaggtggatccggccgacgacatcgacaccatcaacaccgagctgatcctcgccgacctgcagaccatcgaaaacgcgctgcccaagctggagaaggatctgaggggcaagaagatcgagccggcctacatggacgcagtcaagcaggcaaagaccatccttgaagccggcgagacgctcgacaaggccgcacgcgaaggccgcttcgacaaggattccgtctacgacctgcatctgatgaccgccaagccgttcatctacgtgttcaacgtggacgacaacgagctggccaacaaggacctgcaggctaagctcgccgcatccgtggccccggctccggccgtgttcctcaacgctcagttcgaggcagacctgaccgagctcgacgaggcggacgcccgcgaaatgctggccgacgctggcttgagcgagtccggtctcgaccaactggcccgcgtgggcttcgacatcctcggactgcagaccttcctgactgcaggcgtcaaggaagtgcgcgcttggcagatccacaagggctggaccgccccgcaggccgccggcgtgattcacaccgacttcgaaaagggcttcatcaaggctgacatcgtctcctacgacgatttcgtggccgccgacggctccatggccaagatcaaggaggaaggcaagctccgtcaggagggccgcgactacgtcatggccgacggagatattgtggagttcaaatttaacgtcagcaagtagttttcctcggctccccttcctgaggggagccgtcgcggaaagcgactgacgggagtgttgcggaaaggtccgagcagtgttggttgcccagacctttcttcatgttacgaacctttatgaacctcgttgagatgagatgtttgcgtctacttttcttaggcttccgcgttctcgtcgactcctgtgacgagaacattcctcaatgatttcgccacctgtattttcagcggacgttttccggtctgtacgaccagccccgcggccaagagctcttccacgtatttccttgcgctctgtttggacagtccgatgtgatgggccacttcgtccaacgacatggatttggacgagtcgaacagctcttcctgaatcacgccatagagcaccgagacggcattgcgcgatagggcatgcctcttttcaagctgtgtacagagtatccgacctttgtcgagctgatcgaccttgatactgagttcgtcaatcagctcatcctgggcttgttggatgaatccgaggatggtgttcacgaagagcgtgagttcgccgcagttcagcttgtcctccgcctccatgaatgctttgtagtaggcgttcttgttctccgcgatggtgcgggacagggatagcacggtgggcatagtcaggtcatggttcaggtacagggccaggagataccggccggtcctgccgttgccgtcgtagaacgggtggacgtattcgaacaggaagtgcgacatgatggccgactgcagccggggaatctcgtcggaggtcgcgagatggatcatatcggtgaggagtgcgccgatgttgccttcgcctttgactccgttatggatcgcgaggccgtgcggcccctgtatttccacatcgcctttccggaacaggtcgccgtccggctgattgctctcatcgatttcgtcgagcacgaccttgtcgtagatgtcgcggatggcggcgatgcctgccggcaacgcggagtccttgtccgtgagattcaggtacaacttggcaaattcgctgaaccgcgccttggagtcgtcgccgtccctccttgccttgtcggccgcgtccacggcgtcctgggtttccttgcgggtgctgcgcacgccttccatctcgttggtggcgaacagttcctcactgatggaatgccgtatgtagtcccagtgcatgacgccgggaatcaggttccagagccgtgatatgcgcctttcggcgagaagtatattttccatgagcagggtcgtctcgcgtggcgtggcggagaacagctcgcccaatggcgtgatgaccccggtcctgaatgtggaatctgcctcaagccgctgccgtgcgagtgccgcatggttattgaaggaatcgactgacctgtcggcatggaacagccttgccaaacttctatacttcatatccatgagagagactcacttcccaaagagcatccttgattatagaaagtataagatagagaaggaaatgagtcaataaacaactataaaatcatggatgatacaaaaatatagttgtgcgcatgactgcatgtgagtgacatatggtagtgcccgaaatgcgtgtcagtagtgaaatacttcatgatctgttgttctttctgaatatgtgatggtatgcaatgggttttgccgcggtgcattgcgttgcgactatgccaagaacgcatactcgtataggtacgtttatggggcatggtgcgaacgagtcggctcgatatcaccggcaatgattcagctatgcgtcaatgagaggtgtactgatcagatggcgtgttcgttcacgccgttgctgctgaatgcgatgtgttgatcatggttcgcgcaccataaggtcttacgtccgaatccgtcaaatcacgcggtgtgtgaaatgcccgttgtatataaaaagtccggtgcaacgcacgatgataatgcgctgcaccggacttactgcagaaacaattgttacagactgtagatctgtgcgccgaacggccagagcgcgagcttggccattttgaacgactggaggccgaacgggatgccgatgatggtgatgcagttgagcacgcctgcacccagatagccgagtgccatccaccagccgaccagcaccacccagaggatattgaccagcgtggagccaacgccgccaccgtattgcacggttttgccgaacggcgtcaaggtaaggcccgccattttgaacgcctgaactcctagtggaataccgataatggtgatgcatagaaacagtccgatcagtgcccagctgatggcgattgccagtccgcccagaatgatccacagaatattgccgatgaccctcatcgtaagttcctcacatttgccggcattgcgccggataccgaatcgaatgctggattccattctattaggcgaacgcgggcgatatgtggggaatcggtgacgggacccctgagcatcccctgaatcgtccctgagccgcatgctcaggcgcctactcgggtgagcattctcgcattcggctgatttctagcgaaaacccttgtgcgggcgggctgtggactatagcatcacgacacatgaccactacatcgcagccttctcaggcatctcagtccaccgccaccaaacccgccgccaaccgcgagctgctcctgacgcagtccgaccgcgaccccaagagctaccgtggcgtggaccgcgaccagcaggtcgtggacatcatctccaaactcaccagtgagaaggccacgattccggcaagctgcgtgcagcgtgacgccgccgacaccggtctggaatccaacagcgccgacgtggggatcggcgaagccatgcttaccatgcagaccgagcgtggcaagcaggcgattatcggcgaggccttccgactgctgcgcgccggcggcacctactcgattcacgaactcggcctgcagccggacaacctggacgaatccgtcaaagatgaggtgcgcaagcccgaagcgtaacagcggtgtgccggcccacgatggccggataatgggaaacaagtaaaagcgatggcgcgtatgtgaggtacgcgcgacgaataggagaacatcatgaccgatgagaacgagcagcagaccgcatgcaaggcaggacgcgacgagcagcattgcaagtgcaggcagcgtagggaagccgccgcggcagccgaggcggctgccgccaacggcgaacaccactgcgcctgcaagcacgagcacgccgagggcgcggccgcggagccgggcgcgaagaaggagtgccactgcaagcatggcgaagtcgcggccgctgcagcgggtgaggccaagcactgcgcctgcaagcacgacgcccacgacgccgaaggccacgccatttcgaccgagccgcatcttggattcatcgaagacttggcctcgttgatcgatattcaggaggaggccactgtctcccgtacggtgctgcgcgaggacggcctgcgcgccgtgctgttcggcttcgacaaggaccaggcactgagcgagcacaccgcggccatgcccgtgaccatccaggtgctggaaggcaagctgcgcgtcggcggcgaaggccgtgaagtcgagcttacggccggcggcatcgtctacctgagcgcccgtctgccgcacaccgtctatgccgtcgaacccagcaagatgctgctgcagatgttcgacaaccgcggctgattcggtgaatgactggcaatcacgtatgagaagctgattgccgttagaccattcataatggcttccttcatatggtgttggtcgtatgaccgtaatatgaaggaagccatttcttagacgttggggagagcttgaattcgacgccatcatcatacggcctcaagggtgcataaacgatgtcacaagtagacgcacgcccgccagccatcccaaacgtcacagcaaacctagaacccgcatgagctgacggccgatattcgccatggctgcatcatcaaccacgccgacttggtatcccagcagtttgcggtcgacggtgacgatcttgtccgtcatcacgtaactcactttgttcaggccgttctccggacttggttccaatcggacccgcgtgtcgatgtcggaggaatcgtatgaggtcagcagacaagtgatgacggaatcgaaccgatcgacggcatcgctctgcacgatgacaaccggccgcggcttgctggcgtagccatcggcctgcaacgtccaaatctcacctcgtttcatcggacatcctcaaggcgagacgactggcatactcagtagcgtcccgctcggacgcaaacggctccacgtcatttcgtggcaaacgcacctcataggggaacccacggtaatcattgaacgcgctgatgaacatacgcagggcatcggccggggtggtacccagctgtcgggtcgtctccttaaacaacgcagcctgctcgtcatcaactcgcgtggcaatctgcatgctcatagccactccttattgctatttactatctttttgcaccaaattgtatcaaatacttgacttcagagtgaagcccccgcgttccaaggcccttgtctatactgtagacagttgttcttcatatgtgaatcgcccgatatgactttggagcgggcttgattggaggggccggatatgacgagttacgtgctgcggctctatgatgatccgctgctccggttcgatgcgtcgtatggcgagggcctgctggcgggcaagatcgaggcgcatgtccgctggttcgatgagtcgaagcgcgcgttgctgccgtttccgttggctccggagccggataatgcgaagctgacgacgtggctggagcggcgcacgattccgaagaatcgtgagttcgccacgcaggttctcgcgcaggcggggttgaacattgcgga

SEQ ID NO: 9 - DNA, 25900 bp, Unknown
  R30_18m  MAG No. k141_2142
ccgcagtacggccagccggagaccccggccccgcagtacggccagcccgacgctcaggccccacagtacggccaggttccgccgattcccgaaaacgttgatgatgggtccaccgtgctgtctccgcacacggctcccaccgatgacaacgcacagaaaccctggcaaggccagtgactgacgccggcgaagttcgcttaagaagttcgcctcatcactcatgaagcccaacaatgaggccccactcatcaagcggcggtagtattccccgccgttcagtaagccaatgccctgtgtactggatcattccagcacacagggcattgtgcgttcttgcggcccctctcttcgcgcaacattccccggaatgcgttacggtggaggatggacgctgcgccgagctactcctacaagctgcctacggagagcgtttgggagatcacatgggattctcccgggcccagcgtcacgatgcggtcgcggcataccgccgcttcaaccgccacgaaaccgcgccattcgcccggcttggtgtagctcatattgtcgccgtccgctcccggattccacaccacggtttgcggcgacccggtacggctgatatgaatcgcacgccccaacatgtcatcgcgcagttccagacgcgcatccgagtaatacacacgattcaccggctgctcgccaaacgtcaccacttgcgcgtcctgtgttttcggcggaaacccttcttcggtggcatccagatacgtcgctccctgcaatccgaccagctgagcaccggacacatcgccgacatgcagataggaatgcaacgcggcctcgtacgacataggcgccgtgccggtgttggtcacggtcaggctcatggtcagcgcattgcccgtttgcacgtcatacacggcatgaaactgagcacccggctcgtcatcgaaccaaggcacttcattgtcgttcagctgctgcgaatccaacacataccgtatgtggctgtcgtcgaatgaaccctcgtccaacgcccaccgacgcagacgtgcaaaaccgtgggatggattgagtgccagctgcttgccatgcgcaaaacccggaccgaaccacgggaagcagatcggcactcccccgccgagcgacttaccggcctcgatatgccacgtactcggcgtccacaccacatccgcctgcccggccggggcccagcgcaacagatgcgctccgtaatcgctgattaccacgctgccgccattgttggcgagcatacgcaaatcgacaccattgcccataagtttcccattcccattgtgcgaacgatacttttcactaaataggatacttccttaacaaaaaagaatcgcaaagtatggccgcaggatgcacaaaggccgtacacacaccatatacgatgtgcgacgcggccttgtgctctgtggtccaatgaactcgttgcttttgagcgatgccctaagggctacagatgcgtttctcgctgccagagagcgatctgccgctgctgggttcctgctacgtcgattcagtgcgcaccaaccatccctatggcgtgcgtaaggcggcggtgcgcttcctgcaacacggtcacacccgtgtgggcgcggcgttcaccgatacaccgacttcggagctgattcaggatggctggaagcaaatcgtgacggaaagcgacgccatcgaatgcccgttcaccatcaccggcattcagccgtacaacaccagggacgtcaaccaaatcgtggacaccattctggattcgggcgtgacggccatgctggtgcactccgattatctggcgatctccatcgcgcagaccctggagcgccgcggcaagcgcgtaccggacgatatctcgatgatctccgtcaacggctttgccacgcccagctcccgcccgctgaccgtactgcgctcgtccgataaggatctggccgaggcggccatcaacctgctgatcaaccgcatccaaaacccggattctacaacccgccacatctacgtggacccgacgctgaccgatcgcggctcggtaatcgataagcagtaaccccacctccctctgacgagggaggtggcatcgcaaagcgatgacggagggagaggcaccaggcctctaaccgttacgagcgaagcatcggccagagcaacgcccttactctttacaactccacggtctctttgccgggatcatccttgacatgcgcgaacttggcggccagagcctccttattgcgcttttcgtcttcttccttggcctgacgcttagcctcgtccgggttccagagcacatcctcacggtgcttgttccattcggcaacggccagaggagcgatgtattcggcggtggcggtcagggtgtctgcgtcggcggctttggcacgggcattaagcaacccgaggatctgctcgtcggtcaggcagatgcgcggcaccgagcactgctcgcgcagttcgttgacgtagagcagaatcggcagaatcttggcggcagcattggcgacactgtccactgaaccatcggccacagcatcaccggacacctcacccaataacgcatcgcacacggcgagcgcggtggcgaaccgaacagccacatcggcgggcttggcagacgtggccagacgaccatcggcttcagcgtcggcctcgacctgggcttccatggccgcgaccgcctccctcaccgattccgccgtcgcggaatcccagtcgattcccaacacgtcggccgcctcaacgatcagcctggcatcaccggactcggcgtagtcggccatcgtgtcgtaggcgtcattggcggcgagcagcgcatcaacgatgttctgcggacggccgggaatctcatcggcaccttcgtagacgaactcggcgtccggcacggtgacgtcctcgccggtcaggatgcgggcgaacgcgcgggtgaggcgcacctgcaggttctccgcgtactttgcgtcattgtccatctgcatggcttcggtcagcggccacaggccgatcagcgccgagccggcttcggcggcctcagttaccgccggcaatgccgcgacctgtgcgattgcctcacgattgagttcaatggtcatctatgctcctttgcgtccaccactcgattgcagtgcgtcttggctcccctctccgaggggagccaatgtcctaacaccagtgtgccgttacttgacgttggctgctgggtcgacatacgtgattgacatcacacggccggtttcgttgtcgtacgtcaccgaggtcacggaggcgagcgccgtgtgccgcaggaacatccagtgctcggggtggccggtctccagataatggcgataactgaaaatcggcgattcgtggctgaccaccacaatctgctcgccggggtgctgggccaccttctcgcgggcgaagtcgtccatacgcgccgcgatgtgctgataggactcaccccagctcggcttgtacaggttggtgacgagcttccagttgccgttcttccacagcgcgccctcgccatggccgatgcgcttgccacggaactcgttgccggcctcaatcacccgttcatcagtggtgagcgtgagcgaagcctcgccacgagcctcgcgcacggggttcagcgcatcgagaatcgcgccggcggtctcgcgcgtacggtcgagcggcgaggagtagacggctgcaatcgtattggtttggggattcttggccaagtacgtggcggtggcttgagccatgcgacggccaaggtcggaaagatggaagtcgggcagtcgctcatagagcagatggtcggggttatataccttgccatgccggacgaaatggatggtggtagcgctcatgagccgcctttctgcttcccgccctgaagggcatgagaacgttgtcttaatatctccaatctaccgcgtgtcgcggagtggacacccgtagagtatccgtgacgcaaatatgcggatgggaaaatccgacgcaaactttgcgcgaccatggacaacacatcattcgatgagggcttcgccggcaacgccacgccagcgggggacatccaatcgggagcggaaaggagcgtagtgctgttatgtccaataactcgtcctactcgaactcgagcaccattctggccggcatcaaggaagtaggccacaaagtctttggtgggtatgcggaactactgcgcattccgcataccgcccgttattccatcggctcggtcatcgcctgcatgccattcccgatggtcggcatgaccatcaccatttccgtacagcattattacggcaactattcgctggccggcatgctcaccgccattcaggcgattgcgctggccgtggccacgccgctgctgggcaagctgaccgacaagttcggccagaggcaggtctcgattccgacgattatcgtttggattgtggccgccatcgcgctggtgacggcgattaccaaccgcgcgccggaatgggtgctgtactgtctgacgccgttcctggccgccattccgccgtggggcgcgatgagccgcgcgcgctggaccaagattcttaagggtgaccgggagcgcacgaaccgcgcgctgtcgctgtgcggcgtgctcgacgaatgcatgtgggtgatcggtaatccgctggcctccacgctggccgtgatctccggtttgctggcgttctcgttcaccggcatgtgcgtggtggtcggtgcgctgatgttcctgaccgagctgaccactgagccaccgtcgcagaccgcgctggcgcgtgccgagggcatctcccgcaaggaataccgtgagcgcgaggccgccaaggctgaggcgctgaaggtggaaaccgccgccgaggagacccgccgccgtcttgagcgtgaaggcgtgaccgatgaggccacgattaacgcagccattaagcaggcggtcgccgatgcgcgttcgggcaagaaggcgtccatttggggtccgggtctgattgcggtgtgcgtcacctggttcggtttgggcgcgttccagtcggctacgggcatctccatcatcgcgtttgccaccgaagcgaatatgaagcagtacacgggctttgtgtttgcctgcttctccttcagctcgctgatgggcgcattggtgtatggcgcgaagaactggtcgattgccctgtggaagcgcttctacttctgcctggccgtggtgaacatcggcatcagtacgttcctgttcgccaagcatctgtgggtgatcatgatcatctacttgattattggcgtatgccaggccccgacgtggatcaacggcaaccagctcatgttgcatctggtgccgccctctcgcttgaccgagggcatggcgtggatgggtgcgatgaactccatcggctcctccgccggttcggcgattgccggccagttcatcgaccgcatgggctcgcacggaggcttcatggtggtgaccaccttggcactggcctcgctggtgattgcactgatcggcttcaagcagatcaagggctccaccgagcagccgaccctgactgaagtgagtgtgtgagacgtatgctaagccccctctgacgaggggcttagcatacgtcaaaacgctacttcggccagcctttgggcgtgtgctccaaggaccagatgccgagcttgtgggagaagctgttctgccacttggcttcaagctcctcggcattcagtcgattttcagcggacttcagacggttcatcgcgttggtgtgcgtatcgtcgagcagccacttgcgaatcaagaagttccagatcattaccacggcagtggccaccagcttgccgatattggtgcgcaacagatattcggcatgctgcgatacataggcatcatggttcataccataggtggaaatccagataatcgcgtcattcatgaacagaccgactacagcgcccgccacgaagataaggatctccatccagcgtgccatgtcatcacgatgcttgaatacgaatttcatgctcgccagatagttgaaaatcagcgagatgatgaaagaaatggtggcagccagcacgttgtgcatgtggaatatgccaaccaataggttgaggataccccagtcgataacaaaggcgataacgcccacaatgccgaacttcatcagctgttcaatcagttttctcacaagagtattcaacactattgggctgactgcggaacgtgtattggctggaaaggccaataatatccccaattggccttgccccggtccgttctgcaagcagcttcctacgtccgcatgccatgttcaacagcagccgctgaggctagactggaagtgaaccgaatcaaggaggaattatgcccgttattcacactcatgtgtccgtgtccaccacccccgagcagcgtgaggcactgaaggccgcctacggcaaggcgattaccgctgtgccgggcaagtccgaaggctggctgatgtgcccgttcgaggacaatatgccaatctacttcggtggtagcgatgaccagcccgccgcctatgtggaggtcaacgtattcggccgctctgtgccgggctctgcttgggaaaagctgaccgaaagcattatggccgcgctgaactccacactcggcattcccgaggaccgcacctacatccgctacaccgccaccaccgattggggctggaatggcggcaacttctagttgccaccattcccctcgcagcatagctgttcgcatcgcctacggaaagcccagtgggctttccgtttaatggctcagggtggcaactagtttgcgtattctggctcccctcagtcagcttagctgacagctccccctcaaagagggaagctcagatgtagagagcccgccggtggcgggctttctacgtttcaaggggctgatttccaacattcagaagctctactagcgtttcaaggggcttttaaaacaagaaacccggagtataaacattgcaatttcaatggtcatactccgggtttcgcgatcgaagagcccctcgaaacgcagatagacctccggaaaaccggaaatccacccctcgaaagcgagttacctcacctcatgcctgtcatcacacaatcttgggcatgggggtggtgaggctggtggtcaggttgacgtggaccagaccggcaccggcatgcacctcgaccttcttcagggtcacggtgcgctcttcttcgggggcgcggtcgttgtcggtcatggtcgccggggacttgaccgccacgaacgccagatcatccagcgagatgcctgcgctctggcacagttccatggcctcggacacggactcggtgaagcccggcttgtagatcacgcgctcggccggtacgccgtaggcgttctcggccacccacttggcgttctcggtcagggccatgcccttgtgcgaatgcggttcggccggcatggagccgttctgcagcgcgtcgacgaaaccgtcaagctgcggggccagcgcctcgccgccgtcgcggaacaggttgccgatgatcggcgtacggaagcccagctcgtcggcggtggccttcagggacggaacctgatcgtcctcgccttcccacaggttgatgagcgggaaggtcggaatgtccaggttctccaggcgctgcacgtggaacgggtagcgccaggccagctcgggatcgtcgcgccaggtggaggcgcgggtcaccacgatggcggcggacggccactgcgcgccatactcgcgacaggcgatgtccagccacttctgggcaccggcgtcggtgccgtaaccggcttcgacgacaaccacgtcatgcagagcgcaggccatttccacggaaaccagcgtcggaatgccgatggacacgttggcgaacgggccaccgtgcacgtagaccggggagccgttcacggtctcggtcttggccggcttgaccgcgtcggccagaatgccggtgatgcgccacagatccacgaactcgccgaaggtcacggccttgccgtccttggtgccggcgatcatcttggatacgcgctcggaaatctcgtccatcgagcgggagagcaccatgatctgcatgagctcgcaggtcggcgtgagcacgaccttctccggcacgttgcccttgccgtagtccacggcggtggagcgcagggagcggctcggcacctcggagacacgcggcacgagaatcgtgtcaagcttgccttcatcgatggccttctcggcgaaggagacgagcaggttctgggccgcctcgatggcgcccatttcgccgcacagaccccagtcgatgagctcggggtgggtcagggatgccttgccgccgccggaggcaccgcccttggaaccggctgcggtgatgcccatgctcggctgacgcagcacggcggccgcatcaatgccacgcttgttcagggcgtcgatcaaggcgatggtcgtggtggtcttgccttcgccgcgcgatgccttgagcggcgtatcggcggtgacgagcaccaccttgccgtgcttgcgcggggcgtccgggttctcagccaggtacttcatgtaaccgaatgcgtcgatcttctggaccaggccgtactggctggtgaagccttcgatggtggtcatttaatgcctttctgtgttgatgatggcggagcggggtggtggggcggccgccgccgcctcttcgcctagaaacagcccactgggctgtttcttaacagcttagcctctcagtccgcttcgcggtcagttcccctcagggaggggagctcaatacggactaaaagtcggacatgtggaagccgttcttcatttccatgctgcgagtgtacagcacggagtcaagcagcttgtcggtttcctccttgagctggtcggccatggtctggttggcggcggcgagaatctcgcgcacttcggggttacgcagcgcggcgatggtctcgtccggggtcatcggctgcacatcaccgtctacgttatccgcctcgaattcctcttcggcagcagactgcgaggcttcctcggcggccgtcaagccaaggcgtgccacctgctcatcagtggcagacaccaaacggtggcccatcgcgccggtcttctcctggtagcgctcgacggcgttggacgtggagcggaaggcgccatcgcacagggcggcgatgatgcggttggcccagtagaagttctcggacgtcacgcgggtggtggtgtcctcaaggtaagcgggcgtggtgtccacgttcgggaagaacggcaccagcgtgttgaacgggttggagccgtatgccatccactggatggcgcgggaggcttgcgggcggtacgggcggatctgcatcaccgcaagctggctctggcggttgatgccgatcgtgcggtacatgtggcgggtgcgctcatcgcccagctggccgtatggatcgaacggggtgccctggtagtgggagctcaacacgtacttgatgtcttcgatggtcaccttgcgctcgggctggcgggcccacggaatgtcgtcggaggtgggcttgtggtcggcgtccgggccgtcccacacctcgtcgtacgggttgaggaagcgctgcatgtaccaggcgcgcggggtgttgtacacgtggtcggagtcggagtgggagccgaaggcgtcgcgcgggttgaacggggtggtgttctccaccgcgaggtccaggtggttggtttcgatgaattcggcgagatcttcggagcacatgtgcgcttcttggtcgcccagagcgtcctcaaggtcgaattcgtcgataccgagctggttcggcatggtcacgtaggcctcgtccggcacgcgcttggcaatccagtgatggccgcccacagtttccagccaccagatttcgttggagtcggagaaggcgacgccgttcatctcgtaggtgccgaattcctcaagcagcgcgccgaggcgctggacgccctggcgtgcggtcttgacatacggcagcacgatggtcaggaagtcctcttcgccgatgccgccgggcacctcgggctcatcgcccctggccggcgtgtattccacaaacgggtcggcgccgagcacgcgctcgttggtggtcagggtctcggtggcgctcatcgccacgttcgcctcgttgacgccggcctcgccccagatgccttccttgaggtccgcgttcggcacggcggtgtactgcagcgggtcgtccggcagagtgatggtcaggtgggagatcactgatttgtattcgcgcggctgttcctccggtttcacgacgatgaagcgcttcgggttgaactcgccgttcgcggaatcctcgttgcgggcaatgatggtcgaaccgtcatagctcgcgtctttgcctaccagaatcgtggtgcaggccatagtgtgatggtgtcctttctcttattcaagctccccttgtcaggctgagccgttcagcaaacagcccggtgggctgtttgtaggcgagggtgggagataagtcccaccacagatgttgcgggcggtagcccgtccgtaattgcaggacgagctgtctcgcaaagcgagactgaggggtagtcactctagctgtctctcccccagtccgcctacggcggccagctccctcatcagagggagctcacatacgccaactaaaaatcacgccttaccggtcaggaagatgccgtcggtgtcgggcgcttcgccgctgttgcgcagcgcgtgcaacagctcgttgagccagaagccctgattcaagccgggcaacggcttcttggtggcccacacctgcaggtagtactcgtggtccttgtccggcggctgcggaccgttgtaccgcatgatcaccgctgggtcagtgctgcggcccaagaacttggaggccgaagaattgcggccttgcacggtctcgggaatcatggccggcagctgacgggagaagtccggcgggatggccaacgcatgcgaatcattgaagtcgtacatcagcgcgtcaatcggcagattggccacggaccagtgaatccactcgaagccgcagaccggaatcgaatccgggtccacgaactcccagtgcaggtaacgggcctcggggttcacatcaccgatgtagaacgggaaggagacgaccggcacgccgccgttgaagtactcaggcgcggcggccttggcaaaatcgtccggaatgacggtgaaatcggcggaaatcttcatatgtcccagtatcgctcatatgtgtgacgtactgggggctgtgcgttacgggggtctctcccccagtctcgccgcgctcgacagccccctcgtcagagggggctggttgcgtcgggttatggaattagggcgcagaagagggattcgaataccagtagcgggttgccgttgccggctagacgcttgcgggcgtgggccacttcgtccagacgggtcacggcaccggcccggttcaaccgcaccgacaattcggtgatcggcgagcggttctccaggttgatgaggcccaccgaatcctccgcattgttctgcagcaccgccacatcccggtagatggaggcgatggagttcagcgcacgatccaatacgtcgcgcgtacggcgggtgaccaaacgcttcacatcgtctttcttggcgatctggttgaacgcgccacgcagtttcggcgggatgcggtcgttcggtgccagtccgttgatgcggcggaattccgcttcctggccggcggtgatgcggcttgcgtccgcctcggcctgggccttggcattgtcgataaggctgccggccagcagcaccgcgtccgaggcgcgagcgaggttcagtacgcccaccaccaattcgtcgcgatccgtcatcacctgctcgtcagtggcgtacaacttggcgatgccgatgtgtccctcggccagacgggccgcacgctgcgccacttttggctcgacattggtggtggaggtcaggaatccggccaccgcctgggtggagggcacggcgaggttcacgatgcgcgtgcgcgagcggatggtgggcagtacatcctgggcactcggcgcacacagcagccagatgcagtgttcagccggctcctcgatctccttcagcagcacgttggtggtgcgctccagcatgcggtccacatcctcgatgatgatgatgcgccatggtgccgtggcaggcatttgctcggaggcggtgatgatctcgcgcacctggtcgatgccgatggtcactttgttggtggccagcactgtgacatccgggtgggtgccagcgagcacctgttgggtgacgcgcgtgggctcatcgttcatgccgtggtcggggctttccagcgccgccgcgaatgctcgggccatattggaacggccggagccgggaggcccgcaaatcagccacgactgggtgatctgacccgggtcgccctgcgcgatgcgactgagcatgtcgattaccggctgctggccgactagtgaatcccatacgctcatcggacaccgcccatcgtcacggctcctgtagacgccccggatcgcgccaccaccgtatccacatctgcaacattgtcccgcagcagtgtctgaatgtccgcttcgatggcggaccacacctgttcgatggactggctggcatcgatcacgtggaaacgattcggctcggccacggccaagtcgaggaacgcctgacgggtgcgggactggaagtcgctgccggccgactccatgcgatcttcggcatgctcaagacgattgtgggaaagcgccggatccatatccagcagatatgtgcggtcgggcagcaggttgttggtggcccacatgcttaaggctcgaatctcttctggcgtaagttcgcggccaccggcctgataagccaaggaagagtctaaatagcggtcggtgatcaccacttcaccgcgctccaatgccgggcggatggtttcggcaacgtgctgggctcggtctgcagcgaatagcagcgcctcggcgcgcggtgcgatgtcgacggcgcccccatccacaccgtgcaacagcagttggcgaatggccttgcctagcgcagtgcctcccggctcacgggtaacgaccacggtacgcccctgagcctcaagatacgcacgcagccgctcgacttgcgtggtcttgcccacgccatcgacaccttcaaacgaaacaaacagaccgctcatgctattgaccttagcgttaggcgcagagttgtgcccaacaggcagttaaaccagctctacctccgtttcaaggggctgatttggtcttttctgaaggtctacttccgtttcgaggggctgttacccaagtagacaacgttccaaaacggcggaatgacgttggcgcggagccgttcatactcgtggttcagcagatgaccagccccttgaagcggaagtagatattctcaaaacgagaaatcagccccttgaaacgcaagtagagcaataattccgctcagccacgcttgggaattacggcggggcgctcgtagccctcgttggcggtcagccagtcgacatccttcttgacggtggcggcggtggagctgagcttttcggcgatgcgctggttggaccagcccttgtttgccagcttcttcacctcggcacggcgtccggcgcgcttggcctcggcggcattggtcgcagccgaagcagcgcccttcttggctcccttggctcccgacttcgcggcaccggcacgcccagcaccgtgacggccacgggtggagggaccagccgcacgcttttcggcgagcagtcggaaggcgtcatcaggggtgatggattcaggcgtgtactgacgcggcaccgtgcggttggtctcgccatcggtgatgtacgcgccgaaacggccgtccttgatggtcacgttcttgccggtgttcgggtccttgcccagatcacgcagcggcggcttggcggcaccacggccacgcccgcggccgtacttaggctgcgagaacagttctttggccttgtcgatatcgaccgtgaagatctcgtcttccgaggccagcgagcgggtctccgacttgccgtcggcacccgtcttggtcagataggggccgtaacgaccgttgttggcggccactgtgcattcggatacctcgccggtttcggcgttggtttcctcgtatgtgcccacttcgcgcggcaggctcagcagctttagcgcgtcttccagcgacagcgattcagggctcatcgtcttgaacaacgaggccatcttcgggcgcgacgcggcggcggccgcggccttcttcgaacccttcttggccgcagaagcaccagcagtatcgccagcagcgccagccgaagcctcagccggcggcaccagcgccacatacgggccgaaacgcccattgcgcacctcgacggtaccgccggataccgggtcaacgcccagctcgcgcggtccaccggagtggttgtcgatcaaatcgcgggccacggccaccgtcagctcatccggcgcgatggtgtccggcagagacgcgcgcttcgggttgccttcgacgtccagatgctccatgtcttccagatacgggccgtaacggccgacgcgcacgtgcaggccgtcgccgatgtcgatggtgttgatggcgcgcgcgtcgatctcgccgagctgcgcgacctgctgttgcaggccttcgtgcgcctcgtcggcgttgcgggcggcgccctcgccggaaccgaagtagaagtgggtgagccagtcgcggccggattcctcgccgtgggcgatgcggtcaaggccgttttccatctcggcggtgaactggtagtcgaccagcttggggaagttcgtctcgagcaacttggtcacggagaaggcgagccagctggggatcagcgcacggccacgctcgtatacgtaaccgcgatccatgattgtggagatgatgctcgcgtaggtggacgggcggccgatttccttggcttccagcgtcttgaccagcgtggcctcggtataacgggccggcggctgggtttcatggccgtccggttcgatgtcgcttgcctcgacctgctggccgacgctcatcggcggcagggaggtgttggattcggatgcgtcacccctgacggccttgacgtccgtcttgccggcggcagcagcctggcccgagccagccccagcgccgggagcggcggctttgggcttgcgcccctcccccgtggccttcataaagccggggaattcgatgacggtgccggacgcttggaacacggcctcgccctcggtggggccggccggcgcagacaggcgcacggtggcggtggagccggtggcgtcagccatctggcaggcgagcgtgcgctgccagatcagcgtgtataggcgcagctggtcgccgggaagtttggaagccagctcatccgggtcgtggaagcgcgagcccgccgggcgaatacactcgtgggcttcctgcgcgccagcggttttggtggcgtactgcttgggctcggcggagaggaacttgtcgccgaaatggtaggagacggcgttgcgggcggcggtgatggcctcctgcgacagcgtcaccgaatcggttcgcatataggtgatgtagccgttctcgtacaggctttgggccgcgcgcatcacgacgcgagcacccatgccgaggcgattgccggcggtctgctgcaaggtcgaggtggtgaacggcggctgcgggcggcggcggtacggcttggtttccatcgacatcacagtgaaatcggcggtcctcagcgcttcagccacggcagtggcaccagcctcatcaagctggcgaacgttcgccgcgaacccgtccggggtcagctggccgtcggcaccgaaatccttggagccggcgagtcgcttgccgccgagcgcgatcatgcgggcggagaattcggcacgctcccccagcgcgtcaggcgcggccaacatggcgacgatatcccagtacggcacacgcttgaatgccatgcgttcgcgttcgcgttccacgatcaggcgggtggccacggactgcacgcggccggcggacaggcccgggcccaccttgcgccacagcaccggcgacagctcatagccgtacagacggtcgaggatgcggcgggtctcctgtgcgtcgaccatattgccgtccacgtcgcgcgtgttgttcagggaggcgttgatggcgttcttggtgatctcgtggaacaccatgcgcttgaccggcaccttgggtttcaaggtctgcaccaagtgccacgcgatggcctcgccctcgcgatcctcatcagtcgccagatagagttcgtcggcgttcttcagggccgatttgagttcgctgaccgtacgcttcttgtcgccgtcgacgatgtaatacggcttgaacccgtcgttgacgtccacgccgaacttgccgaacttggccttgtctgccgcgggcacctggctgggctgcgcgaggtcgcggatatgaccgaccgacgccatgacggtgtaccccttgcccaggtagtcaccgatcttgtgggccttggtcggagactccacaatcaccagtttggtagccatacccactccttatgtattgcgcgaaacacacgacgtttctggcgtcataatactcatgaatcatatccaactgccaaattccgccgttgtgccgggcaaattcggccgttcgcacctcatgttttaccgtttgggcggtgccggcggagcgccgatcaggcccagcctgcttaagggcgctgcagtgatctgacgtagggccagcaacagcccgaatgcgagcatggccacacccgtaatgcccacaacagcgctgacattcgccccctgaaccgcccaactggcgctgacattgagccccggcaccacctgccagatcacataaccgctgtaggcgagcaacagcaggcccccggtaatcaacacgctgccgacgatctgcacactcactgaggagacgcggtggcccggctcgtccatgccggacttgcgtgtaaccgccagagcgagcagggccaatcccgccaccagcaggatggacatcgccacatccgaagggcgatgccattgcccgtatatcacagagacaccgacggtcgccgcccaaaccacgccgatgacgcccgccaaagctcgaaccgcgcgaggcacggtaagcagcagaatcaccgcacaggctgcggccagcatcgtgtgtccggaaggcgcggaattagcggcaggcgattcagtgttgatgatgaacggacgcggcaacagacccttgatacgggtgacggccaagcagaccacggcgaacacggcgatttgcccggccaaccaccagcggcgtcgaatcagcgccgtaataatgccgattgcggcaattgtgcagctgacagcgataaccagccaggattgtgcgacggcgttcatcatgccggtggtccaggacggtacatcgttgtgcaggtttttccagaccagttcgtcgtacgattgtccgttttcggtaaacacgcacccccaccacacgccgaagccaatagcgatcaggagcagaccgaataccacgcacagtacgcggctggagattcgcgggcgcacggtaagcgggtcaagccgggccaagccacggtcgatatcagatgccccatccgcatcgtccatgcccagcggcctgaaatcccctaaggagcctgatgtggatgccgatgcatctgaaccggagaccgggccgagcgcagccaatgggtcaacaacgttcgacgacgagtcaggctgcgctgcgcctgagccgaccagattgaccgccgcatgcgggtcgcgaattctaggggtctgtgcgtcattcatacgttcgactgtacggccgcgccccggacagggagccgtgctcgtgccagctcacggccaaatccgcacaaatggaaaacctccacgcacccgtcagaggccacttacccttgctgcattcctgccctgggggagttgggtgacatagcgccgcgtggaggctggggataagtctatggagacgtatggaccagcgcagcgacacgaaacgtgcgcgccgggtcgcacggcaggccaaccagcgcattcaggcaatattcatgcagcatcaaggaacgtgcccaattgtaagaattccggaaaaataccggcataaatgcgtgtggttacgctcacgtcaaacgattgttcaaggccaacagttacggtggacaccatggcttcttatactcgtcgtgcacattcgggaggcaatggccccgctctgaggcaaccgcgcaccgcgcaaagcagagccgaccactccgcacaggagggcccctatacgccccaggagagccgttcccgccacgcaagccacaaggcttccaatagccatcgagccccgaacaggaagaaaaagaacacaggaaaaggcaagcaccgtgtactgaaatgggtgctgggcatcttcttctccctgattggactgggcttgctggccggtatcgcagtattcgcatacctgtacaccaccaccgaggtcccgcaacccgaaaagttcgcgttggccgagaaaaccaccgtgtattacgcggacggcaccaccgcgatcggctcctacgcggaacagaatcgttcaatcatctcttgcgaggggctgccggactacatcggcaacgcgattgtggcgtccgaaaaccgtacgttctacacggataaaggtcttgatctgaagggcatcgcccgcgcattcattaataatgtgaccaagggcacgcgccaaggtggttccaccatcacccagcagtatgccgagcggtattacatgggcgaaaccacatcctatgtgggcaaggcgcgcgaggccatcgtggccatcaaaatcgcgcaaaccgagtccaaggacgaggtgctgtgcaattacatgaacaccatctatctgggccgcaactcctacggcatccaggcagcggccaaggcatacttcaataaggacgccaaggatctgacgctgtctgaagcggcgatgatcgccggcattattccgtcaccgtccacgtgggatccggccgataacgccgatatggccaaatcgcgcttcaagcgtgtgctgaacatcatgcaggaggatggttacatcactgccaagcagcacactgatgccaagttcccgcagactgccgcggtggcgcagcaaaacgaatacgcggggccgaacggttatctgctggatatggtgcgccgtgagctggtgcagtccaaggcctttaccaaagaggatttggataccggcggatacaagatcatcaccaccatcgacaagagcaagcaggaccttatgcagtccatcggcgacacccgtctggacgacatgcctgaatccctgcaaatcggcggcatagcgctggacccgaagaccggtgaagtattgtccgtatacgccggttcagattatctgtccaagcagctcaacaatgccgatcaggccgtattcgaaccgggttcgactatgaagccgttcgctttgctgggggccgcgcaatccggcgtcagcttcgatacgttgttcaacggcaattcccaccagcacttcaccggcttggatcaagaggtgaataacgctctggagaacaactggggcaacatcaatctgtatcaggccaccgccaactcggtgaacacggtgttcatgaacgtcaatgagcatctgacgccgaagcgcacggccgcaatcgcccatgaagcgggcattcagggcgatatcgatgaaaactccatgtacaacgtgctgggcatcaacgccctgaccgtgtgggatttggcgcaaggccattcgaccatcgccaacaatggtgtgaagagcaccttgcacatggtgtccaaagtgcttgattccaacaataaggacatgtacaacgcgcccagcaaaggcaccaaggtgttcgatgccaacgactgcgctttggtgcagaaggccatgcagggcaccaccacgtacggtacggcggccggcacatccaacatgctgggccgacccatcgccggcaagtccggtaccgccaacgacgaaatggcttcgtcgttcgtgggatacacccccagcatgatgaatgtgtgggctatctggaacccggacgataagggcaatccgcaggcggtgccggccttctccggatacggcatctcttccactggataccccgcccacctgttccaggagttcatggctcaggccttgcaaggtaccgaggtggagcagttcccgaccgctaaagacaatggcaagatcggtggacccgacggcacttggggcttgggcaagggacagagcagcggcctgtccaacaacaccaacaagcagtccaccgaagacgcgcagaagcaggctgagcaggacgcacagcagaaggcggccgaagaggaagccaagaagcaacagcaggcccaggagttcgcccagcagtgcctcgccaatccgagctattccaccgagtgtccgaattatcccggcaccactaccggcggagatggcaacaatggcaacaatggcaacaatggcaacaatcccggcaataccggcgggaacaacgggaacaataccggcaacgataatggtaattccggaggcaccggcgggaacaccggcaccaacggcgtcacccagtagtaagtaagcacagacaacaaagctccctctgatgcaatcacagagggagctttgttttgttgttagcgctcagcgcttgcgctgggaacggttgatggcagagataatcgacttcagagcgctggtggtgatcgacgaatcgatgccgacgccccacacgatctgcgcatcatcggcctcgccgacctggcattccacgtacgaggcggccatggcgtcggtgccgacggacatggtgtgctccacgtaatccataatcgaggcgtcaacgccaaagttggaaatggcgttgaggaaggcggcgatcggaccgttgccgatgccggagacctcgcgctccacgggcgcatcgaccccgacgttcacgccgcggtcgagcaggcgagccttgagcacggtatcggagccatcctcaccggagctgacggccaccttgagcagcttcaagcggccccacggcgcgagcgaggcgtcatgagtatcgcccacaaccacaccggcggcggtcatgccggactgttcgatcggcaggtactcgtccttgaacagacgccagatatcctcgtccttgacttccttcttggtcgtgtcagcgtagtcctgcacgatcttgtcgaattcaatctgcagacgcttgggcaggtcaagattgtggttggtcttgagcaggtaggccatgccgcccttgccggactgcgagttgacgcgaatgatggcctcgtacgtgcggccgatgtccttcgggtcgatcggcaggtacggcacaagccacacgaagctgtcgagatcggcgccagcgcgctcggcggccacctgacgagcctcgagacccttcttgatggcatcctgatgcgagccggagaacgcggtgaacacgaagttgccggcgtacgggtgacgctcggagatcttgatctggttgcagtactcaaccgtcttgcggatctcgggcacgttggacaggtcaatctgcgggtcgatgccttgggtgagccagttgaggcccagcgtgaccaagtcgacgttgccggtacgctcgccgttgcccagcaggcagccttccacacggtcggcgccggccagcacggccagctcggtggcggccacgcccatgccttcgtcgttgtgcgggtggagggagagcactacggagtcacggtcgtcgaggtgggtggagacgtactccacttcgtcggcgaatacgttcggcgtggtcatttccacggtggcgggcaggttgatgatcatcgggtgctcgggagtcggcttgataacaccgatcacggcgttgcacacctcgacggcgtactccggctcagtgccggtgaaggattccggcgagtactcgtagtacaggtcgatgcccttggcctcgttctcgaggtccttgcacagttcggcggcgtcggtggcgagcttcttgatctcttccttgttcttgcggaacacgacctcgcgctgcagcacagacacggagttgtagaagtgcacgatggcgcgcttggcacccttgagcgcctcgtaagtacggcggatgaggtgctcgcggcactgggtgagcaccacgatggtcacgtcgtccggaatcagctcacgctcgatgagcatacggatgaagtcgaaatcggtttcggaagcggacgggaagcccacctcgatctccttgaatcccatggagacgagcaggttccagaaacgcagcttgcgctcggaatccatcgggttgacgagggcctgattgccgtcgcgaagatcgacggagcaccagcgcggcgcgcgctgcagtcgcttgcccggccacgtgcgctccgggtaatcaaacgggatctgcttgtcgtaggcggcgtacttgttatacggcatacgactcggcttctgcggatcgccgatgaatcgtgccggaggcagcagcgggtcgttgttccccccattggacgccgcagccactgccgcgagatcaaaaacggatgattgaccctgacccattgttcctcctttactggttattgcgcgggccctcttgcggacgcgactgcggcgttgtgccagggcggcgccgggccacgcggatttgtcaatacgcacgtaacatcctacaggccggttcgggcaaacccgcgggaaatgccgtatcgtggcatttgcttatgcacctggctgatatgagggcactcagcgtcgtcagcggaccacgctttgactccggcacaacaccccgcctgcgataccccaccagatggccctccatacgtcggcggcgggccaaatattggtactgcaccgacagccaaactgctcagcgtcgtcagcggaccaacttatggcgaaataccgactctgggaaagcttatcgtcggcaaattgccaggctatggcacactatcgacgctacgaggcccacaaccatcggcaacgcgacaaatattggcccaccgccgacgctagcctctttgagcgtcggcgccgggccattccatgaatcagtaacgacgccaatggtctcagaacgtcagcatagggacgctgtctggatctccgccgacgctgcatgacaaaatcgcggcaccatcaagcaacaacacggctgcggcaccccgccctgccccgtcccttgctgtgccagtcctgtgaacgcgcgggcgatccgccgcccggcaacatagactgaagagctatgacgagcttgcgattccgcgaagacggcagcttccgcgtgctgcaaatggccgacgtacaggacggccccgatgtgttgcccgacaccatccgcctcatccgcgaggccatccgcgaagccgatccggatcttgtggtgttcaccggcgaccagatccgcggctatgatcccgcctacatcgacacgttcctgcgccgccgcggcgaggagccgggcgctcgcgtgcgcgcggtcaccgagatcgaggccaaaatccgcgggatcaagcgtcaccccgtaattcgcaaagtatccgatcgcgtggccgatcgtctcaccgaagccggcaagcctgtaccagccgcgctgcttgaccccgataccgtgacgaacgccgtcgccgctgccggcgccgattcgaccgacgtgatcacgacttccgaagtaggcgattccgttgagaccagccccacgcccgagacggtttccaccctcgtatattcaacgcaatccggcaaggccagccccgcacacgagacgccggcgaccctcgacgaactcatgaatgagacccgcgaaaaggtccgccgcacgttctccggtttccttggtccggtcgtcgaggccggcgtgccctttgccgccacctacggcaaccacgacttccaatgcggcattctggccgacgaacaggatgacatctaccgcgaataccccggctgcctgaaccccgacgacagtctcgagcccggcacgttcgcgctgcccgtcgagtcctccgatggttccggccgcgtggccatgtccgttatgatggtcaattcaggcgattatgccggcaaacccgaagaaaacgatgcccaatacccggcgtatgtggtcaatccgcgaggactcgacctggccgacgccgacgggtacggcacccccacccccaaggccatcgaatggctggggtccgtccaaaccgagttgggcgagcgcaatggcgacggcaagcccgtgccggccatcgccttccagcacattccgccgcaggaattctacgattgtctgaaggaagtgcccgcatggacgccgaacgccgtggaaggcgcgcgcacgcacgccgggcgttgctatgtgctcaaccatgaggtctgccgccccggctcgcggctcggcgaggcaatcggctgcgcggacgagaatgtgggcgaggtggatgccttgcgcgaggctggcggctatttcgcgctgttctgcgggcatgaccataagaactctttcgttggtcatgtgcatgatatcgatctgggctatgcacccacgtgcgggttcgaatgctatggtcccaagtcgcggtaccgcggcattcgcctatttgaattccatgagagcaatccggcgggctatgtgacccgcatgctcacatggggtaatctggtcggccgctactccagcaacgagctgcgcgtctggttcgaggatcattgcgttaccggagcggtcagcgcacgcaacgagctgcgccgcccgcaggtgttcgccgtggtggccggcgcgatgagccttggctttatagccatcatccgttcgctgatcaaggccgcgcgctaaacctacttaaacagactcaccccgcgacgggccgtgcaatacgcgttgcccagccaggtatggcgggaattgggccagacagctcccagtcgcggtgcgttctggctcatccagatgctcggcacgcggccgtctgcggagcgtgagccgagcagattgaagccgttcttttccagcagccactccgggtgctgggtggcgatggccaagccttcctcgagggtgagcggcaggcgttcatcggagtcgataagcttgcgggccacgtccggctcgcgattgatataacacgtgccggtgtgcggattgacgaccagatagaacgggccttccggcggcatgaagccgtcttgaggcaggaagctggcgatgtcacgcggcggcatggtggtgaagccggccatgcgattgatggaggttcgtgcgatcagtgactcaggcgaaaccagttcgcgcgtgggcaccagcaggatgttcgatcccaaatcggaatgctcgagcgccccgatcaggggtcgggccagcgagcggaatgcggcggcggaaatatccgccacatccggatagccgagagccacgatacggtcgagctgtttttgggcctctactgatgcgatagacatggctaccagtgtagaacaccgccgtctcttcgttagtcaccccgttgtctatttagaagtgcaacatccttgttgttcggttaatgatagaagttcgtcggcgaatgcctcggccggggtgcggtagccgagcacgcgcatgggacggtcgtcggtctcgtccacgatggcctgtatctcgtcggccatggacgggtcgacgcgcgtgcgcttgggcaggtagcggcggatcgcgccgttgcggttctcgttgccgccgcgccggcacgacgggtacgggtcggcgaagtaggcggccatgccgagccgttcgcgcaggtccgcgtggcaggcgaactcggcgccgttgtcgtgcgtgacgccggtcctggcgcggcggcgtccggccttccggtgcgcggggccggcgatgtggcaccggccggtccacggccccgtcttgagacgctccggccggtac

SEQ ID NO: 10 - DNA, 46924 bp, Unknown
  R30_18m  MAG No. k141_2243
agccccgccacaaccagaaaaccgcccttggcgacgttgcctcaggcggttttccagcggaaggagagaaaggagaaagaaggaatggaaaggtgccatgcgggcataacacaacaccgcacatggcgaaactatcgaatcagcccatcgggcgcactggcatcataattgatgtgtacacgcccgatggagcgaattcaatcggtcagaccgatggtcactcgacctcagccagggcatcaatgatgtagttgttgatggtggccttgacggactcgaggtgatcggacttggtggcggcgatgagctcggactgcggcttgtcgaggctgtaggcttcgaggtcggccaaggtgacgttgccctcgtcgatgtccttgccgatgccggagtcgtaggagctgtagcgctcagcctgaagattctggatgaagccgtcctggttcatcttgtcggcaaccagcaggccggcggcgtaggcatccatgccggcgatgtgggagcggaacaggtcctcctcgtagaaggaggtacggcgcggcttggcgtcgaagttcagaccaccgtgaggtccgatggagccggcctgcaggacttcccacatgacggcgacggtctcgtacagatcggtcgggaactcgtccatatcccagccgatgagcttgtcgccctggttggcgtcgagggaaccgaggaagccggactcgcgggccacgcggatctcgtgctggtaggtgtggccggccaggttggcgtggttgccttccaagttcagcttgaagacgtcggtcaggtcgtggttgcgcaggaactcgatggcggtggcggcatcgaagtcgtactggtgcagcgtcggctccttcggcttcggctcgatcaggaactgggcctcaaagccgatttccttggcgtaatctgcgcacatgtggaagaacttggcgatgtggtcggtctcgcgcttcatctcggtgttccacaggttctcgtagccttcgcggccaccccagaacacgtagttctcggcgcccaggcgcttgccgatctccaagctcttcttgagctggccaccggcgtaggcgtagatgtcggcgaacggagaagtggcggcgccggacacgaagcgcgggttggtgaacagggaggaggtgttccacagcagcttgacaccggtggacttcatattctcgtcgatcttgtcaacgaccttgtcgaggttggcgttggtctcgcgcagggtgtcgccttcgggggcgatgtcacgatcgtggaagcagaagtactcgacgcccagcttctggaacagctcgaaggcgtagtcgaccttggccagagcctggtccatcggatcggtgtacttgtagtacgggcggtgcgcggtgccggtgccgaacggatcaaccagttcctggttgaaggtgtgccaccaagcaacgccgaagcgcagccaatccttcatcttcttgccggcaacgaccttgtcggcatcgtagtaatggaaggcgaagtcttccttcggtcctttggcgcggccgacgtactcgatcttgtcaacatcccacagacccatttgggcgctcctttgcagtaggcgatattacggattgcaggaccaataataaaacgaacgaactaagtttgtcaaatgattgaattaatacgccgcgtctcagcgtgttgctagtcattgcaatggttttcgaatgcagtcaaggcacagatagtatgggcaagccaagaaagacaactcagccaagaaaacgagacttgataattgacgtcacgcaattcctcgccggccaccgctgaggccggctccaccaccccgccaactccaacagcaccacccccgccaacaccaccgccatggtcatcaccctgatgatcggctcgtttgtggccatcctcaaccaaacgctgatgatctccgccctgcccacgttgatgcacgagttcgacgtgcccagcagcaccgtgcaatggctgaccaccggattcatgcttaccaacggcatcatgatcccgatcaccgcgttcctcatcgagaccttcaccacccgccagctgttcctgtacgcgatgggcatatttgcagaatgatcttggcgttaatgcactggtgtccggtctggtgatgatgccgagcggcatcgccatgggcatcctgaacccggtggcaggcaagatgtatgaccgtatcggtggccggccgctcgccttactgggcttcgcgatcatgacgtctgcggctgtgctgctggtcaccatcatgaacacgcacaccgcggcggccatgcgcaccggagtgccggaagcggcggcatcggccattggcgtgcgggcttcgttccgcacggtcgccattgtgtgcgcggtctgtttggttgcgtcactcttcattcgtgatcgcggccgccgacttggacagcagcgttaggcgaatccttcaccgattgctggccttcttgatcagcgcgtccaaagtaccggcttggcgcgcggcttccacatcttcccagtcgagaccggtgtctttggccctcccgtagaaaaaccgcaccagaccggcaaagtccggtttatatccggtttcccggaatgaacgggccagcgaatcaccgatttgcgggtcatcaggccttcgtgcctcatagatcgggatggaacaggatcgccacacgcctctcacatgtgcgatgcgattgacgatcatgccgccgtgcgcaccatcgtattgcgaggcggcatgtacgtccgccacctcgtagacaccaccatgaatgatgtcctcaactgtcagacgacctttgaccgcgctggcatcgcgaatccagaacatcgaagcgaaattggtgtcatcaagttcgcgaaaatcacgtatctcgcgtgtgccgatacgttcgtccttgtcatacatgaattcggccaaggctaggaatggcgagatacctgcgcccggaccgtactgcaattcgatacgtaaatcttcggattcattgccggtcagtccaataccgctgacggcgcagtcataggcaaaccaatcccagaaccaccattcgatcctttgcagcacctgcttcggatactttttgcatgggttcagattcacttcgcgataatatatgcgtctcgcttcggcatagacggcgagattgcagcgtttgaacatctcggctacgtctttggtgtccagcattgctggcaaaccggcattttcggcagtagtagtggttgcggtgctcatggtgtttccccttcatgtgatgtggacggcgggctacgttgcccgccgtgaggcacactgtatgacgttcgtgcggcggcccgcaagcccgcatggcgagatggtggataagtggaaaacccaatgattccaaggggtatggaatgtgcataacagtggctaccgtcggtggataaccgcactttcttgcaggttatccactgatcgcgcagctgttatccaccgtctctgggttatccacatcgtctctggcgtgtcgtccactgtcagcagtcgatttctgcttcgtttggcgtgtataagtgcacggtgaagtgtataactccgcgcattaggcatatttgctactgagaaaggtcccgaaatcgccttcgaacgcatagctacactcagcagatgtattcagcatggcaatagacccacttaggcaccggcgaatgattttccctcgcttatagagtcggcaaaggcccaacacctgtcccaacgccgacgctactgcactggcagcgtcggcagaggaccacaacttggcacagcaacgacgctaaaaccgcccagcatcgttacacgtccaagttttggccgctaacgacgcttaatgaacgcttagcgtcggcagcaggtcacgcactggttctccaccgacggtaacgctccttagcgaagccagcccgccactctttggcacatcaccgacgctgagagaacctccagcgaagccaaccagccaaccgctggcaacatgacaccacccacacccctcagcgaagccaaccagccaaccgctggcaacatgacaccacccacacccctcagcgaagccaaccggccagcgcatggcaccccaacaccgctgagaacacccaccccaccagtgcacataaaaaaaaactggtcatagcggttgcgatgtaattgcatcgtaatcgcgatgaccagcctcggggggggggtgggctgcaacgagcaccgaatgaatcagatgacgatgccgttgcagtgatcgacttcgtgttggatgatctgcgcggtccagccggtgaaggtggcgtggcgggcgcggaaccgacggtcctcgtagttgacctcgatacggcggcagcgcagtgtgcggcgttcaccggtcagcgacaaacagccttcctgggtgtcgaaggcaccatccgaagcggtgatcacggggttgagcatcaccgtgatacgcccgccaaggtcttcatccacgaagacgatgatgcgtttgcctacgccgatcatgttggcggccatgcccacgcaccgtgaacggttggcctccaacgtatccacgaggtcctgaatagttgcctcgtcgccgggcccagccgcttcagacggcgtgcgcaaaaacgaccgcgaagtcataatagggcgttgcatgttggaatcacgcttcttcgtgccagtggatgttggtgataagcggcagggagatgccggtaccgagcgacatgaccagtcgggcggcgagcagcatcgggaagttgaccgcgagcgcgcccagtaatgtgccggcggtgaaaatcacgatggccatgatgaacagtgttttggtggcgaatttgcgcaccatgaacggcgagctcggaatcgacaccgacagcaagagcagataaccggtgacaagccactgcaccaccgaggcgccgatggagaactcctccatcggcgtggagtaggcgatgttcagtgacgtttccgataggatgccgaggaaggtcaggatcgcgagcgagacgaccgcgatgacgagtttgttggagaccggttgcttgccgccgttaggcagctgtgttgcggaatgagtcacgatcttgttctctcctccattcattcagatattctgactacgacgttggaagtcttcctgcatgagtcgcagagcctcggtcaaggtgcgtaccgtggtttcgcactggtccgaggtcaatccgcccagcagttggctcaaatgcgcgtgatattcctccatatagatgcggcggatatccaagccgcgttcggtgagcgtgagcgtcaccgcacgccgatcggcggcatcggcgtgtttgacgacgagtccgaggtcggccatttcgccgacgagcttggtgatgctcggcgtagtgacgccgaggaatgcgctgacgtcgcccacgcgcgcggtgccggtatcttgcccattcggttcgttgatatgccagacggcgtcgatcacgtggacatagcgcggtttcatacctttcggcaatgccggcatcagttcggtgatggtcttggccttccagcagacatccaggaggctccgcacctcattcaccggaagcaagccggtcttggtatcggttcgggaatcgcacatcgctggcccaacctccaattagttactaatagtcattaccataagtaactatatgcaggctctagacaaacccaacaacctgcgcgcccgtgtcgagttccgtttcggcataaaaaaaagccaggggatccctggcttgcaatgcacatatcgctgcaggtttgccgggacctatatgttcccggcaacaacagccgtatatacgttaccaatcagtgctgccctcatcatccttggcacccgccgtggcggcctcagtctccttggcgttccacccggtgacggcattccaaccactccatccgatgaccactagcaagcacagcgagaagacaatagtggcccaattgaacagcgagccatcgttattggcctcgaccagtgactgccagagccagataacgcaggccaagcaggtcaatgcatacatacgggaggtggagcgcgcggtgagtttcatggcggaaaaagtcctttgattacaagaatgacggcagataacagtgtgggatccgcaccagcggcaccggcacgaatcccacatcgaggaggagaaaggggaaggtcagctcttcttgcgcttggatatgatgtccacggcgacggccagcaggagcacgaggcccttgatggtcttcaccacggcggtgtcaacacccataatcgacagaccctggttgataacacccatcacgaatgcaccaatcacagcgcccgggatggtaccaataccaccggtgacggccgtgccaccgatgaagcaggcagcgatggcgtccatctcgaactccataccggcctgagcagttgcggaagccagacgggaaagcatgcagacagcggccactgcggacaggaagcccatgtggacgaacagcaggaagtccacgcggcgggtgttgataccggagaggatggcggccttgcggttgccaccaacggcgtacacgtggcgaccgaacacggtcttggtcaggatgaagttgtagatgaagaccagcacaccgacgatcaccagcatgatcggggtaccaccctgatcagcgttaccggaggaagccagcaggtaggtgacgaaggcgatgacgaccgcgacaagcacaatcttgaggacggtcaggctcatcggctcgggcaccaggccgaccttggccacacgggcgcgcttgcgcagctggctccaggcaaagccgacaatgcacaggatgccgagcacaatggtcagaccgtcgaacggaccccaccagccaaggatgttgggcaggtagttacgggcaatgccacggaattcgagggaggtaatcggcacggattcgccgacgatcacggtggcgagaccacggaagatcaacatgccggccagagtggtaatgaagcccgggatgccgatgacggcgacccagaagccttgccagacgccgacgatcaggccgacgaccagagcgatgacgatggcgagcatccagttgactccggcgcgttccatcagcagtgcacacacaccaccgatgaaggctaccaaggaaccaaccgaaaggtcgatgtgggtggcgatgatgaccatcaccataccaatggccaggatgatcacgtaggcgttctgctggatcagggacacgaaggagttcggcttcagcagcacacctccggtcaggatctcgaaggccacgacgatgatcagcagtgcgccgacaataccgtattgacgggcattgttggcgaccgtggccagcaggccggtcttttcttctttctttgcaggtgttgcagttgcggcgctcatcaggctgccacctccctttccttggtcatacccttcatcaggtattcctgggtaaatccattcttctcgacattgtcggtgacgacaccgtaggacaccgtgtaaatgcggtcgcagataccgatgagctcaggcagctcggaggaaatcacgatgacggccttgcctgcatcggcaagcttatcgatgatttcgtagatctcatacttggcgccgacgtcgatgcctcgggtcggctcatcgaggatgaggatgtccggctgcgagataacccacttggcgagcagcactttctgctggttaccaccggagagggtggagacattcacatcgatgtcatgacacttgatgttgaagtccttgcggtactgttcgacttccttgcgctcaaggttgtcgtccacaaccccgcccttgctgatcttggtcagggaggccagggatgcgttctctcggatgttctgcagcaggttcagaccgttgcccttacgatcctcggtggcgtaggcgagacctgcgtcaatcgcggactgcacgttgggcatcttgacttccttgcccttgacgaacaccttgccggagatgttggaaccgtaagagtggccgaagatggacatggccatttcggtacgacccgcacccatcagacccgccagaccgacgatctcgccggcgtgcacgttgatgttcgcatggtctacgatcacgcgctccgcgtcgagcggatgatgcacggtccaatcctcgacgcgcaggtattcctcgcccggggtattggaggggtggttcgggtacaggttgtgcagcggacgacccaccatcttgcggatgagttcttcctggtcgagcggcgtctccggcgtcacgtacatcacaccgacggtcgaaccgtctcgaatgatggtgacattgtcggcaatggcggcgacctcgttgagtttatgagtgatgatgatgctggtcacgccctgctcgtcacgtagctgacgaaccaggtcaagcaggtgggcggaatcctcatcgttcagtgcagcggtcggctcatcgaggatgagcagcttcacgtccttggacaatgccttggcgatttcgacgagctgctgcttgccgacgccgatgtccataaccctggtatccgggtcttcgggaagtcccacacgatcgagcagcttcttcgcctcggcgcgggtcttgtcccagtcgatcacgccacccttggcctgctcgttgccgatgaagatgttctccgcaatggacaggaacgggctcaacgccagttcctgatgaatgattacgatgccgtcggcctcggaatcattaatagtatggtatttgcattccttgccatcaaaggtgattttgccggaatagctaccgtatgggtacacacccgaaagcacgttcatcagggtcgatttgcctgcaccgttctcgccgcagatggcgtggatctcgccgcgatcgacggaaagattcacatcggtgagggctttgaccggaccgaacgtcttcgtgatgttttccatcgtcaagatggtgtcatttgatgacatgtcatcactcctcgtcacagttctgtgttcatggacatgcggcgcatatcggctatgcgccgcatgtcattgtgtttgtttacggattgcctgatgaggactacttagtcagctcgtcgaagcgatcctgggtgatgtagttggccgtgaccagatcctggaggttgtccttggtgatgttctgggggtcaagcagcttggacgggacgtcgatgttgttgttgttgaacttgccgttcaggccggagacttccttgccctcggcgatctcgacgaccatgtcgtacacggcgtcagccagcttgttcacgtccttgaacacggtctcgccctgcttatccttggcgatgttggcaactgcgatctccatggcgtcctgaccggtgatgtacggccaggagtcggtgcccggcttcatgtcgggacgcttggattcgatggcgttgatcacaccctgggcgatgccgtcgtacggagtgaggaccgcgtcgagcttctcgccgtgggcgtaggtggagtcaaggatggattccatgtccttctgcgcctgctcggtcttccagctcatcacggagatcttctgccaatcctcaacggtgaagtccttggtcacgccaccctgaccatgctgggacggggagacgagcacgcccttctcgaagtacggctgcagcagatcccaagcgcccttgaagaagtacttggcgttgttgtcatccggggaaccggtgaacagctcgatattgaacgggccggtggcgccatccttaagcttgagctggtcaatgagccacgtggcctcgagcacgccgacctgctccagctggaaggtggcgtagtagtcgacggcgtcggtgttcatgatcagtcgatcgtaggcgatgaccttggcgcctgcatcgcgggccttctcaacggcggggcccactgcggtgccgtccttggaagcgaccacgacgatcttggcgtcgttgttgaccatgttctcgatgtcagcgttctgctgggccggcttatcgtcggcgaaggacaggatgaccttgtatccggccttctccagcttggccttcaggttgttgccgtccttgttccaacgctcttcggacttggtcggcatcgaaatgccgatagtggcgcccttttcgatcttggcatcaccgccagttgcctggccgctacggctgccaccgcaggccgcgaggcccgcgcacatggcaacgcctgccaccacggcgacgatcttcttagtgaacttcatttgttctccttcatcttcgaggggatggcgaaccctccttggtcgcccgaacctgagaataacctcaggttcatctcatagaataccgtattgaattaagttgtcaaactcaagaaagcgaatttcctgtcgtttatgttcaaccaatgaacgcaatggcgattttttgcgcatcacaaggcgacacgccgaaaaatccacgctctgcgcctcgctgtgcctcatgccggtaacgactacactgaactcttatggcaacaaggcttttcggttcgcagacctcgcttcgcgaggcaaaccgcgccaacttgctggccagcatccacaagttcggcgccatgacacaggtcgaactggcagaggtgacaggactgtccactgcgaccgtgtccacgctcgtccatcagcttgtcgacgaagaccagctggagaccaaaaacaccgttcgcaacggtcgcagagccactctggtgacccttgcacggcatcagggcctcggcgtcgggctttggatcgcgcgacgtcatcttacgctttctatcgttgacttctcgaagtcaatcatcgctgagcacacgctccccctgccgttgggccacaaggcggacacaacgctggaacgcgccatgctgctcatcaatgagaccctgagcagcatcgacgccgaagccagcgagctggtcggcatcggcgtggccgtggccgcaccggtggccaccagcgaccacaccatagcgattcccggcattctgcccggatgggacggcgtcgatatcacggccccgttgcgcacggcgttcaacgttcccgtatacgtcgataatgacgcgaatttcgcggcatacggcgaatcccgtatgggcgtggcggcaggcaaacgcaatttcgtatatatctcagccaacgacggggttggcgcaggcatcgtcatcaacggcgaaatcatgcatggcgtgaccggcctggccggtgaaatcggccatatccaggtcgacccgctgggtgccatctgttcgtgcggtaaccgcggctgccttgacaccgtcgtggcggaaaacaggctggtgcagttgctcagcgtcacacacggcaatatgacgctggatgatctggtgtcctttgccaacgaaggcgaccccggttgccgtcgcatcatcgccgacacggccgtgcgtatcggtcaggtggcggctgatctgtgcatcagcgtggatccggaggtcattgtgctcggcggcaagctggccatgaccggcgacgtattcatccaaccgttcaatgaagcgttgcagcgcatgctgttccctgatgccgtggcacccatcgatgtactcgtgtcatcccacccgaacgacaactgcgcgctaggcggcgcattatgcgccatcgagttctcggttcgcaatgacgtcagccagtgaccggtaccaggagaagagtgagaagaaggaacacaccatgaggaattcgagcacaccccctctgctgcggctggaggacatctgtgtgaagttcggcttcgtcgaggcgttgaaatcggtgaatctgtccatccaacgccaggaggtcgtcgccatcgtgggcgataacggcgcaggaaagtccactctgatcaaggtcatcgcgggatttctgcagccgggattcggccatatctatctcaacggcgaacaggtgaccattccctcgatcagggaggcggaccgcatgggcatcgcatcggtgttccaggggcaggagttctgcgacaacctggacgtggcctcgaacctgttcctcggcaaggagatcaatcagattggcatacgcgatgacgattcgatgaactcgcgtgcccgttccgtgctgaagaccctgagctcggcgattcgggtcggctcccctatcgcatccttatccgtcggccagcgccagaccgtggccatagcacgcacgctgctcaatgacccgcagcttattctgctggacgaaccgaccgccgcactgtcggtgatgcagtcggcggaagtgctcgcatatatcaagagactgcgctccgaaggccggtccgtggtgatggtctgccacgatctgccggatgtgttcgcggtatccgaccgcattgtcgtgatacgtcaggggcacgtcaccggcgtgcatcgaaccgtcgaaacgtcctatgaggagattatcgccgaaatcgccggcgtgaccaccgaacacgagtacgaggaaatcgctgagaacccggaattcgattccatggtcaggcagcggaaactcatcgaccgcactatcagcgcggcagtgagccatggcaccggccatgactcaccattagactaacgtcccgttgccggagcgacatcgtcagcgcagagccaggttggccgcgccgatcagaccggcatcctggcccgcagtggccgcgacgatcttggcatggccgcggtaggcgctgccttctaggaaacgctggtagttgtagcgggccggctccagcaggatgtcgcccacggccaccacgccgccgccgatcacgaacaggtccgggtcaagcacggcggaaacggcggccatggtgcggcccagccattcgccgatcttgccgaacgcatacaggccaagtacgtcaccttcctgagccgcttgggacaccatcggcccctccagtctggtgatgtcgccgccgcacagttccagaagacgcttggcgtcctgaggacgacggcgcacggcggacttggcgaagttctccagcgaggttcccgaagtgtaacgttcggcgcagccgcgcaggccgcagccgcagtggtcgccgtccgggaccatcggcaggtggccgagctcggcggccatgccgaaggagccgcggtagagctggccgttgatcacgatggcaccgccgaggccggtgcccacggtcagcgcgaccatgttggagctaccctggccggcgccgtgcacgaattcgccccatccggcgcagttggcgtcgttttcgacgatgaccggcacggcatggtcgatcagcgcgccgacgtgctcggacagatcgtagttgatccatgccggaatgttggcggagaaggtgagcgtcttgcgatccgcgctcacattgccggcggcggagatgccgacggcctcgatatcggtgtgcccggcggccacagcctcgcggtacacctcggcgatgtgctggttgatggcgtcggcgtccatcggcgtggggacgcgccagcgctggatgatgctgtcattttcatcgcagacggcggcggcgatcttggttcctccgatatcaatggcgagcgtggtcatggcttactccttgaagactttcgtaacatgcgagatagcgaaaatagtagcgagccgccatgacctcccaccgcggtttttccgtggttcgtcatgcgtcgcgaacattccaccgatgcgcttcctcatgcatttcacccgttgcaaacgggcgccccttaacgccggcatcggtgcggacggcgtgtcgaatcggatgcaatcactttcaccgtccttgcggatggcatcgaagaacggtaggaaacaaaaaaactcccgacatgcatcgggagtttggtggcgaccccggccggacttgaaccggtgacctccgccgtgacagggcggcgctctaaccaactgagctacggggccgtgcgtgcctcgctgaggcacaagaggatatgttacagcatcatcggattacgacacgccgtctgatacatcgttccttccaccggcgaaccgaccgcaggtgtggtggacggtatgcggaccatatcgttcgaccgcgcacggccgcactccccataagacagtagccgtcatgcgtcaacgcacgttgtgcgacgacgcggcacgacgcacggccgccgaggccagtaaaccgatgaacagcatgatgccggcaaccagaagcgtccactggccgccttcgatgaaccctgaagtcatcgcatcggcaatcttcggcgcctcgtcgccgaatcgggccgccggtccatcaccgttgcggaacacgccgatcactccacccgccgaaccgctgaccgcttgggccagaccgtcgccgaccttggcgggcagcccgagggattcgagccgcgccggcaatgttccgttgacggccatggccagcgacgcgccggagatggccgaaccgacggcggtgccgagctgtcgaaccgtggactgggtggccgacccttcgccggactgcatgatcggcacttcggagagcaccacgctggtcagctgcgcggaggcgaagcccagacccagaccgtatgcggccatgggaataagctgccaccacaccgacaatcccacaggcataaggaccgcgaccaaggcgacggcgatgatctcgatcacaagaccgagttgaatcacgccggccggggtgagcttggcggccatgacatgggcctgcgcacctgcgacgatggaccccaggcccatcacggccagcatcgcaccggcctgcagcgtgttaagcccgcgggcgttgatgaggtacagcggcagcatgaacaccagcgcgaattcgccggcggcgatggccgcagccgccagattaccccacgagaacgtcctgatgcgaaacagggtcatgtccagcatgaccggccgaccggctttgccccgcgctgactcgaagacgatgaagacagccatcagaagcgcaccggcgatcaggcagatcggcaccggcgacaaccagtcacgattccagctcaacccgcccagtttcaactgcgttgaggtctgcttccaccagccgtaggtctcgccttcaataagaccgaacaccagcagggccgaggtcagggcagacagcaccacgcccggaatatccacaccgacacgatgggatcgggcatcccgtgcggcatccgcggcgccggcgaccgaggcgttcccaccggtttgcggcaccaggaagatggccgacacgaagaccgcgatacccagcggcaagttcaccaggaaaatccaacgccatcccagagtctcggtgaacacgccaccgagcagcgggccaagcgcggcggccgaactcatcaccgcaccccagacgccgaacgccgcggcacggtatttgccacggaacagggcggacaccgtggacagggtgttcggcatgatcatcgcgcctccgatgccctgcagcacacgggcgcccagcagcatccccgcgccttgcgaggcggcggcaagcaccgagctcgccacgaagatcacggtgccgacttggaacaccagtttgcgccctctggcgtcgccaagtttgccgaaaggcagcagcaacgcggcaagcacgatgttgtatagcgaggtgacccactgggcgtcggtcaggttaatgccgatgtcgtcgatgatggtggggatggagacgttgacgatcgagctgtcgagcacgatcatggccaatcccagggccatcacccacagcgcgccccacggcggcgcctgggtgggcagcggcgacgaggccgtcggattcgttgaagagatcgaagacgcatcggcctgagtctgatgctgaaatcgggatgcatgatccataacggggtttcctctcattgccatgattgcggcgaccgacacgcctatgcgccattcacggtacatccgcggcctggaccgtctcgccggatttcgcgggacattccgggcgttcagccatgggcgtaacctcggcggatcactgaagagaggagcaccaaagacggccgcactattccagatgcgtcatttcgaaatgaaagcccggcagaacgccggaatcgcaacgatcgacaaatcgccagacgatacagggccgggctctcgctcaggaaacagggcatgcccagcgcccatttaccggcgtcggcaatgacggcatcgccgccgccttccacgtctcctcccgatgaccgaatcgctaattcccgcccgccagaaccccattgcatcgtgtagacgggatatgggataatccacaaggtgcttttgcgtaggacccaggtgccggcgatgacacgggacaaccacaacagcgaatgacgcacaacgggccgtccgggacacccccgtaaacggtcgcgtcgttttccattggtgtcattgcggggtccgggtcccgcaaaacgttggaaaatcagcgtttcttgaacgataaggtaacatatggctgagtttatccaccagatagttcgtagtcactgagccttgctattccaacgtttttcccgcatgtcccgtgacacaacagcatgtcactcatcggctacgaatcggcttgtgtcaaagttgcgtcatccgacgctaatccgagacccagcattgctagaatcgatgtaagtgatgccgacgcgacggcattccacatcacggaagattcattcactttcgatgaggcaaggaggcgagacatgacgaagctcgaacgcaaccagatcgatttctccacgtttatgctgtatcggctcgccgagcattggggcaagtccgtgcccgacacctatcgcattctcgataaggccaacgctatcgacggctaccttgtcccctgctacgacatgctgcacacactcggcagcgaatacctcgtcaacgacctgacggactacgtgcgcgagcggggaatctgcatatgaggctgtaccacggttccgacgtcacaatcgaaaagcccgacgccatccacttacgcaagaaccttgatttcggctcggggttctacgccaccagttatccgaagcaggcggaacgctgggccttgcgacgttcattgcgctcgcatggcaaagcgctggtcaacgtgtacgaattcgacgaaacggcgaatctccatattctgcgtttcaacgagaacgacgccgaatgggttcgattcgtatgcaactgtcgtcggggcgggcagcctcccctgggaactgacctcatcatcggaggcgttgcggatgacaaggtctacgcggccatagacatgtacatgcgtgagctatgggacatggagcgcaccctgcaggcccctgccttctacaaacgaaacgaccagtaccgcttcctcacaccccggtcgatcgcagccctgcgatacgtcgagacctacgaggtgaaacaatgacgatcacgccacaaaccctgacgaagctcgaaacgctacgcaaggagcatctcgaatccgatctcatcgcgctgatagccgaccaatacgacatgacagccgccgatgcgatgaaactctattattccagccaactcagccaacaggtggccgacggctcctacggcatcgaacaactcgacgcgcgctacctactcgacgaccttcaacgatacgagccgcaactcttcagaaccgtcaacgcgactgaatagggcacggctgccgagttccgacacgagcaccctcgcatcccatcacattccgtagcgacgcggtgtggacgacaaggcaacagctcgtcccgttactcggacgcggcatcacgacgatcagcaaaacacatcggcaatgccaagcgtgaggaattggacggaatcgcccccagcggcacaacccacgagctacatctcgcctactcccctgcgtcgggatcgtatttgagaatgtcgcccggctcgcattccaaggcctggcagatattggccaacgtggtaaaccgaatcgcgttgaccttgttgtttttgatcttggataaattgacgttagtgataccgacctgctcggcgagatcgcccagtgagatgtgccgcttcgccatcatcacatccagttccagaacaattttgcccatatcaaccttccctgaatcgcgcaatcatcagagcaggccgtcgacgtcatgctcaagctcggcgccgtatgcgaagaattgcgccaggcacagcacgacgagaccgaaggcgatcggctgcatattcacgaagaattccaccttgcggctccccaccacgagatcgacgacaaccatgaaaatggcgttgatgatgggggcgatgatggatagttcgccgatgcggcggacgcgttgcacgttggccttggtgaagggagattcggtttcgctggtactgaagatcagatggatgtttctgaacaccacagccatcatcccaagcatcgccaccatggcgattgcggcgacagcgaaaccacgggcgagcacagtggcatccgatgccacaggcagcagattcgggtccccaacgataaacagattcccggaatccaagccttcctgaacccaccgcaccagcggagcaccggcaacgaccagggcgaccagcatgcccgcatacaccgccgttgcgatccagagcatcacttccacaatcttcgcgatgaccttgaccgccgcgttaagcttcgttgccttcatcgttatcacttcctttgacaataatgaaaatatttattatttgataattttttatcgttttacgataattattttatatcagacgaatactttctatgcaatgctcaaagcatcggcgtgttccgcgatcgaaagcacctgcgccatgcgctacaaaccgatcaccgcaatatgcaacctgccccgcacctcgtcaatccaccgttgcggcatgacgatgggatatgggataatccacaaggtgtttttgcgtaggaccatggcgccggcgatgacacgggacaaccacaacagcgaatgacgcacaacgggccgtccgggacacccccgtaaacggtcgcgtcgttttccattggtgtcattgcggggtccaggtcccgcaaaacgttggaaaatcagcgtttcttgaacgataaggtaacatatggcagaattcgtatttcagatgatcaaggcccgcaagtcttacggcgaccgcgtgattctcgatgacgtgaccctgagcttcctgcccggcgcgaagatcggcgtcgtgggcccgaacggcatgggtaagtccaccctgctcaagatcatggccggcctggagaccgtgagcaacggcgaggccagtctgaccccgggcttcacggtcggcatcctgcagcaggagccgccgctggatgacaccaagaccgtgggcgagaacatcaagatggcgttcggcccgattgccgagaaggtcgcccggttcaatgcgatcggtgaagaaatggccaacccggacgccgacttcgacgcgctgatggaagagatgggcaagctgcagaccgagatcgacgccgccgacggctgggacctcgactcccagcttgagcaggcgatggacgccctgcagtgccccgatccggacaccccggtcaacgtgtgctccggtggcgagcgccgccgtgtggccctgtgcaagctgctgcttgaggcccctgatctgctgctgctcgacgagcccaccaaccacctggacgccgagtccatcctgtggctggaacagttcctgcaccagtacaagggtgccgtcatcgccgtcacccacgatcgttacttcatggacaatgtggccgaatggatctgcgaggtcgaccgcggccacctgtacccgtacaagggcaactactccacctacttggagaccaaggccaagcgtctggagatccagggagccaaggacgccaagctcgccaagcgactgaagagcgagctcgactgggtgcgctcctcccccaaggcccgtcaggccaagaacaaggcccgtctggaacgttacgaccagatggagaacgaggcacgcaacaacaagaagctcgacttctccgagattcagattccggccggcccgcgcctgggctccaccgtgctggaagccaaccacatccacaaggccttcggcgatcgcgtactcatcgacgacctgtccttcacgctgccgcgcaacggcatcgtcggcgtgatcggcccgaacggcgtgggtaagtccacactgttcaagaccatcgtgggcctggaaccgctgaccagcggcgagctgaagatcggcgacaccgtcaaaatcagctacgtggaccagaaccgtgaaggcctggacccgaacaagaacctgtgggaagccgtgtccggcggcctcgacttcatcgaggtggccggcgtggaggtgccgacccgcgcctacgtggccagcttcggcttcaagggcgccgaccagcagaagctgaccggcgtgctgtccggtggtgagcgcaaccgtctgaacctggccctgaccctgaagcagggcggcaacctgctgctgctcgacgagcccaccaacgatctggacgtcgagaccctggaatccctcgaaaacgcgctgctcgagttcccgggctgcgctgtggtgatctcccacgaccgttggttcctcgaccgtgtcgccacgcatatcctcgcgtgggaaggcgacgacgacaatccggccaagtggtactggttcgaaggcaacttccaggcctatcaggagaacaaggtggcccgactcggtgaggatgcggcccgcccgcaccgcctgcacaagaagcttgtgcgcggctgagatacgccggcattagtgccacaacgcgctttatacgtcgaaagccgtccctcaggggcggctttcccataattgcccccatgactgccccgccccgcatcccataaaatcccacagtcacctacggcaacgcaccggcaacacaccggcagtgcagcagcaacgtagcggcaacgcaccgcataaccaaccgtttaccttccaaacagtctcgttacatttcgctcccggaactcttaacccccaccggatagactgccaaccataggttggaatacgataaccgaatatcgaacacagcagaacaggaatcgaggaacgccatggctcaggcaaccaccgtaactccattggaccatctggtgaaggtgctgaagttgggcgagccttccgcttaccgcaatcacacatacatcaatggcgagagtatgtacttccccactggccgcgtctacggtggccaggtcatcgcccagtcggtgatcgccgcgtccaaaaccgtgggcccttcacgcctgccgcattcggtgcatggctatttcattgccgccggcgatattcgtcaagacctgctgtttgacgtcgagaaccttcgcgacggccgctcgttctccgctcgtcgggtcaacgtcacccaagccgaggggtcgattctcacggccatcgcctccttccaggagaccggtcaggagggtgtggaatttgccgatccgatgccggaaaacctgcccgatcccgaaacgttgacttccgccaaggaactcatgcagccgttcgccgaaaagtcgccgttcgccaatttctatgtcgagaaatcgccattcgatatccgccacgtgacgccgaccgtgatgctgcgcgcggacaaggattccgccgagcatgattccggcaagcagatggtgtggatgaaggccgatggccacgtcgatgtgccgcaggtcatgcatcgtgcgatgctggcactcggctgcgatcaggtgatgatggagccggtgctgcgccgcgccggactgtcgatttccacaccgggcatttcctatgcgtccatcgaccattcgatgtggtggtatcaggatatcgatatcaacgaatggcatttgtatgtgcaggatacgcctatcgccgcgcacgggcgcggactcggcatcgccaaagtgtatgcgcagaatggcgacttggtggcggccatcgctcaggaagctatggttcgcgtgccgcaggaatagcgggcatcggcgtggccgatggtgtggttttttcttcttctctcccccagtcggctacgcctacggccccctcgtcagagggggcttatcacggattatcttctgtaggcctgggctatgtcgctacggcgcttggcttccttgattttcgggttttcggggccttcgttcggcggtaactggcacaaccattcgccgataatgccgatgatcatgtcggcgatgcacaccacggccacgattgcgcactcggtgacggcgtgtgcatagaaatccgcctcgatatggctcaggctcatcacaatctgaccgccataccagccggcgagcgttgcgcccgccaatcccagtgccttagacagcaccagcgtatacaccgcgatagtgggattgatgaagctatgcggacgcttcttggggtcggtattcgcgtatttatgcacttgcagggccaagatcagcacgataacgcccagcacggccagcaatccggtcacaatccaaggcgcaccaatcagcgacagtcccgagctttcgccgtaggaggccagaccgatacccgccaacaggcccagcacagcaccgatcacatactgccaccatggtgttcgccgtgttttcatgtccggcctccttatcgttgcgttgctgtttgctgtttgcgaacggccctcgcgcctgggctgttcatcttgatttggttttcgtcactgccgtgcccggctgttcgaggccggagactggtccgtcaccgtctggtttctagcctaccgttcgtaactggttctgccatcagctcaactgttcgacagtatccagttgtccgatagcaatccgacctgtccggcatccggtgccatggccaaaaggaaagccaccgggtcgccgcccagagaagcattcgggtccatatccagccaaggtgccaataccgacgcatggttacgggccgacggccaaggaatgctgcagttgggctcgtcggaagtcacgccttccatgtcgacaaggtcaaggtcgactgccagatcatgaacactttcgatgctgcccaatacggcaatcaggtcggcgggcggcaacttggtttcgatttggatgaccgcgctcatcgcgtccgggccgtcgaaatggctgacatggtagagcggcgagatgccctgtacctgattgccaggaacactgtcgatggaaacgatggtttcgcggaacagccgttcgacatcctgcgaggtggaatccagcgaaataatcgccttgcgtgagacgggtgccgactccgacgctgattcttgcttgactgcatgcccgccgagcatccagtcttcgctctcgagctgcacggcgttacggtccggtgcggcggccagcaaatcggctacaggcccctcatgggctccggcaagtttggcgttcggattcagcgccgcccagggagccagcacaaacgcgcgctgccaagcacgcggatggggcaatgccagatccggatccgcgctggtgatgccatcaaagtcgataatgtccaagtccaacggcctggaatcccaatgattctcacgaattcgcccatggttcgcctcgatgctttgcaacgcggcgagcaattcgtggctgcccattgtggtttcaagctccaccacggcgttcaggaaatccggcgtaccgtcagccatgccccacgcggccgtgcggtaaagcggcgaaataccggtcacctgtgtgccgagcagcgcgtcaatctcccgaacggcggctcgcaaggtggattccacctcgcccacattgccgcccaaggccaccaccgcgttatggatggcatgctcttcagcagtgcgtccattatcggtggcacgcacgcgcgagatagagaccgatacatctgcaaaagccacgacgatgggcgcatgaggcttgtgcacggtgacgtcgatggaggcgacggccggcgcatcggcaaggatcttatccgcgatacgttgggccagacgctcgatcaggtccacatgagggccttcgatgacagccgcgatatccttggccacacggccgtaatcgatggtgtcgttgagatcgtcggattgaccggcggcggccagatcaaggtgcagggtgacgtccacgacgaaggtttgtggccgttcgtgttcaaaggcgagcacaccgtgggtgccgttggcatgtacgccggtaagagtgatggtgtccattggtaaggctttctgctcaaatgctcccctcagtcgccttcggcgccagctcccctcgtccgaggggagccaagacctagaagcaaccaaaacagggagccaggggaatcatgcgtattcgcgccaggtgttgccggcgatgacggcggcgcggcttttggccacgtcgtgtacgcgcacggcccatgcgccatgttcggcggacagggcggacaaggctgcggtcacgtcatcgcgctgggccatgatcggcccatcagcaccggcagcgcccgcctcggtaagcatcgccgagatgaagcgtttgcgggactggccgatcagcaccggatatccggtggcgcggaaggtctcgagtccggtcagcagcggcaggttgtgctcgatgccgggcttggagaagcccaggcccgggtcgatgataatgcgctcaggctttacgccggcggccagcacaccgtcgacttggcgcatgagttcgtcgtgtacgtcggtcaatacaccgtgctcgtagacggaggtgtcttgatcggggttcgcgcccttggagccggcgagccaaccgcgccaatgctgcacgatgtacaggcagtcgtggtcggcgaccacatgcggcagttcggcatccagcgtgccaccggagacgtcgttgatgatctgggcgccctcgctcagcgcagcggcggccacggatgcgcgcgtggtgtcgatggacagtatggcaccggccggaatcaatgtcttgacggcaccggtgatgcgggccagttcgtcggcctcggacacgcgcttggcgccggggcgcgtggattcggcgccgatgtcgatgatggccgcgccggcggccatcatgtcgcgcccgtgttgggccgccttggccgggtccagccacaggccgccgtccgaggacgagtcctcggtgatgttgagcacacccatcaccatggtgtgcgtactgtcatgcaacgcctgcaaatcagtcattatgtttccccttctatgtaggtcccaagtgagctccctatgatgagggagcttagtagacactatttatccaaaatgaggctcatggcttcggctcgggtggccggattgcgcagcatgccgcgcaccgcagaggtcaccgtgcgggcggaagacttcttgatgccgcgcatagacatgcacaggtgctcgcattcggtcaccacaatcacaccacgtgcgcccgcatactcgaccagcgcgtcggcgatctgctgggtcaaacgctcctgcacctgcggccggcgagcatacacctcgaccagtcgggcgagcttgctcagccccatcaccccgtccttggcgggaatatagcccacatgggccacgccgtggaacggcagcaggtgatgctcgcacaccgaatacagttcgatgtccttgaccagcaccagttcgtcggtatccacgtcgaagtgcttctccagcacatcggccggggaagcctgcagaccggcgaacagctcgcggcacgcgcgggcgatacggtcaggtgtttccaccagcccctcgcgctcgggatcctcgccaatcgacttcaggaacagacgtacggcctcgcgcacgccttcctcgtcgtatgtgcgtttctcccgatggcaagactctatatattcgttcatctcatctctcccttgtcattgtccacaacgacgtcggtccggcctgcgtacgtgagaaaccacatgaacaggtcgggccgaatcgtcatcgtgtctactcttccggcttcatgccgaccgagcgcttaaggctttcgggaatctccaccggcggcttgtccgagtcggggcgacggtcgttggacaaccacaccggacgaaccggagccttcttgatcggcgcgaagatcgccgcaagttccttctcgttcagggtctccttgaccaacagctggcggaccagctcgtcaaggatctcgcggttgtcgttgatgatggtccacgcctcggtgtgcgcggtctccaccagcttgagcacctcgtcatcaatcacttcggcggtgcgatcggagtacttgcgcggctgcagaccgtccatcacagtggtctggtcatcgtcggaaccccacttgatggcaccgagcttgtcggagaagccgtattcgatcaccatcgtacgggcgatgttcgtagccttctcgatatcgttcgaggcaccggtggtcgggtcgtggaagacgatttcctcggcggtgcgaccgcccatcgcgtaggccatctggtcgagcagctggttgcgcgactgcgagtagcggtcggaggtcggcatgacggcggtgtagccgagggcgcggcctcgcggcagaatcgtcaccttggtcaccgggtcggtgttgttcagggcggcggctaccagcgcatggccaccctcgtggtatgcggtgttgcgcagctcttccagagccatgcccttggacttgcgcttcggtccggcctgaacgcggtcgatggcctcgtcgatggcgcggttgtcgatcaactgggcaccggcacgggcgcacagcaacgcggcttcgttgagcacgttggccagatcggcaccggtgaagcccggcgtgcgcacggcgaccatgtgcaggtcgacgtccggtacgaacggcttgcccttggcatgcaccctcagaattgcctcacggccttccagatcaggggcggccacgcccacctgacggtcgaatcgacccggacgcagcagagcggggtcaagcacgtcagggcggttggtggcggcgatgatgatgaggttggtgtcgttgtcgaaaccatccatctcgacgagcagctggttcagcgtctgctcgcgctcgtcgtggccaccgcccatgccagagccacgcttgcggcccacagcatcgatttcatcgatgaagatgatggcgggggcgttcttcttggcctcatcgaacaggtcacgcacacgggaggcaccgagacccacgaacatttcgacgaagtcggagccggccatcgagtagaacggcacgccggcctcgcctgcgatggctcgggccagcaacgtcttaccggtgccgggagggccgtacagcagcacaccgcgcgggatgcgcgcacccagcgccttgtacttggacggatccttgaggaagtccttgatctcctcgacttcggccacggcctcgtcttcaccggccacatcggcgaacttggtggtgggggtctggccatcgagtagcttgccgctgttcttcttgccacccatgccgagcatgccgccggcaccacccatgcggctcatcaggaaccagaacagggcgaagaagatgatgaacggcaggatcgaggtgacgaggtagctcagcatgctggtctgctcgatattcgaggtccagcccttttcgagatcaccgttctccacggccttggccacctgtgcgccctgcgcgaaggtgtagtagaactgcacgttcttgccgtagttggtcaccttgccggtgtcggcgttcttcttggtgtagtcgttcttcagcttaaggcggacgacctgcttgttgtccgtgatctcggcgtacgtggccttgccctgattgatcagcgcgaaaccatctttggtgtcgatggttttggtgccaccgccggcgaacatctggaacatcagcacgaccatgaccacgagcacggcaccccatagccaaggggactgccatatcgggcggttctcgttgttgttgcctttgccattgttcccgttattgccacggttgaacgggttagtgaacgggttgccgttgttacggttgttgttcgggttcggattattgccgttacccggcccttgcgggaagctcatgcttgcactccttggtagacggacggcttgaggaccgcgatcgaatcgaggttgcggtagcgctcgtcaaagtcgaggccgaagccgacgacgaactcgtccggaatctcatagccggcgtacttcacatcaacgtccacttctcggcgggaaggcttgctcagcaaagcgaagacctccacggaagcggcaccacgacgtttcagttctgcgaccagccacgcgagcgtgcgtcctgaatcaacaatatcctccacaatcaaaatgtgccgtccgcgaacatcggcggacaaatcctgcctgactgtgacctcaccgctcgacactgtgcccgagccatagctcgaaaggctcatgaagtcgatctgtacaggaatgctcatggcctgggtgaacgcgaccagcgtattcacggcccctttcagcaccgcaacgagcagcggattcttatcgcggtaatcctcgctcgcgagagcggccatctcgtggatcttggcatcgatctgttctttgctgaccagctcgtggtcaatatcttcctcaacgtcagcgattcgcatgcgctccatcttggcacacgcgaatgacgtgtttcttgcgattggctgaataacctctgggaagtgagacgccgccttggccatgccaatcgacgaccagccggtcgatggcggcaatctgggcggcactggcgttcacaccggcctggctcagcgcgtgagcgatgacccgcaaccgaatcgcctctggctcacgtgcaatacgtctgacgccgatcatcaggccgacaccatggctcgaatcgttggtatcgcctgccgcacaggctcgtggcgtatcggtcgataccgctgccgacgatgccggccaatcaactgtcgtaaccgcctcccccatcacctcgtcggatcgctgatccagatactccttatccattctggccaaccgtgcgctttcagcgaaatggcgggcgacattgaatccagcgaatcgctcgatggccggcagcaggtcatggcgcacccgcgagcgcaacggatagtcgttcggcaactcgccgtctaccgcatcgccattggtggggtcatcccaatattccacacctaagtcttcacagatgccggtggtttcggctcgagtaagggtcagcagcggccgcgcaaaagtcgcgccactgcgtgtgaagacctgcggcatgccggccaacgcatccacgccacggctgcgcagcagtccgatcaatacggtttccgcctgatcgtccatagtgtgggccaacagcacggcaatggcacctgattcacgcgccgcggcgcacagctcgttgtaccgggcctgccgcgcggccgcttcgaggccctcaccgcgtgcctgcacggttgcgttgcgcacgatgaccgggcccagtcccaacgcacggcaacgattcgcagcctcgccggcgacctgttcggaaccctcctgcaagccgtgatccacaatcacggcaccgcaatgcacgcccatggacgtgcatacgatatggctcaccgcggccagtgccatcgaatcgcgcccgcctgaacaggccacgagcacgagcggcgcatcggcggcaacggcatggtccccatgctgcgcgaattcgggagcctgcacatcgcatagttccacggcgctcagcgttgcgcggaccgcgcctacggccttgcgcaatcgtgcggaatatgccatgtactcaccaccctttttctggttatgtgtactcgtgcgtttatggacgtttacggcctttgtagcctttgatggcacttgatgtgggtcttttacagccccgcgagcttggtgatgaacgagtcgatggcgctacgcgcggcggcataatcctcaggattgttgaccaccacggcaaacgacaacgctcccccattggtacgggacacattgccggccatcgacgtgaccgtgccgaggctgccggttttgacgcgcagcagaccggccacggcatcatccgtataccgatcctgcgccgtgcccaccaaccccgcgatggatagaccttccgcaccagcagcaccgctctcggtggtcagattacgttgttggacggccgccagcgtgcgtacggtgagccgggagccgggagacaggccggagcaatcggccatggtcagaccggatgtgtcgagaccgagatcgttcagagtggatttgaccgcttccgtgccgccttcaggactgtttgtcgctgatttcgccaaggcggtgagtctgccgaactcctcggccagcgtattgtccgaatgccgtaacgtgtatgccatgatttcggacagtgttgccgaactcaccgaagccaaaggcgtttcgccggatggagcggtgtttgccgtcacgtctccggtaacggccacaccgttcgattggagcagttcggcgaatttcgtggccacgtcgctggcggtgtgctgggacagttccgggtatccggccgaatcatcagggtcggccggcgcaggcgtatcggcggtgtattggcggcctccatcaatcgccattgatgagaccggcgtgaagtagacggtgtagtcgcttaagaccgcgccgccttccgacagacctgcgggaatgcgtgagtcgccgaatagggtgtcgtcgtactcgagattgacggaagtgatgcctcgctgggcgagcgcggccacggtggccttggccaaggtgttcagaccggcacgtccgttggtatggtttgcgtcggaatcgcctgcagacagcagcatgtcgccattgcctttgagggtcaacgtattggtgccgtcatcggattgggtcaggaacacttgggtatccaaggtggatgccatgttcagggtggatgaggcggcgagcgcggtcagcgttttcagtgtggatgcaggctcgcgtggagtgttcgactcatgttcggcggcgacggtgccttgggcgtcttcaatgatcaccgacgtatcgtttcccacgccttgcgcggacagcaattcgttgaccagtgcagaagcggccgtggaatcaatggccttgttcgcgttcagggcaccggcgatggtgccgcctgatttggcggtggccggattggcgaaaacaggtgcggtgacgggcttcaacgtcaataatccgggggccacgtcggtgatgtcggcggcgcagtaccccgcgaacagggcgatggtggtcagtgcggaaatgatgacggtcagtgttcggcgatgcgatcgttgggtccgccgttgcgcttcacgtcgctggcggcgtgataccgctgtagataccatcgtgctccttatgccaaggcaatcatttctgcaatgaggcgaacgagtcgagtgttgccacaatcgagagcattcgcgcatccatcagcttaccgcccagccatgtcccgagtgccagaatgccgatgccattggccagcgcgaccggaataatcgccagccacatgccgccttcggctcctgtcagcagcatgaccagcgccacgatgccagtgggcagcatgagcagcaggctgccaagcatgtagacgaacgggaagaagccttgggccatggcgcggccttgaggcgcggagaacggcttgtccattgaggcgaccgggtacatcagtacacaggaggtgacttcggccacgcccagtccgctcaaggcgatgcccatgcccgtggcgaggaagatcaggccggtagcgaggtcatcgggctgcgcccagcgtccggtcagtgcgccgaccagcacaatgccggcgagatagagcagcaccatgtagacgaccatgatgccgacgtagacgcgtacgcggccgattctgtcggtccggccacgcacgccggcgatgacttccatggtgaagccgcggccgtcatatgcgagcccgttgctttccacgacggacatgaaccagccgcaccagatcagcgactgccagacgaccgcgctgatgccgtgtgcctggaaggcgaagatgatcaggaacaggaccggcatggcgaaggtcatggcttggcgggggtctcgtttgagataggtgatcaggcgtgcggaaaccgcgccggatgccgaatcgggcatccatgcgaatgcgccgatgcctttggcggtctcggacggactgtttgcgccgatggtgagccgttcatgtctcagacaccaggtgcagacggcgaagcagacaatccatgtgacggcaaggatggcgatgcgggcgagcagcaccgcccaggctccggtaagcgcgtcgaacggtagttggaaggccgcgccgaacggcgtccatgcgacgatggtggtcgccgcgccccaggtttcggtgttgaggctgaaggccacgccggagttgaccagaatgttcggcaactgacagatgataacgaacgtcagcacgatgaagatatagaacgcgcctttgccgcgtttgctggtcaccagcgtggtggatagggcgatgagcagtttggagatgctcatcatggtgatgacggccagcactgcggcgaggagggaactgatgattacggctggtcccatatgccgataggccagtgtccagagcatcagtgaggccacgccggtaagggcggggatgccggacaggccggaaagcagcaagccgaattgcaggttgcggtcggcgatgccgtagagcgcgaatttgcgtgggttcatggtggagccttcgccaagcatcatgagctggatgaagccgatgaagatggtcatggtcgcgccgaccagcacgacgactatgttgacgatgcctccggaaccaaggatgttcagcggaaagccatccgcgttcacggtgaagggcggcagtatgccgatgaaccatgcgagcacgccggtgccgatgatggtgccggccgcgagtacggcggaaaagacataggcgacggtctgccacgccgattttcgcagggtggcgagcgtgagcgtccagcgcaggcggaccagggtgatggcgctgctgatcatcggcgggcctcatcggtgggtgtggcgggcgtggcggttgtaagcggaatgggctggaccggctggaccgaagttggtgcttgggcttgggcttgcccgccgtcgagccatgcgagatgggcggcttcgtggcggccgccgaccagttgcaggaagcggtcttcgagttcttcgccggcggcgacctcgtccaccgtgccggccgcgcacaccagaccgttgttgattacggccacatgcgtgcacatcttttcgaccaatgccatcacgtgcgaagagataatcaccgtgccgccggtcttcgcgtattcgatgaggatgtctttgaggttggcgctggacaccgggtccacggattcaaacggctcgtccaggaccagaatgcgcgggctatgaatcatcgcggaggccaggcagatcttcttggtcatgccggccgaataatcggtgaccatcgtgttggcggccccggccaagtcgaaagcattgagcaggtcctgggcgcgacgcgtggtctcatcgcggctcatgccgcgcagcatgccggagtagacgagcaattgcaaaccggtcagtcggtcgaagatctggtcgggctggggcatgacgccgatcatgcgcttggccgtgttcacgtcgctccacacgtcatggcccaaaatcatggcggtgccggcgtccggtaccaatagaccggtcaccatattgagcgtggtggttttgccggcgccgttggggcctacaagtccatagaacgagccgaccggaatatcgagcgcgagtccgttgacggcgatcttccggtcgaagtgcttgaacaggccacgaatggacaccgccgcattcggattcggcggccatgcttgtggctgcggttgcgacggctgtgcaggcgcgggggcggcagctggcatcatcggcggctgaaatccgacattcctttgagtattgtctaagctcatacatccactctaccccaccagccaaccctcagcgaagcaaacccccgggttgctgttggattgccccgctgagcagctccaactagcggactcggtcaacccttatgcgcgatgggcttccactgggctttggagaagagggcctggaaggagatcggcacgtagctgagaatgtaaatcgggaagctgagcacataggcgagcagctccttgttcgtggcaccgatctggtcgcgctcgacaatgatggtcaatgcagccaatgccatcaggcccaacaccgatatgatgatgccactggaccaactggccagcgattgcagctggctcggccaactcacgaagccacacgcggcgaacagcaagcccattaccgcgcgaatcacgcccaacacggtaaacggacacagcatcaaggtgaagtcgatgcaggagaaatcacgttcgcgaaccgcgcgtttcagcaatgccgagccataataacggaatacctgcaggaatcccttgctccaacgcaaacgctgacgccaactttgcgagaaggtaaccggctgctcgtcgtagagaatcgcagtaccgcaatagccgatgcggtcgccatgcagaatcgaatccatagtgaattcaagatcttcagtgagcagatggaacttccatcccttgttccgcttcatcacctcgcgggagaacatgaatcccgtaccgcccacatggcaagaggaaccgagaatcatacgcgagttagacaggaatcgcgattcacggatgaaccacagtgcagaaccagaagacacccagttatccgccagattcaccgaattacggtagctggtcagaatcttgaatccggagcagaacgccttgttcatttcctcgaagtagtgcttgtccagcttgttatcggcatcgaacacgaagtaggcctcataatcatcggccacaccgatgtcgagcatatgccccaacagatacgtcagcgcatatcccttgccaaccagctcaagattgtggcgttccaccacatggcagcccaaagaccgcaccacgtcggcggtgttgtcggtgcagttgtcggccaccagccagatgtcgatgaggttggacgggtaggtctgatcgcgaatcgacccaataaggttgccgatcactttttcttcgttgcgcgcggagatcagcacggcataccggttggtcatcggggcgtcggggaagcgcacgggcttggcgaacagggacatcacgatgcacagtccctgatatatcatgccggcaccgccgacgatcatcagaagaatatcgagtacggaaagcagagtcatcagcgccaccctgccctaggattgctggaggcagattgatcagactgcttggtttgcttgcgttgctcgggctgctcaggctgttcggcggaccgctcaggctgctcgggctgctcagactgctgcgtatccgcggcaccacgctgcggaatcgccgccgtatccggctcatcaaagcttgcatccgcaccgactgtattatcggcgttatcggtatcatcggcatccgactccggctcagtgccgtgtaatcccttgcgagcgctggaggatagcacgttcttcggaatcgccacggtggcggaatcgtccaaatcggattctttcgtctcgtgcgacggaatcgcataaatctgttcctgcagcaaacgcagttcctcattcatcggcacgcggttggtggatcccctggccgcacgcggcatgtgctcgccgattggctgcaatacgtgctcgccgaacgcctcggacgcctcgacgatcttggacttcttctccggagtcggatcgttcatcagcggtgagtcaatcagctcatagcgcttggtgtacgcacggaagatggcctgcagcgatgcggtgaccggcagcgccaggaacgcgccgaatgcgccgaacagcgagccgaacgccagcaccgagaggaaggcgacggccgcgttgatatccatcgtgcgctgcgaaatcctcggcgagagaatcaggttctcgatctgctggtagacgatgatgaacaccagcaccgccacggcgtacgtccacccgcggttgccccaagcgaacagcaccggcagcgcaccgccgatataggtgccgaccgtggggatgaactgggataccacgccgcagaacagggccaacggcagccagtagggcacatgcaggatctccaagaagatggcggtgcaggtggcgttgatcagcgccagaatcgaacgggagaacaggaaggacgaaatctggccttgggccacggtccacaccagcaggaatcgacgctgcgtgttgggggccagccactggcagaaggagcggcgcagctttgggccggcggcggagatgtaatacgtggtcattaccacggtcatgaggttcagcaggaaggagaacaggccacccaccgtactcatggcggtgccggcgaaatcggtgacccacgaggtctggatattgttgaagatttccatgccaagattgctgatttccggcatcttgaacgtggcgtgctggtccacgaactcacgaatctgcccatacattgccggcaaaccgcggaccatggcaatcatctgctgtacaaacatattgccgaacagcgtgagcagcacacccacgaccacggccacgcccaccagactgacggcggaagccacgccacgcttccagccatgagccaccagcgccaccaccagcggttcgacggccagcgccaggaacagcgagatgatgatgtcgaacaccagataggagatgtcgccccacgagcgccagcagaacatgaatacgatgacggcgagggccacatacagcaacgcgcggccgaaccattccggtggcctgcgggaatctcccttggcggggaacaaagtaccaaagtcgatacgattctcgtcgtccgggtctgccccggcttctgcggcaccgtttctcgacgtgtcggtgctgtttatgtttcgcgcgcgttcgctcatggctccccattgtagcgaggggtttgaagctcggatacgccggcggcgtacacccgcttttctattgttgatgtcatgctcaacgtttcgatcatcatcccagcgtggaacgaagccgaacgcatccgcgactgtctgctgaacgccactcgccagaccatcatgccgcatgaggtgctggtggtggacaatcgttctacggacaacacctgcgcgattgtcgaacagttcatcgccgaacatcccgagaccccggtcaaactgttgcaccagaacgatgaacaggggctgattcccacccgcaactttggcctgaacgccgcgaccggcgatgtgctgggccgttttgacgccgactgtatgatccggcctgactgggtggaggtggtctccggcatcttcaccgaagacccggccgcgatgggtgccactggtccggtgatgtattacgacatgccctcacgtcatttcgggttgaaaggcgacaattccttacgcaagcgaatctaccgtgccgatggcggccagccgctgctgttcggctcgaatatggccttgcgcgcttcggcctggcatcagatcgcgaatgaggtctgccgagataaggccgatgtgatgcacgaggatatcgatatttccctgcatctgatgggcaagaatctgaaaaccgtgtactcgccgcgcatgatcgccgcgatgagcgcgcgacggatggacacgtcgctgagttcattcctgaactacatgcgacgttttaagaatacgtttgatgcgcatccgcaacatacgcgcacgcataagccggaggtgttgttcaccgccatgtatccggcgatgcatatgttctacccggtgtggcagaaagtgctgaattccgcggatatcaatcctgctgaagccgcgtggatcaacgagcagatgaaactggcggaggcgcaaggcaagcagctgtacgacgagacccccaccgacgaagtctacgacgaaaagcacgagagatagcgatgccggtgggttcccgacgaggggaacccaccggcatcgtcggcgtcatcgacgaatcacatcagcgacttgtagatggcgaggatgtcctcttcggttgcctgacgcgggttgccgggggtgcacacgtcgttgaaggcgtcgtgagccagcggctcaaggtcgccctcggtggcgcccacttcggaaatcgtggtcgggttcttcagatccacggtcagcttgtggacggcctgcacggcctcttcgcgcacggtctccaggtcgccggtgtaggcgtcctcgacgccgaacgcgtcggcgatgtcgcggtacttctcgcccgtgtagtccttgttgtattccatgaccggggccagcagaataccgttggccacaccgtgggccacgcccagacggccgcccagcgggtgagccatgccgtgcaccaggccgaggcccacgttggagtaggccataccggtgatgtaggaggcgtacgccatctgctcgccagccggaatgtcgccgtcggcggacttggctaggttcttggcaatcatgcgaatagtctgcatggacaggcagtcggacaggctccaggcacccggggtaatgtaaccctcgatggcgtgggtcagggcgtcaagtccggtggcaaccttcaggccgcgcggcatggagtcggtcagatccgggtccacgaaggcgacgatcgggatatcgtgcgggtcgacagccacgaacttacgcttgttggcggtatcggtgaccacgtagttgatggtcgtctcggaagcggtaccggcggtggtcggcacgccgaagatcgggacggacgggttcttggtatccgcgacgccttccagggacagcacgtcggcgaactccgggttggcggtgatgatgccgatgcccttgcaggtgtcttgcggggagccgccgcccaggccgatcaggaagtccgcaccggactcggcgaacttggcgacgccgtccttgatgcactctaccggcgggttcggcttgacgttggagaacacctcgtagggcaggccggcctcatccagaaccttggtgaccttctcggcggtgccggtctccagcagtaccggatcagtgacgataaatgccttggtgaagccgtgctgcttggcgacggccggaatttccttgatcgcgccacgtccgaagtatgcagtctggttgaaaatcatgcggtataccatagggactctccttttgagctagtgtcttaactggtggtccactcactctttgagtggtccaacggttccccagtctactccgcgcatgagcattcacctgaaaacacgctgaaagaacaacactgaaaataatggcaagaaatggcggaattccgcacttgtcgaattattgtccattgaccaaaccagttcaatcgcccgagatctcaacgataagaccattttccggagtcgcttggtgctctccgagaaactcgtctctcatctgcttacttcgcgcgtacacaatcaatatgcgagatgcctaattccattcgtgtttcatcagccgaacgcgaactggttcaccagatggtgtattcaacggtttcagtctcttgaagaggactaagatacctcgacaattggggtgatcatcataagagaatgaggcagataatggcaaatggcaaggctatgacggtcggcgagatggcgtccctgtttctcgaccccgacactcccgttcgtatcgacgctttcgacggctcgcatttcggcccggcagacgcggatttgaaggtcaaaatcgccacgccgaactgcatgtaccagctgctcgcgcacccgaatgaaatcggcatcgtgcgcgcatacattctgggcgatttcgacgtggacggcattgactacgccgacccgtatccggcgatgcgcaagctggtgtcgctggccaaatacgttcgcccgctcgctcccgcatccattgcccgcgtatccgccggcattctgagtcacggcttcaagaagccgccggtgcccgccaccgagggcccaagcaagttcgcccgcatcaagcgtggcctgatgccgcacaccgaaaaggccgattcggaaaccgtcagctttcactacgacatgtccaacgagttctacgccgacttcctcggcccctccatgacgtacacctgcgcgatattcgacaacgagcacatgagccttgaagacgcacaggccaacaaactgcgcctgattctcgacaaactggacttgcagcccggccagcacttactggacatcggctgcggctggggttcgatggtcatcaccgccgcccgtcgcggcatcaaggcgctcggcgtcaccctctccaaggaacaggccgcgtacgccaacgaatggatcgcccgtgaggggctgcaggatctggccgaagtgcgcgtacaggactaccgcgaggtgcccgagcatgacttcgacggtatctgctcgatcggcatgatggagcacgtaggcgtcaagaactaccagagctacttcgaagagatgttccgtctcctgaagccgatgggccgactgctgaaccaccagatcaccatcagccatgacaagcctcacggcaagcccggcaccgacgaattcctcgaccgttacatcttcccggacggcgacctcggcgcgcccggcttcatcgaatcgtgcatccatgacgccggcttcaacgtggtgcatcaggagaacctgcgccagcactatgcgctcaccctgcatcactggaaccagaacctctccgagcattgggacgacgcggtcaagcaggtcggctttgaacgcgccaaggtatggggtatgtacatggccgcctgcgctctgaacttcgagctcgacggcatccagattcaccagttcctggctgtcaagccggatcgcgtgggccacccggacggcaagtggtaccctctgcgccaatggtggcaggcctgactccgtttctgtgggacggcacgcggtttttaccattgttcatctgccgtcccacagaagtgtgggatagcagatacatcaatcgtttgacgtatctgctatcccgcatgacataagccgagaaccgcagaatagagccgttctttgccctcagctctgagggcgttcttcgaacgctgtgggacggcacgtcgaaaatcggcaaaatcacgtgccgtcccacacgattcccttcgcacgcgcatttcgcaggtgctttttctgcaatactgactctatgagcgccacagccccagaaacggctggggcggacgatcgcaccgaccatgacacgcgcggataagacccacgtttctttatttaaccctaacccgatgttcgcattggtgctgttggcgtgcgtagttgcggcgaggaagacagttgttggcgaacgcgagcctttgcattgaccggccagcccgccggagtaggtacgtgacggatatgcaaaagccccacacaaggcggggcttcattgtggtggctccgaacggcgtcgatccgttgacctagcgattttcagtcgctcgctctaccaactgagctacagagccatgaacagtcaaaaacccggataatccgggtttcataaccattccagcgaccccggccggacttgaaccggtgacctccgccgtgacagggcggcgctctaaccaactgagctacggggccattgttctcacttgcgtgaggcaacagatgtatatattactgaaattcgccggtcgtgcaaatttcggcgtgttccgcgtaatttcaaggtttttgctatcaccagcacacggacacgtctgccataaacatccacaaacgacgaagggcgcgaccggaactccggtcacgcccttatgaacagaagcacttcacggcatccaccgcaaagcaatcgtcaatctcagtcagcctgcttccaggtgtcgacgtcgatgtggtgttcggggttggcctgccaggcatcccacgcggacttgacgatgtcttccacgtcgtacttggcgtgccagcccatctcctcgttgatgcgcttcggggagccgatcaggtgcggcgggtcgccggcgcggcgggccatgacagcctcggtgaacggcagaccggtgaccttcttgacttcgtcgacgatctggcgcacggaggtgccttcaccggtgccgacgttgaaggcgtcgtacttgcgctcgtcacggtcgaggtacttgagggcggcgatgtgggcgtcggccaagtcggagacgtggatgtagtcgcgcacgcaggtgccgtccggggtcgggtagtcgtcgccgaagatggcgggggccttgccctgcttgaggcggttgaacagcatcgggatgaggttcagaatagccgggtcttcgagttcgaccgggccgcagccggccacgttgaagtagcgcagcgcgcagaagcggatgccgaacggctgctcgcaggcgcgagccatccactcgccgaacagcttggtctggccgtaggggttgatcggcagcatcgggacgacgtcctcaggcaccacatcgaccggcggcacaccgtaggtggcggcggaagaggagaagacgagcttcttggcgttcttggactgggtcatgccggtgagcacgttgagcatgccgttgatgttctgctggtagtaccacagcggcttctccacggattcgccgacctgcttgcgggcagcgaagtggatcacggagtcgacgccttcggcgtcgaggatttcggccagacgctcgccggcgcccggagcggcgatatccatgccgtacagacgggagccttcgatgcgggtgggcttgccgtagctcagatcgtcgacgacgacgaccttttcgccggcctgatgaagtgcgtgaacgacatgcgcgccgatgtagccgcagcctccggtgacgagaactgtcatagttgacctttccttatgcgggttgcaagtgtcggccgtgtggagttcagcggctgttcacttttggtccgctttgttaccttttgaaacaatttgagtatatcacacgaacataatcgcacaaaacggtggtgtcgtccggcaatatctgcattcattaggtcgatctggcgttcattaggtaggtcggcccggagccggcccgcacgaacaccgggtaaatggcttgatatggtggttggtatcgcacaccacccacctaatgaacgccaaatcgacctaacgaatgaacagcggtgcggcgcacaaggaaaatccgaggaatatatgaccgatcccgaatccacagcaatcgattccgtcgccgcgatggccacagaccacaccgaggcaccggcgcaccccctgcacaaggtgctttccttcgtgcgccgctccggacgtttggacgatcgcctgcagcgcgcacgggacaactatgccggcacatatctgttggacattgcggccggcaatctgctggacgtgcgcgaaggcgtcacgctcgaccgcgcgctcgtggagtccgcatggggcaacgacaatccgctcattgtggaaatcggcaccgggcagggagaaaacgtggcggccgcagccgcggcccatccggagacgaacttcctagccttggaggtctatgaccccggtgtggcccacacgctgctgctcgccggcaagcaggggctgaccaacattcgtgtggcccaggtcaatgcgcccgagctgttcaaggtgaccgcgcccggcaccgtggccgaggtatggaccttcttccccgacccctggcccaagaagaagcatcacaagcgccgcatcgtgcaggaggccatggccggcgacattcatcgcgcgctggtcacagacggcgtctggcgcatcgccaccgacatcgaggactacgccctgcacgtgcacgaggtgatggacggcctcgatggctggaagaacctgggcagcataaccgtcagcctcccgctggagcacgtgggtaagggcaatgccgacatggccgccgacatgccgcacgccgacttcaccgaatccgagcggttcgagggccgcgtgctcaccaacttcgaaaagaagggcctggccgccggccgcgcgatccacgacttcacctatcaggccgtcaccctgaactgattgcgacacgccgaaatgccgtcgatttgcataaccgaacaacctcccgtaaagtaattcgagttgttcgcccccatcgtctaacggttaggacaccagactttcaatctgacaacgagagttcgactctctctgggggtaccggtttgctcctgtcgccatcattgtgattcggcaggagccttttgttttcaacgggtcgcacctgccggcgatgtggcgtgccaggagcgtcgaggtcagcgctgccaccaacgatgcacctttgccttcgtttgtgttcgtgtcgtcgttgttgacgatgtcgtacagcgtgtcgtcgagcagttcggccggaggcatgccgagggtgacggccgcggccgcgatggcgttgaggtcccatgcggcgtcgaggttcattctggccgatatggtggccttggtcacgccggccgcctcgcacagggcctgctgttcgagttcttccttggccaggtgcaggcgcacgttccatgcggcgacctcacgcaggtgctctcccagttcgatggcctgtgttcttgccgtggtgttgccggtcatgtccgttcctttcgtttgcgtgcccttgggggtttgtgcgcaccatgctatgggcggcgcgcttggttgcgcaatacgaccgcctccccggttcggtctggtcgaactgggccgggaaaaacatggaaaacgaaagcgctccgcaccgtgttggcgcttggtgcagggctgatcgacaaccttgggcgggattccgggcgattcaagtgacaagagtcccgggattcgccctccattgaaagagagttatcgcaatgaccaatcctatcatcgcttccgccccgcgtgcggcgggagccgtaaaaaccatcccgtcgctgcgtgtgcggattgctcgcgcgcacttgctggcggtgctgctgcatcccgcgcgctcgtcgcgccgtcgccgccggggcgtctgagatggtccgggctgtggcggcggtggccgtcgtcgcaatcgttgtgtgtctgctggtggtgtgggcgttgtgccgtgcggccgcgctgggcgaccgcatcggcgaacggctccatgacgctaggggtcgcggggaggatgcgcgatgagcgggccggcggagcagtgggcgtggcagttgcaggacgagcagctgagcctgtcggagaagttcgtgttggtgtatctggcgcgaagggcgtattacgacgacgggtgcggcgcgtggccgtcggtcaacaccatcgcggcgcattgccattgcacgcgccgttccgtgctgcgcgcgttgaaacgcttgcaggagctgggctacttgcgcgagggcgaccaagagctggccgcgcgcaatccccgcagccacgaacccatccccaggggccatcgctccaaggtatgggacgtggtgatgaagggcgcgcggaccgagccggaggacatcaccgatcccggcgagaccagcgcgggcaagggtgttccggcgaagcctagtgcggccggaccatcgcggagcaaggagtgcgcgcggggtgacatggtgtcacctgacgcagtgtcacctgacacaatgtcactccagggcgattccgacggtggggtgacatcctgtccgaagagaggtgacgtcatgtcacccaatagacaagtgataaccaatgctccccttgtcccctacggggacattcccctcgccggggaacaacccgaagaggaacgaagcgagcatgatgccccggattggcgtctggcgctgccacctcggggagtgcgcgacccattgtggacgccaggggcggaggatgcggacgagcgggtgcgttcccgggccttgcaggaggttcgcgtgctgacgctgatccatgaccgtgtggcggccatcgacccgaaggcagccaggccggcgtcgatgcgagaccgacgcaaggtccacgagctgctgatggaacgctctctgacggaggtcgagacgatccttgattgggcgtatggcaatccgcgctggatctcatggctggtggacggcacgatggtcgaacgctacttcgcgcaggtcagcctcgacatgcgcaccaagcgggcacgaggtccgcagcattccggcagccatgccgctgctaccgagctcacgtcggtccatgatccagaccggccggtggcggttagttcgggcttggcctggcgggtgccggtctacggcggcggcatcctgtcgatcgcattgtgccaggcgcacctcgacggcgaaaccaagcaggcagagtgtccggtgtgcgcctacgaccggcgcaaccaagccagccacgccatcggcctggagaaaaccgaccgcgccgaagacaaggaatcccacgaggaggccaaggcatgaccggcatagcggatgccgcgcctcgttcgccggaggcgtggaagagcatgggatgctgcgcggatttcccgcagccgtgggccgacctgatgtggggcctggagttcgaggacacgcatcccctggcccgcgtgttccggcaggcgggcgcgtcggtatgcgagcacgactgcccggtgagggccgaatgcctggcctacgccggcgccgccggcttggaatggggcttgtacggcggccgctcgtgcaccgaccgccgtcagatcgcccgcctggcggaagccgacggcgtgccctgccgcgaccgcacggtgccctgggtccgccgctggggcctgttcgtcgactggctccaagcccatcccgaggtcttcgacacggcccggggcaaggccagcatggaacgcgggcaacgccgatggcgcgccgcaggccgcgcccagcccggagacgggccacatgaccgtcaaaccatcatgcaagcagacaatcaaacaatccgacaaccaagcaatcaaacaatcaacca

SEQ ID NO: 11 - DNA, 49951 bp, Unknown
  R30_18m  MAG No. k141_2371
ccatgtgttgcgtttgattccgcggctgaccgtggaggcgtgtctgccgatcaggccggcgatccgccgtatgctcgtcccgttgccgatctctatccggatgatccgccgttcctcttccgacaggtgcgaatacacttgacccaaggcgcgacaccccttcactggttatctggacaatctccaatctaaagggtgtcgcactttcaaatagacaacgggtgcaacaagtcagcgggcaagcggcacggccccgacaagccgcgcaatccgctcactaacggaacagcgagacgcccctgcgggccatgcagaatgcgttgccaagccacgtgtgcttggaattcggccacaccgcaccgagcctcggggcgttctggctcagccagatgctgggcacgcggccgtcggcgctgcgcgagcccagcaggttgaacccgtttttctcctgaagccagcccggatgctgcgtggcgatggccagcccctcctcgagcgtgagcggaatgcgctcgtcggagtcaatgagcttgcgggccacgtcgggctcgcggtttgtgtgtacttggtaccggtgcgcggttccacgacgatgtagaacggtccctcgggcggctcgaagccgtcctgcggcaaaaagctcgcgatgtcgcgcggcggcatcgtggcgaaaccggccatgcggttgatcgacgtacgggaaatcagcgattcgggcgacaccagctcgcgcgtgggcgccagcaggatgcgctcgtcaaaatcggtatgctccagcgcctcgatcagcggacgggccagggagcggaacgccgcggcgctcacatccgccacgtccgggtaccccaatgccacgatgcggtccaactggcgctgcgcttctaccgacgccttcgacatgactcccagtgtagagcatcgcggcggggcggcgccgtgacgttccagccggttccggcgtcccgtcgcaccggcgatccggcccagcatacgggcacccggttcttcttgttccgcccgattcgtaagattgatggatacgtgtggccatttcgctacggctgcccgaacgtgaaatcaatccgtcaaacccagaaggttgttatgtccgaaaagttgaaagtcggcattctcggcgccaccggtatggtcggtcagcgttttatcacgctgcttgagaatcacccgtggttcgaggtggtcacccttgccgcttccgcgcacagcgccggcaagacgtatgccgaggcggtcggagaccgttggaagatggaaaccccgatgcccgaatacgtcaagaacatggtggtcgtcgatggcgacgatgccgagtccgtggcctctggcgttgatttcatgttctctgcggtaaacatgccgaaggaccagattcgcgccattgaagagcgttatgccaagaccgagaccccggtggtctccaacaacagcgctcaccgttggaccccggacgtgccgatggtggtgccggagatcaacccggagcacttcgaggtgatcgagcaccagcgcaagcgcctgggcaccactcgtggtttcatcgccgtcaagccgaactgctcgattcaggcctacacgccggcactggccgcatggaaggaattcgagccgcgtgaggtggttgtgagcacctatcaggcgatttccggcgcaggcaagaccttcaaggattggcctgagatggtgggcaacatcatcccgttcatctctggtgaagaagcgaagtccgagaaggaaccgctcaaggtgttcggccatgtggacgccgaaaagggcgagatcgtgccgttcgacggcgacctcaagatcacttcgcaatgcatccgcgtgcccgtgctcaacggtcacaccgccaccgtgttcctgaacttcggcaagaaggccaccaaggaagagcttatcgaccgtctggtgaactacacgtccaaggcttccgagctggagctgccgcacgcgccgaagcacttcatccagtacctcaccgaggatgaccgcccgcaggtcaagctcgacgtggactacgagggtggcatgggcgtttccatcggccgtctgcgtgaggattccatcttcgattggaagttcgtgggtctggcccacaacaccctgcgtggtgcagccggcggtgccctcgaatgcgccgaaatgctcaaggctctaggctacatcactaagaagtagttgaatctcgttaaaatcgcaaaagccctccgcaaggagggctttcatcgtattaggcgcggaattcgcggctcagcggccagtaccgccgtacaccacggcttcgatctggtcggcatcgagaccgtaggcagtgtgcagagccttgacggcgtcgttcagctggtcgagcggcacaagcgcggcgatacgaatctcggaagtggaaatcatcagcacgttgatgccctcatcgctcagggcctggaagaacttggcagccagaccggcgtgagtcttcatgccaacacccaccacggctaccttgccgacgttggtgttcacatcaaaggagtggtaacccagcacttcctgcttgtcgagcagcgtgttctgcacctgcttgacggccgattcgggcacggtgaaggagatgtctgcagtgccaacggatgcgccggcctgcacgatcatgtccacgttcacgtcggcggtggccagctcggtgaacaccttggctgccatacccggctcgttcggcacgccacgcacggtggccagcgcctcggaacgatcgtgggcaatgccggaaatcaccggtgcctcggggcccaggtcagggaacaggtcgcccatggatttcgcttcttcttcagtcatgtcttgccttgtcttggttgaaattacttacgattattgttcgctgtagccgcgctcagtcgaggttcggcagcgtgcgcgggtcaatgccgtcaggcacaaccagcgtgccggggcgacgggagaacgaagagcgcacatgcagcggcatgttgaaacgctgagcgtactctacgcagcgcagtgccagcaccttggagccgcaggaggccatttccagaatggcttcgtagccgatggaaggaatacggcgggcggaaggcacgatgcgcggatcggcggtaaagatgccgtccacgtcggtgtaaatctcgcagatgtcggcaccaagggccacagcgagtgccacggcggacgtgtccgaaccaccgcggccgagcgtggtggcgtcacccttggcgttgatgccctggaagccggcaacgatggcgatgtctcccaatgagagcgcgttcttcacgcggtccggtctcacggccttgatgtgggccgcgccgtaacgggtgtcggtgaagaagccggcctgctgaccggtgaaggagtgggcgcggctgccttcggcgtgaatggccatggccagcaggctcatggaaattcgctcgcctgcagtcatcagcatatccatctcgcgctcgggcgggttggagtcgatgctcagcgcctgatcgataaggtcatcggtggtatcgcccatggcggagaccaccacggccaccttattgcccttcttctccgtctccacaacgcgcttggccacacgtttgatcgaatcggtatcggcgaccgacgagccgccgtacttctgcacgatgagagccactgctgtcctttgttcttctcttagggatttgtttggtcgatattctacgcaaacgcaacgattataagggctgtcgcgttcaccccgcgaccccgcgccggcatgcggacacgggtatggcctacgttgttcagcaaatattcaagttttcaccggtggttctttgagacagccgcatccatcctttgagattcgagcggttaactatcaattaccggcagacgaaagcaaaccggcgaggtttccgcagaaccccataactgaataccttcttcttcctctctccttttcaaggcccggtcccgctctattgtggaagttggaccattttcgttgtggaagttggaccatccctattagggaagttggacactagattacgaactagactttttcggacttcttatacccctacattgcccctatatggcccctatatggccctcgtcggcatgttgcatgaaaggcttggtgcggagtaacgtttcgcagtgtggcacgtgcggcgttgccacttgcggcagcacctatgccaaccacgactaagacgggccggccgtcttgtataagcaaatcatgagcagatcaagcgaaggaacaggcgactatggcattactgcatcgacgttcgacgagtaaccgtgcctcacagaaaatgcgggaaaacaacgcggccatgcctgatgacacatctgcaaatgacaacgtttccccagcgcgtcccgagcccacagcattcgttccaactccatttgacgaagtcatcgatattagcgatctcgtggccgagcgccgacgcctgcaacgcaatctgtgggcgatgtgcatcatcaccattgtgttgctgatcgccgcaatcgccgtggcctgtttcccgctagcgttgcaattcgagtccgaccgcaacttggccgccaccacagccaccacagccaaagaagtagccggctggccttacccgcaggcgaaagacaagctcacggcggcccgcgcatacaacaagaagctcgctgaatccggccagcccatcttgggtgaagccatcgatccgttctccgccgcccaaggaggatcccaagccagcggcgaggattccgcctcaaagaaagacaaggaataccagtcactgcttaataccggcaacggcgtgatgggcgcaatcaaggtgcccaaacagtccatcaatctgccgatttatcacggcacttccgaggaagcactggcttctggtgccggccacttgtacggcacgtcgctgccggtgggaggtaaatccacccattcggtcattaccgggcaccgcgggttggttgaagcgctgatgttcacccgtttggacgaggtgaaagagggcgacttcttctacatcgaagtcatgggcgaaactttgggctacaaagtggaccgcatttcggtgattttgccggatgacacgtcgaagctcaagattgtgccgggtgaggaccgtgtcaccttgatgacctgtacgccatacggcgtgaacacgcatcgactgcttgtctccgggcaccgcgtggcaattccgatgccggcccccgagccgaatgacgtgcttgacgcgcgcaatatcgcccttggtgttggcctgggcatactggcggcaggactgttcattatctggttggcacgacggcacaaggccgcgcgcatcatccgccacggcgcattctggccgtggatgcgccgcaagggcgaaagcgccaatgatacgctggcctaggcctcacgccgaccggccagcgccctgcccagcgtgatttcgtcggcgtactccaagtcggagcccaccggcaggccgctggcaagtcgggtgaccttgacacctacgggtcgcaatagctgggtcaagtagctggtggtggcctcgccttcaatattcgggtcgagcgccataatgacttccttgacctcatcgccttctaagcgtttgagcagactgggaatacgcaggtcggcagggccaacgttggccattgggttgattgcgccgccgagcacatggtataggccgcggtattcgcgcgtgcgctcgatgctcatcacgtccttgggctcttcaaccacgcagatcaccgaacggtcgcgtctcgggtcggcgcataccgggcaggggctggattcgcacacgttgccgcaaatatcacagaagcggatcttggccttgacctcctcgatggcctcggccaaatcgcgcgcttcatcttcgggcgcggacagcatgtagaaggcgatacgctgcgcgcccttcggcccgatgccgggcagccgcccgaaagcgtcgatcagtcgctgtattgcgccgtcataagcaagtgccatgggtattcctcgttattcgtcctcattattcatccgagtgcttcttggcaggctggatgttcttggggttcttcggatcatctgccgcgaattgctcgacttttttgacctcgaatagctttttcagatcgtcaagattcatggccgtcgcctcgccgagcgactggtcgttcatcgagtattcgtcgtcctcggccgcgacttgcggttgcggctgcggctggctattccacgggtcggcattcggcgtcggctgtgcgggctgcggttgattccacgggtcatcgccggcagccggctgcggaaccgattggggctggttccacgggtcatcgcccgacatattgcccgacatattgcccgacactgtctgaggaaccgaagaagccggagtctgggactgcggctgattccacggatcatcgtgaggagactgctgatatggctggttccacgggtcggcttcgaccggttgcagtgccagcgaggccgtagcctgagattgcggctgattccatggatcatcgcttgcgccggcaactgccgtagcgggagctgcggtggctggctgccccgtggactgtccagtgggtccagcggacgcaacggacgcagcgggtgcaacaggagcagccggagcggcccacggatcaacaccatcactgatgtccggaaccgcaacatgcttcttgtgatgctcttcgggcgcaggcgcagcagcgggctcgttaggtgcgaacccgtctgcagattgcggtgaagcgttgcttacggccggcttggcccaagggtcatcgtcactccagctcttcgccgccgtggatgcactggattggccggctcgatggctgtcgtccgtatcctcggcttggcctgttgcagtcggcttcggagctttcggctcgctccccatatgaatgcccagacccgcgcccaaactcgacgcggccaatccggccttggccatggcaatctgctgcttgaccttggccaattgctccgggctcatacgtttgacggattcgactcgctcgccattcgccgcgaccgcagaaggtgcaataaccgcattggcaccgaactcgttgcgcacggcatccaacaccacggacgccgccttcttaccgctgttgtccacggccaaggcgaaagcgtgctggctcagcgacttgtcgaacgtcatcgacaggcaaggcagactcttacggttgggaccgaattttacggtcggcaccttgtctcgtgacacatattcacgaatggtttccggcaaagcggcgacggctgcatcccacttctcgtcgatggaccgattatccgatgccgcaggcgaggtcaccggttgggccgggacggccggcgacgtggcgggagcaccccaggcattggcagcagcagttgctgcggcaggttgcgcagacggagagcccgcgggccggtcgctgactgggctgctgacagggccattgtctcccacagcggattcatgggaagcggtgctctgaggcgcggctgcttgctggttgcgtgcagcaccggagaatccaccatgtgaggctccggcaaacccgcctcgcgatgcgccggcaaaaccactggcacccgtaccggaagcggctgacgtagtcgaagtcgaagaagcagccgcaggcggcatgccagaagaagctggcgcgggagcggctgttgcaaagcctgattcactgccggccaacaatcgtgcggccagcagttccaagcgcatacgcggagaaatggctccggtcatggcacccaacgtagtgttgatgatgtctgccatggcggtcagtgcgcccagtcccagcgccttggcttggcggtgcagatcgtccatatcctcggcctcagccgtgtcggacagcacggattccgcacggtccccggccaacgtaagcaccagcagatcacgcacacgagccagcaggtcttcgacgaatcgtctcggatcgaatccgccgaccacgactttctggataacgccgtacagggcttcgccgttgtgattgattaccgcatccactgcctcaccgatcagcgcctccggcgtgaagccgagcagggctatagcggcatcatgggtgataacgccttcgaccgaaccaaccatcagctggtcaagcacagacagggtatctcgcatggagccgccaccggcgcgcatcgccagtttcagcacaccgggctcgggcttgatgccttccttgtcgcagatcgtctccaggtagggacccatgacttcctgcggcaccagacggaacggatagtggtgggtgcgcgaacggatggtgccgatcaccttgtctggttcggtggtggcgaagatgaacatcacatgttcaggcggctcttcaacaattttaagcagcgcattgaagccctgctgcgtgaccatatgggcctcatcgagaatgaaaatcttatagcggtcgcgcgcaggggcgaaaccagcgcgttctcgcaattctcgagcatcatccacaccgttgtgcgaggccgcatcgatttcgaccacgtcgatggaacccggaccgccggtggccaggtccttgcagctttcgcattcgccgcaggggtgggaagtcggccctttggcacagttgacgcaacgggccaggatacgcgcggagctggttttaccgcatcctcgcggccctgagaacagataggcatgcgtaagcttgccttcgtccaaggcgcgcatcagcgggaccgtgacttggtcctggccgatgaccccttcgaaggtgtccggacgatagcgacgatacagtgcaagtgccatagctactaacctacctttgccctcagaattaaccgataaaaagtcaagataaaccgggctcatagctgccgaatcgggaaaactctttatattccaacgacattcatctgacaacggttaccgcatttttattgttattaaccgctttctttgtattaacatagtgtcaataacggttgtagtcaggaggtacccatgagcgatatcctcgacgagaaacgccccacccgtggcgatgcccggcgcgacgccatcgtgcaagccgcgcgcaaggtgtgtctggaaaaaggcttctccaaaatcaccgtttccgacatcgcaagcgaagtcggtatgacgcgttcgctgttctaccactacttcgaagacaaggaagccgtagccgacgcagtactcgatgacgtcatcgacgaaatcctcaccacgttgaagcagtggaaccaagcgcgcgaaacaggcaacgtgaacaaggcattagacgacatcgtgcatgtgctccgttccctaatcgccgacgagagccccttctcaaaccgtatgatccaagatggcaacgccgaactgtatatcaagttcattgaccgcgcggcggaccgtattgccgactacattgcccagaccaccgtacgtgatttcgagcagatgcatggtctgccaatcaccaacgtccatgagacattcttcacgctaatcgtggggcttatctcgctggttcgctcgcatccgaacatcagcgaccgaaccatcaaagaggtcatggcgcagacgctgcatatcgaaagctatgtcgtctgaggtctgacggccattggctctggtaccgctctcccgcactcccctcagtccgcttcgcggccagctcgtccgcaattgcggacagcctacggctgactttcttctggttcgactatcgtcgaaccctcgcctacaaacatcccactgggctgtttgctttacggctcagcctaatgaggggagccaatataatcaggtcaggcgaactggccggttacggggtcgcgaccgtctcgggcgatggcgtcgagcacttcctgtcgggagtccacctcacgggcggctacggccggcggtaccagcacgcgtagcgcgcagtcctcggccactaccctgaatggcagatgcccgatgtattcgccgtccgccatcagcaccggtggctcgtcgccttctgcggctcgcgtgacttcgatctcgcgtatgcgcttccacccgaacacctttgaggcgagcagcttgccgttataggcgttcgagatggccaccgcacattcgccgaagttcggcacatgattcatccacaccaggtccaacagcccgtcggagaagcaggagtacggtgagacctcgatgccgccaccgatatgacgcgaattcgcaatcgtcagcaacggcgtgatgatgtctcgttcatccgtggtaccgtccgccagcgtggccttgacgtggtacccataacgcttcatatgcgtcagctccaccagcaccgccgcaaagtagcgcatggtgccggtcggcagatgcgaatgattcgcacggtcgttgatacttgcgtcaagaccacaggacagcatgcccgcatagtaccggtcaatcgggtgctcggcagacttgttctcccggtactcgtattccccgccagtggatgggttcacggcatagccaccatccaaagaggtcacgcgtcccatgtccacatcaatgtgtgatccgcgcacgatagcgccgacgataccttccactgcggtttcgatgcgattgaccggcagcttaagtccccgagcgaaatcgttgcccgagcccatggccacgatgcccagcggcttaccgccgcaacccacggcattggcaccgagtgcgatcatgccgtcgccgccgaccaccaccagatagtcgtactcgtgcgcgcgttcacgcgcctggttcagggaatcgtcgaaacttacgccggtgatgtcgatgacgtcgaagttatgggcacggccggcgtcctccagcagtcccaatactcgcgcatccaccttggcaccacggcccttatcggaagtgggattgcccaccatggccaccacgcgacggcgttctgtgcgttcactctcgctcatgctctcaccttaaccaaaggtccagaagcccgccagagcatcagtgcttacggtccattattgtgataattgtctccttccgtacaattcaccggtccggcccgagccatccgctccacggatgatgccaccggaaccatggtttccaccttgatggttaccaacacgtcttcatcccgcacggagcaggagcccagcgtgacgccattcgcttcagccatgtttgcagcaagcgcgcatggatcaccgatatccacatgccacagcgcatacgcggcgtcaaaggcgatgagatcggcgagggaacgcgctcgattctggcagatcatgaggttgcccacacttgccgccaccgcgagcgcaatgcccaccgccataaccagcatggctccggccatcgtgcccgatccctcctcataacgcattccctgcaccgcagttcctttctattgcggccgcccagccagcagccgaccagttattggcttatcgccgtagcgttgccggtgacccgcgttggagtgacatccagtgggccgggcagtaccgaacattcgaccatcacgctcgtcgattggccattgtgggcaatgctgacgcggggatctccccctgcaacgtccgcagctatgctgcgcgcggatgattcgtcaccggtaaccacaaactcgcgtgcagccgccgtcgcggcaccttggcagtccatggaaacgatgaccacacgtcccattgccagtatcagcccggcgatggcgataacgctgggcaatacgatcgcgaattcggcggtggccgatcccgtgcataggtctggcggcagtctggcgagcctccaccggcatctcatggtcttcatggctgtcacccgactttcagagcctgtttgatgatgttggtcagcaacgtcttgatggcatccgacttcaggatggcgaccagcaccgccgcaaagcctgtagccgcaacgagtacgactgcgtattccgcagtggctgcgccttcttcgggctcagccatgagggcgcggatgcgtgcgtccatgaggcatagccgttctttcgccttggcgttcagcgtggccacacgagccttgctgtgcgcaaagatgccggcctgcccgtcgacgatgacggggataggggtattcattggcgttcctttcggtaaggaggggaagctgcgcagtggcttcgcaccttccccatgcgtatgtgagtggttggcccccgcgccgggttgacgcggggtgcataccactgtggactatcaacgcttcatgcaccaggaaaaacggggtatgtggttctagcttgccgagttatccacacctcgacgtgtcgtccaccacaaatgtggataaccaaacgcagccaagtacaataccgagcaatacaacaagattcagcctaagcgcactcagttcacgcctatattcacatcatgaaggacgcaatcgccggaatgactcctaccagcacgaatgccggcagaaaacatagccctgtaggcatcagtagctttaccgacagcttcgcggcattccgttcgatagcagcacgctcgtcacggtccagctgttcaatggcggattcgaggcgcacaccaggcatatcgccatgcgtccatgacgattccaaagccgattgcagcaggccaagatctcgttgcgcggtattcgtatttcccttggatggactatcagctggcgcaccctcatgctgaacagccatagcggcatgccacgcatcggcccagggaacccctctggtcagggagttcccgacctcgctcatgcgagcgccgcagtcgccgccgacggctttgcccaccatgtcaagcgcccggggaatcgaggagccctgacgcaaggacacctgcaacatacgcaatatgagtatggtccatgacgacccgcaatcatgcgctacggccggctcctcgcccggcaagcggctgtcatgacgagacagagccttatacagccaaccagcaatcgccgcacagcctgccgcggcgtgtacccacaccgtactcataatccgctgcctttcaacaatgcccgcatccatgccaagccggcagcataacaacatcctcccaatgtcaagcagaccacaccgcgtggcgatccaagcaagaacgccaatggtctagctcccagaagctcgcccaatgccacagtgacggccggaagcgcgctcagcagccccacagtggctttaggaacggcacatgcttgcgatcgcaagttctgcatcagcctcatctgccggtaagcagtcaataccgcttccagacatggcaccgcttggcaaccgagctcatcgctcaaaaccgctgcggcggcgaccccgcgtgcagcttcaagtacctgcgctggtgattcgtcgggcagacgccgctgttcgaacaccgttatgagccgttccacagtaatgcgatgagtggcgaagcgtctgctggattgttcctcgaatgcttcaaccaatgtgccgccacctcgcaatcgcgcgatggcggacgtaatcacctgcgcaacgcccacgcgaggtgagtcggcatatcgaggttcgtttatggctgcggaatcgaccgcgcgcccgcggtaagccagccggtacagcctcccggacttgttccccggccatatcagcacggcgagcgccaccagaacagcacaccacatcatcacccaccaccactcggcctgggaacgatgccccatcgttcaatgaagtgcccccattcggcggcataccgaggaggatggcagccattccataccgccagcggtgttcctgccagttcaccatgtgctacgcgcagttcgccgatctgcgtgatacgccgctgtccgttcactcgctccaaatgcaccaccgcgtcgaaagcgcctgccgccagcatggtcaacgcctgtggactgactccggcgagtaatccaagcgaaatcagcctggacggtactcggttcacgccgtccgcatgcacggtggtcatgccaccgtgatgaccagaattgaacgcgcgcaataggtcgacgatttccgcgccacggcattcgcccagcaccacgcggtcggggcgcattcgcaacgtcgctttgaccaagtccgccaggcttatggctccgacgccctccacattcgcctcgcgtgttaccaacgagacatgatcgtcgcgtcccagttcccccagttcacgaacttcctctacggtgacgatgcgctcgttcacgtcgcattgcgccagcagcgccttgagcaaggtggtcttgcccacgcctgttccgccggtaatcagcactgtggcatgtttgcgcaccaatcccacgaacgtcggcagccaagcagccgggaatacgcctaatttgctcaggtgctgtagcgatgccatggttcggtcagggaatcgtatggaaatcgcggcaccttgtggcaccaatggggcaatcaccgcatgcacgcggatgccatccggactggcggcatccgctatcgggcaggcatcatccagtctgcgcccgagctgcgcgcacagttggacggcgtattctcgaactacttgcggcgagcggaacggcacatgcaatactgtttcgcgcatgccattgccgcggtccgcccaaacgcggccatcacaggtcaccgccaaatcggtaacctgcgggtcagatgccacgtcatccagcagaccgaagaatatggttctgagcgctgtgccagcctcattggctcgcgtgctgacggcagccatagcatcactggtccttgtgagaagctcccgaaaccgggcgaatggcctgttctacgagatcggcaagcaagttcatggctttgcgactgcctttggtcaccgatctgatgccgaggccttccagtacgtctccgcacagattgacacttggcttgatgggccccaataccgtggcagtcaaatagtcctgcgcctcgccaatacccacgtggcctctcccacgtggagcgccacgtggttccacacctacgatatgtggcgcttcacagccccatgaatccaatctggaccggtgcgacttggctctggccagccccattaccgacaattccgcggcaatcacctgcaggccactgcgcagatcgggtacggtctcaatgagtccaccctgaccggcatctacgatgacaacgtcgttcgtttccgccaaagcccgaatggccgcttgaacttcccaccagtcaggctggcgcgcgctccaagggtcatagggaagtactcgcacaccctcccacatcatcagctcatggttcatcgcctcaccctcgatacggccgaggggcgcgtcgacttggctgaaccgcaagcccggctctcgttctacaccaagcagcaggtcaaggcatccggccacgaaatcagcgtctatgagaacgcagctgtgttcacgtctcgccaatgtccatgcaagcatggaagccatgacactcaaccccacgcctccatgacctgacgtcatcgttacaatgttatggaagctggtgtctgtagttagggcgagtgccggagcctcgcccgatctctgccgttcgcatgaggccaacggcctgggcggcggagtgtagtagcgatacgctggaattggcgcatcgtccgtgggcagcggaatgcccggaggtgctaccgctggcgaggtgatcctacgcgccacgcggggtgtggtgttgctattcataagccgattgaaacgtgtccaagttcaatgctcaacacgaatcgaccattgtggttctagcttgctgagttatccacaccccggcatgtcgtccacgacaaatgtggataaccacgctgctgtttcacgcccatctcatgcagaaaaggccctgacctcacatgcacagtcagggccttcattttcacgacgattccttatgcggtaatctacatttcttgcttacttatcgaggttcttaatgccgtcttccatagcatccaactgagcatcggtcaccttggccggcttcttcttgccgaacttggccttgagcagaccgatgatggtcggggcgagcgagaccagcagaatcagcacgatcaccagctcgaagtggtcctgtactgccggaatgttaccgaagaagtagcccagcagcgtgaacaacgtggaccagcacaggccgccgagcactgagaacggcgtgaaacggctccaacgcataccggaaataccggagatgaacggcatgaacgtacgaatgaacgggaagaaacggcccaggaacacggccagcgggccccacttctcaatcatgtgctcggttttggccaaacgctccggggtcaaggccttcaccttgccggactggatgatgcgacggccgaagaaatgaccaatgaagtaattgcactggtcgccgataatcggggcgcaccagaccaccggcagcagccagaacagcggcagcgcggccttgccggtcgcggcatcgggagcggcgaacacaccggcggcgaacagcagggagtcgcccggcaggaatgggaagaacaccacacccgtttcgataaatacgatgaggaagatgaagccgagggtcggcgccacgcccatggcaatccaaccggcaatcgcggcacgcggatccttcagcagttcgaggatgaaattaacgaagcccatgtgtttcctatgagtcctaaatcttgtattgagctgccagcccaatgaaccagacagttatatgcaaaccgtcaaataccctaccagccggctaacacaactgctacacctgcggcgaggaagcgcggtaacgcaatgaatactccacatcaatacgccgcctcggcgcccgagcccccgtcttgacctgatcaagaatcgacgtgatggcaatctcagcaatacgcgcgcgctgcggatccacagtggtcagcgagggaatcgtgtacttagcctcatcgatatcatcgaagcccaccacacgcacgctttccggcactcgcacgcgcatttcccgcagctgactgataacacccatcgccagcaaatcattcagcgcaaaaatgccatccggtcgaatgccctgcgcatacatctcacgtaccgcctgagcgccctcggcactggtccattcgccgcactcgcggatcaggttcagatcaggcgtcactccacgttccgcaaaggcgctgagataccccttggttcgcatcgaacgagaggacggcacggattcgtccaacgttccgcctaccacggcgacggtgcggcatccggcctccagcagatgcgtggtagcggcttgggcacccaattcattgggcatcaccacgtgcggcgcaggtgcgttgaagatacgctcgcccagcactaccagcgggtagtcgccctcgagctcggccacatcctccgcccgcatggccgtggggctcaaaataagtccgtcggtcatattgctggccatggcatgtgcgctctcgatctcgcgctggcggtcgtttccggtcgattcgatgatgatgcggtatccatattcccgtgcccgcgtgatcatctcttcggccagttcggaaaagtaaatctggttcaaatccggcagagacaatgagatgagtcctgtgcggccggaacgcaaattgcgagcctgctggttggtcacatagcccagctcgtcaatggcctgctggatacgttcgcgcgtggccggcttcatataggggtaatcgttgaggtaattggacactgatgccacggacacgtgcgcacgtttcgccacatcgtgcagcgtcgccttgcgcgaactcgcaaccatagcgcccccttatgttcagtccatcaaccactcggcatggcaccatccacgtcgccatattggttgtcgaacgtttcagatgtgtgtttccagcataaaccatgtgggatatcgcccccgcaggccgtttcgcttaggcgtccgcagaatcacccccagtcggccttgccgacagccccgctagcagggacgggttcgacacgccgcccacgactcccgctgcaaccgtcaacagactccgccggcggtaataaatcagggccacttcggcaaaccaacaaagaaggcccgccagacaacgagaattcgtaccggacgggcccactcgaggagtagaaactatgcgatattcctatctataggctcacctttcgatggattcgttgacctgctgaatggccttcagcgcggagtcaacggtggcgtcgccggtgtagatgttctgcatctgcacaccgatctcgtcgttgagttcctgggaggtgagcttgcgctcaagcttggaagaggcctggcccttggtcaccaaatcgatgctggccttggcggattccgtggcgtcagacggcacttcgaccttcatgtccttgtcgaccggagcaccctgcagcgtgttgatccactcctgctggccttcgccggtggtcatgaactcgatgaacttcatggcggcctccttcttcttggagtccttgttcacgctcaggccgaagtccacaccagtggtcgggccggtagccttgtctcccacctgcgggaattccatcatgcctagctcgtccttctcaacggccgtgcccttggtctcatcgttcggcagcacggcggaaacgtgccaggagccggtcgggaagaaagcggacttgcgggcgtagaagtagttgtcgcgagcatccgggtaggttgcagtaccaactgcaccatcctggaacagaccatcaccgatcatctgcttccaagccttcatggtcttgacgaaggtctcatcagtgaacttggccttgccttcggcggccttgtacacgtcaccttcgccgtactggttggacagccacacgaagatatcgtcgaggtgccagccatccttggcgccgagggccagcggcatcagacccttggccttgagttccttgttggcagccacgagctcgtcgtaggtggtgggcaccttgatgccctgctcgtcaagcagcgtcttgttgtacaggatgtattcggagccggaggtgatggtcggcatggccaccatcttgccatccttgttggtggtctgcgccacggcgccctcggccaccttggaatcccagccgggcatgtacttgtcggccagctccttcatatcgtcggcgaaacggccgtactgttccacagtggaaccggcctgcacaccgaacacatccgggccttcgccgccggccatcgaggtctgcagcttcttctggtagtcggccatttcagaagtacgccaccagttgatcttgatattcgggtacttcttctggaaggcggcgtaaatcgacttccactgggcatcggtaggctgccaggtccagaaggtcagctcaaccgggctgtccttggtaccgactccctcatcggagccgccgctgcccgaaccgcatccggcaagcagacctgcagacatagcgagagcgcccactgcggcgatcgccttcttcatgttcaacatgattgttctccttattttccttgtttctcttattggttcacttcgttgtggaagatcatcggaattggatggcgaagccagccacacccgatatgtgcggctgatgttggctcaattgccggacgcactcctttcctcgatgctggattccagcgatgtcctctcgtatccggtcagggatgcgcgatcaagagtgatacgggcacgggccgcattgtccgcaaacggcacctgccaggttttgccacgtaggtgcagtcgcatcgtgccgttcagagcttcgatacggatggtgagcacggctcggcccgaacggtcacggcggacgttgtcttcaaagacacgcagcctggccggctccggggtggaaggcagagacttgccgttgcgcatgaactccacggatgatgccgtgccggacaaacggtattcgccaagagacaacagcgcctgcccacggctcgtctgcccagcgaaatcaaggacgaaacggttgctgaccagcgggtatgccagttcgagtgttaccggacacacgccgctggacctcacgccgccgtcgatgacgagtcggcggtcagcatgcaattctcgaccgagatcccgcaatccggcaccccacagattcacatgttcagtggccgcatatgcgctgaacgcggcccccgttcgcaacgagaacaatcccgcccgaccgggcttatcactgatggtgcaggacgcggcgaaacggccatcaatgcggatctccagcctgcagtagcggcgctcaagccggtactcatgccaggcatgggaatcgaagtcatggaggtcggcattggtcacgcgttcggaggcaacgccgccgatcacatcgaccacgctaattacctgacggccagcatccacctcgagtttggtgaggttgttggcatcctggtaccgcaccacgataccgaatcgtgcgcccagtggggtgacgggagctttggcccagacgtcaatcacttgggttgcggacgatttgcccgacacagcgatgaatacactggattcgtcggcaacaagcgcgtgaccgtccacatcggattcggtgtgggccgcgccggaaataaccgaccatccggcgttcaggccatccgcaaaatcatcatgcacagtgccatacagcggtgcgctttgagcggcggcggtaggtcctggggtgtcgagccctccttcggcgtagtacagcgggtcgatgcgcattacgcgctgttcggtgcccacatacagctcgtcatcggcgttacggccgtggtagacaatccagtcatcaacggcattgggcgctttgactatggagttgtggcccgtgccttcaacctttgggctgcggataagcagcggatcgaagcggttctcgttgagctgtttcgtccaatcgagctgatcgatgtgggcgtcggcctgcttattcggcagctgtgcgtacgagtatccgacgaagtagtcctcatgctcgtaggcgttggccgagtaggtgatgaacgcgcggtcacggtaggcgaagtatgtggcgccttctacggtgtgccagtcgcggccatcgccgaaacggttgcgggcaaagatctcctcgtccatggtgggcacgatgagcgggcgcggtttgttctcacgcgaatacggggtcacaaggcgatcgatcatcacggaggttccgggccggtcatcgctcaggccggtgacctgattgtcggcgtaaagcaagtacaactggccgtcatcgccatagaccacttgggagtcgatggcgaaggtgttgaacagctccgctttcttttcgaacgggccgagcggatcctcgctcacggccacacgcatgatttccgtgtgggtgtcggtctcctcggccggcatattcgagaagtacatgtgaaagacgccgttgatgagaatcaccgatggggcccagaagtttctgcgtccggcttcggtgtagcagaatccatgtgaggtccagtgcaccatgtccggtgaggtggagaccagaatgccgtgctcgtcggtggcatagcagtagtagaggtcgcggtatttgagcacgaacgggtcgggcgcggtatgggacttaccgtccgcatatgggaccggattcgtataagtgcgttcggccagcggcttcaaatcgccagattcggcaagcaaggcggtggggtcagctgcgccgagctcgtcttccgcagggctgtagctggcggatgcaccgttgctgatggttgcggtcattttgggtcacctcagctcttgacggcgccggcggtgatgccggactgcagccacttctggctgatcaggtagacgatgatggacggaatcgtcatcagaatcagggcggcgtattcctgggccaccatctccggcgtctggctgcgggtctccatgaagtaggtggaggccagcgtgaccggatacttggattcgtcgcggatgagcagcaacggaatcaggtattcgttccaggagtagacgaaggtcagcacgccggtggtggcgatcatcggggtggagataggcatcaagatacgagcccagatgcgcagggaaccgcagccgtccacgcgggcggcttcgatgatttcgtctggcacgccgttgaagtagttgcgccagagcaacagcatctgcagggcgttgaacgccaccaacgggatgatcatgccgaggtaggtgttggtcaggccgaatgtcttgatggtgaagaacagcggcatggtcacggaggcaatcggcacggccatgcaggcgagcagcagcacgtagatcacctgggaaccggtgaacttcatcttggcaaaggcgtagccggcgagcgaggtgatgaccaccacgatcacggcggtgaccacggagatgaaaaagctgttgaacaccacgcggaagtagtgcacgtccttattgttgatcacggacaggtagctgttccagccgcctgcctgcagggacttggtgattgccgtgtaaatcgggaaaatccagatgacgaagaagaatacgaggacggtgtacatgatgaccgtcgcactggttttacgcttcatgatgacgtcctctcgttagttgttggcacgcttgttgaaggcaagttgaatcagggagagcatcacggcgatgatgaggaccatcacgccgatggccgcggacagaccgccgttgaactgctgcacgccggccttgtacaggtaggtgttcaggaattcggtggaacggccagggccgccgcctgtggtctggatgacgatatcgaaggtcttcagcgagccgacgatgccaagcaggataagcgtgttggtggtgccggacaggttcggaatggtgatgcggaagagggtgttccagaatccgcagccgtcgatcttggcggcttcgtagatgtcatcggagatagacatcagaccggcgtagtagatgatcatcgagaagcccatccattcaaagatgttgatggcacagatcgagtagagggcgatgtgcggatcgccaagccagctttgggccaggaagtccaagtgcaggaagcgcagggcctcgttgatggcaccgacgttcggatccatgatgatgcggaagatggcggcgatgatgaccggggccatggcgatgggcatgaagaagatcgccttgaagaagctggaaccgcgcaggcgctccttgaggatcaccgcgagcagcagtccgagcccggcctggatgaccacggtgacgaccatgaagatgatgttattcatcaaggccgtccagaacacggagccgggagcgagcagcttggtgtagttcttcaggccgatgaagtccatctcactggagatgccgtcccagtcggtgaaggatgtggccacggtgaagccgatgcagtagtagatgaagacgccggagagaatgaccagcggggcgatgaacaggtaggggcgcagcttgctttgccatgagttctgcgatgcgccgctgtgcttgcgggcacgaacacgtttgccggctgccgcagccgcgttgctcacctctcccccacggctttgcgctgcccccgctgcggcgggaacggcttcctgaattgccgtcatgatgacctcccttggacctcatcttctttttctgtaacatttcagaaactggccatagaaaatactcgggcatgctttgccggagcggaaaaccagtcaaccgacgctgctgtgcgccggtttttctagaacgtttcagatttcttcgttggcaacaattctataacgtttcagaagtttgtcaaaacagacatcaaatggttgatataaacattgcaaatacttgcgacacaccggaatgcaatgccgatacaatcggcctatttctactcccccaaacgctggcgcacgaaaccgtccagcgcggccgcatcgataccgtcatacgattcgatggacgcgaactggcccaggccggaagtatccgtgcgaatccagccagtctgcgcgatcagagtcgcgcccgatgccgcaccggcctgaagtccaaccgaggaatcctcgagcaccacgcacttggccatgtcttcacgggcgatgccaagcttgtcggctgcggccagatagggcgcagggttcggcttgtgttcgtacggatcgtcgccacagacgtagccggcgaacagtccctcggactgcttcatgatgttctccgccatacggcgcggcgacgtggtgaccagcatggacggaatgccggcctccttgagcgagtgcagcacgtccaatacaccgggaatccacggcagacgttcgacctccgccttgaacacataatccttgagctgtttgtcgatttcgggaacgctcaatgtgcagccatgcgcaatcatgacctctgccacgtgtggcaccggagtgccggagcactcccaaccgaggtcctcgttccactcgccgccattgttgtgcgcaatctcgatttcaccgtcatgccaaagcggctccgaatcgataagcgttccgtccaaatcccaaaacacggccttgagcagcatggttacctccgtacgtcgcagtgaatcctcaactattcgtattcgatatacctatctcaccaactccgcacgacagccgaacagcaaatcaccaaccccacaggaccatggatttggaatcggcgggggtggagtcggattcgcgcgtggtgtcggcagcggtatcgcggccgggcagttcgcgggtttcgcggcggatggcgttgcgccagaggcgggcgcggttggagcgttgtacctccacgatattgccgtcacggcctgcggcgaaaacgctctcctggtcgccggtttgcatgcgtttgacttcgcggcgcagttggcgattctcttcttcgagggccaaaatgcgtgcgatgccggaaagattgatgccctcatcctgacttaggcgctgagctcgagtcaggcgggcgatgtcgcgcaggcagtagcggcgtgcgccgccatcggtgcgctgcggacggaccagacccagccggtcgtactggcggagggtctgggggtggatgttgcccagttcggctgcctggccgacggtgaagatgggcagttcgatgtcgaagccgacgtcatcggctccgtcgagatcggccctgcccatcaccagcgcggttgcgcacatcgcgtacaactgcttcatttggttggctaaccgcgccattgttcacctcctgattacaggctgagatagtcgccggctttttcgtcgaattctttggcggcgtgcttgacggccaaacccggcttggcggggaccatgatctgcacgcggccgatcaggtcgcccggctggttgccgcgctggacgccaagtcccgcgagcttgacctcggcaccggagctggagcctgccggcaccttgaaggtgacgggattgccgtcgatatccttggcctcgaccttgccaccggccacggcctggcccacagttacgggcaggtccaggacgatgtcgtggccgcgcatcgagaacgcggcatcgggcttgacggtgacgtgcaggtacaaatcgccggccttgccgccgttgatgcccggcttgcccttgccggcaagcttgattttctggccgtccttgacgcccgcaggcacgtgggccttgaacttcttgccgtccacggacagggacacggtagcgcccttgaccgcctgacgcagggtcaggctgatcttggagttgcggtcctcgccgttttcggggcgcggggcctcctcatagccatagccgccggcattgccgtacggcgattggccgtagccgccatacgactggccgccctgacctgcagcaccgccgaacatcgagaagatgtcgttgatgttgttggggccgccgcccgaagtggagaagcggatacgcgaaccgttgccaccggcaccctggccaaacatggagccgaagatatcagagaaaccggaagcgtcgaagtcgccggcaccggaaccgcctgcgaagcgggcgccgcccatgccgaactggcgaatcgcgtcgtacttttggcgatcttccttcttgctcagcacgtcgtaggcttcggagatgtccttgaacttctcctcggcttccttggtcttgttgacgtcagggtggtacttgcgggcgagcttgcggtacgcctttttgatgtcgtcgtccgaagcgtccttggagacaccaaggactttgtagaagtctttactgagccattcgttttcagccattcatgtctcctttcttgaagagtctttatggttggctcccgctggatgaacagcccagtgggctgttcatagcagtgcgcaattgcgcacgtcgcataaaacatcgggagctgtcgaacgaagcgagactgagggtggtttatattcagtgtttgaccaccctcagtcagccttcggctgccagctcccgccagcgggagccaaggtaatgtcagctcgttaacgagctggccgttatcagttttgcggggaggctactaccactcgggcggcgcggattacgcggtcgccgatacggtagccggcttccaccacggtgtcgacggtttccttgtcggcatcggcatccggcttgtgcaggattgcctcatgcttggtggggtcgaagtcctcgcccttttcgccgaacttctcgacgccgaacttctcgaaagccttgtcgatcttggcggcaacggccttgaacgagtcgtccatctcgctgtgttcgcgaatgcggtcgatgtcgtcgagggcgggcagcagcgcggtcagcacgtcgatgatgccgtgctggcggaagcgctcctgctccttctgcgtgcgattgcggtagttgatgaactccgcacgttcgcgttgcagggcttcgaggtagtctgcggcttccttcttggccttgccgaggggggtgagggtgtcttcggaatcggactggccttcgccagtcttctctccggcatccgacttctctccctcagctgcggcaggagccgcgtcggctccttcattggaaggagcctgggcagccgaatcctgcgcagagtcggactcggcggaggcgtcagcccctgaagaggcctgagcggcctggccggcagcctcagcatctgagggatccggcaggtcgttcaggtagtcgtccttgttgaactcggacatcacttgttgtccttgtcgtcatcgtcgtccacgacctcggcctcgacggtgtcgtcgtcggaaccggaggcggagccagcggaagcgccggcaccggcagcgccagccgcaccggcaccagccgcggcaccctcggcaccctgctgggcgtagaggacctggccgatcttctgagcggcggtcatcagctcggtctgagcagtcttgaccttctcggtgtcgtcacccttcagggcttccttcagagcgttgaccttgtcggtgacttccttgacgatgtcgtcggagagcttgtccttgttgtcgttgacgagcttctcggtggagtaggcgaaggcctcagcctggttgcgggtctcggcgtcttccttgcgctgcttatcctcagcctcgtgagcctcggcttccttgaccatgcggtcgatctcgtccttcggcaggccggaaccaccggtgatggtcatggactgctccttgccggtgcccttgtccttagcggacacgtgcacgatgccgttggcgtcgatgtcgaaggtgacctcgatctgcgggacgccacgcggagccggagcgatgccggtcagctcgaaggtgcccagcggcttgttgtcgcgagcgaactcacgttcaccctggtagacctgaatcagcacggacggctggttgtcttcagcggtggagaagacctcggagcgcttggtcgggatggcggtgttgcgatcgatgagcttggtcatgatgccacccttggtctcgataccgagggacagaggggtcacgtcgataagcaggacgtccttacggtcgcccttgatgacgccggactgcacggcggcaccgacagccacaacctcatccgggttcacggactggttcgcttccttaccaccggtgagttccttgaccaggtccttgacggcgggcatacgagtggaaccaccgacgagcaccacgtggtcgatgtcgctcacggagatgccggcgtcgtgcagcacgttgttgaacggcgtgcggcagcggcccagcaggtcggaggtcatttcctcgaagtgcgcacgagtcagggtctcatccaggtgcaccggggtgccgtcaggagtcatggccaggtactgcatggaaatgctggtggaggtggaggaggagagctccttcttcgcctgctcagcggcttccttcagacgctgcagcgcaatcttgtccttggacaggtcgacgccgtacttgttcttgacttcggaaaccagccaatcgatgatcttctgatcccagtcatcgccaccgaggtggttgtcgccgttggtggcctggacctgaatggtggagaagccgtcgtcatccttgccgatctccagcagggagacatcgaaggtgccgccgccgaggtcgaagaccaggatgcgctcgtcttccttgcccttctcaaggccgtaggccagagcggctgcggtcggctcgttgatgattcgcaggacgttcaggccggcgatcttgccggcgtccttggtggcctgacgctgggcatcgttgaagtatgccgggcaggtgatgacggcgtcggtgacgggctcgccgaggtatgcctcggcgtctctcttcagcttcatcaggatctgcgcggaaatctcctgcggggtccacttcttgccgtcgatgtcgacggtccagtcggtgcccatgtggcgcttgacggaggagatggtgcggtcaacgttggtcacggcctgacgcttggccacttcgccgacgaggatctcgccggacttggagaaggccaccacggacggcgtggtgcgcgcgccttcagcgttgacgataacggtgggctcgccaccttcaagagttgcgatgcaggaattcgtggttcccagatcgataccaactgcgcgtgccataatgtgtgctcctttgtgggacttgcgattgcccggccggtgccgccgttcgccacgacctgttcgggttgtgacgcgcggtgtgcgcgagccgtctcgcacgtgttcgttctttcgttcttcgcccgggtttcggtcggttccttgtgcggttcctctcggttgtggggtttgcattcgcagccgcccattcccgtgcttccgaaacttgagcctacaccactcaactttaaaccgcaagtgcatattcccgaattcggcaaaaaaacttgagcgattctcactcaggtttctgcgaagcgcggcacacggcacgtatcgcgtcacagccaaaagccgccggaaaacgatcgcccgccgggcatcggctcggcgggcgatcgttttccggcggctggacgactcgggattaccggtcggccaaggccgaatcagttgttcttggcgttacgcgcggccttgatgagcatcgcgatcgcaaccagcatcacagccgcgatggcgatggccataacggcggtaccggtggcgcccagcgggccggagaccgcggaatcgttcggcaccttgcccgaagcgatcacgccgttcttgtcggcgcccggcttcttgtcggcggagccggcggccggcgcctggatggcgacggtcgcgaccttgccggactggcgaccggtgacggtgagcgtgtactcggcgccttccgacatcttgtcgagcgcgatcgaagtggtctgcgcgggcttgacgcgcacgccggacaacggggtgctggaatcggacttggacaccacggcgccgtccttgtccttcagctcgtagctgagcagcgcgtcgccgttgaaaccgtcgacattggcgacgtacttgccggtctgcgtgcgggcgaccttcacggtgccgtccttggagagcgcgttctgctcgtcgggggaggtggccaggcccagggcgccggcgatggtgtagaagttgtcggtctgatcggtcaggccgatgacgcgctgggcgccggggccggaagcggcgatgcgcagctgggtgccggtatgctccatgtcgccgccgttgtagccgccttcggcgtcggtggaggcttcctgggcggtgccgtaggagacgaccatgttgttgccgtcggcggacttgagcacggtggacagcgcgtaggccggctgggcgttgaggatctgggaggtgtgcgcatgatcggcggtgacgatcaccagcgtgttcgtgaggtccacgttcttgatggcgtaggcgatggcctggtcgaagtcgtcggtctcgccgatctggccgcaggcgttggcgttgtggtcctgcttatcgatcgaagcgccttcgacctgcaggaggaagccgttcttctgaccgttcgggttggcgttgagcagatcgagcgccttcttggtcatgtccttgagcgaggcgccacggttgccgagccaggcgtcattcggggtgcacacggtcgggttggcgtccttggccggatccttggcggtggccttggacgggttgaacttggtcggcatgttgccgtcgctcatcagggcgagcaccggctggccatccttgtactgcagggcgttcatcgcggccgggtcgttctcaacggtctggaagcccatgtccttggcctgctcccacacggtcttgcccttgtattcgccgccctgcacggtctggcggaagtacttggaaccaccgccgatggtcacatcggcgcgggtgtcgagcagctgctcggagatggagccgatgccgccgttctccttgagctggttggcgaggcactgcttggaggcgttgttggaagtgccgtcggtcttgccctgcgggccgtagcaggcacgctcggtggagtgcgattccagcacggccggggtggcgtcctggatttccgcggtggacacgttgccggtggccttgccggcggccttggcaagctcgaagagattcagctgcgggttgccgtagatgtcgacatccacggcgttgttgtaggtcttggtgccggtcgcccatgcggaaccggacgcggaggaatcggtgacgggggtgagcttgcccgggttggggttggcgaccagcttgccggcgccatccttgccgacggcgctgtccttgctgccgtcgccgagcgagaaggtcgtgtactggccggtgcccgcctgcacgtcgtcaagcgcgccgggctgaccgaccgcgtccagaccatcgaagtggccgttggcgcctttcagatagtcgcgggcgacggtgatttccgaatcgcccatgccgtcgccgatgaacagcacgacgttcttcgcgctcttgttgccgatggcggcgatgcgctgcgccgcgccgtgcttggcgagctcggcgaccgacttgccgttggggctgtaggtgccgtttgcggcatcgacagcaaacgccggagcggcgagcgcgccgagcgtcgcgatggaggcgaccgccgcgacggcgctcgtcaaagccttgtgattgcccattgttcttccttcttccatgcagtgtcatctgcgccgtccggcccgcactcctccggccgcacccgtttggccacgtccgtcgtcgtcacgccttccagcttcacggaaccgttccgcacctgcattgcttggatctttcgattccggatttcacggtaggcctcacaagccaacgtccggataccgccggaagaacgccggatgaacattcttcgtcgaatcgggccacggcatcatcgccgcatgaaccggcaagccatacacgatccgcacctggcagtacatgttctcgaaaatccgccccgaattccccgaggcggcgttcgtcgccgaatgtgggccgaccgaacgaatcgatgcaggccggattcgacatggacttctacctcgactggcgctgggacgcccccccccaacgctctccccgcagtcgttcgtcgtgctcggataacccgctaattgcccaactcaccgaatgtattgcaatcgttgtcaatatgagttacggtaaagacagaacagctcggacattggtctgccagattgccggaacctcaacgcagagcggccctcgaacagcaatgcaaacgactagcagtacccgatctgcaagcaaggagtcatcatgaccgacgcgcacggcaacgacgcagcgaccagcaccggcaccatcgcagacgccaccaacgacgccgcttccggtgcctcgcagcgtacggaaagcgctgaacgactcacccgtccgctggtcaagctggccaaagcatgcgggctttccacctcgttcatcgaccagctcggcacctacaccgaaatcagcgacgaggccttggtcgccgtgctcaaggccctcgatgtggacgcctccagcgacgaggccataaaacgttccatgaccgaacttgaggccgaaaacagcaaacgtttgctaccacccaccatcgtggccaccaccggcaagccgacaagcctgaccctgaattgcccgtcggacgcggacatcaccgcctccatcgagctggaggacagcaccgcgtttggccactttgccctgctgccgaacctcaattccggcaagccggacttgaccatcgcccccgatctgccgatgggctaccacacactgaccgtcacggtggacgggcgcgagggcaaggcggccatcatcgccgcccccgcgcgcattcccgtgccggaggcggtcgccgagcaccagcggtggggctggatgacgcagatgtattccgtgcggtctcgcgaatcgtggggcatcggcgattacggcgatctgaagctgctgctggcggacgcggccgacaagtccaaggccgacttcatgctcatcaacccgattcacgccggcgcgccgattccgccgcttgagccatcgccgtatctaccggaatcgcgccgattcctcaacgtgacgtacatccgcccgcaggacatccccgaatacggcacgctgccggccgatatccgagcgcaggtggatgcgctgcatgattcagtggccgcacgcaacgacgaatcgaacccgatggacatcaacgcggcgtgggcggccaaacgcccggcgctgcgcctgatcttcgacgcgggccgcaacaacaagcgcgagctcgaattcgagcatttcaagaccaccgccggcccagacctcgattccttcgccacctggtgcctgtgcttcgaggtatggggcgcgccgtggggcgagaaccgttggttcttcgagaagaccatcgacgacccggccgtgcgccagctcgtcgaggagcaccacgacctgttcgagttcaaccgctggctgcagtggattgccgccgagcaggtgaacgccgcgcagcaggaggcgctggaccacggcatgacactgggtctgatgcaggacatggccgtgggcgtgcacgggctcggcgcggatgcctgggccaatccggaacgcttcgcctccggcggcgtcacggtcggctgcccgccggacttctataaccagcagggccaggattggggccagccgccgttcaacccacgctatctggaggccaccggctaccaggtgtaccgcgagatggtgcattcgatgtacgagcacgcgggcgcggtgcgcatcgaccatgtgctgggcctgttccgcctgtggtggattccgcaggggctcggtgcccgcaacggcgcatacgtgacgtacaaccacgaggcgatgctgggagtactggccatcgaggccacgcgcgccggaggcatggtggtcggcgaggatctgggcaccgtaccggattacgtgcgccgcattctgtccgatcacggcgtgctcggcactgacgtggaatggttcaaccgcgtggatgattcgccgaacgccggcgacccgtaccgtgcacccaaggactatcgcaaacaggcattggcctcggtgaccacgcacgatctgccacccaccgccggctacctgaacttcgaacacgtcaagctgcgcgaagagctgcatctcctgagcgagccggtggaggcgttcgccgcctcggcgatggccgaacgcacggccatgatgaaccgtctggtggagaacggctatatctcacagaccgtggcggatgatgtggaaggccatgtgcaggagatcgtggaagcgatgcacgccatgctcaccgatacgccgtcgctgctgctgcaggcagcgctggtggacggcgtgggcgaatgccgctcccagaatcagccgggcacttccagagaatattcgaactggcgcgtgccgctggcggacagctcaggccacgtggtgcataccgacgaggtcttcgacctgccacgcgtgcagtccctagccgccgtgatgcgccgagagaagcggtgatcgattccggcaatgggaaattggtctgaatcggcttcgaggggctgatttggcctttcccggacatccacttccgcttcaaggggctggcgcccaagtagacccagcgcgagaacggcggaatgacgttggcacaaagtcgtttgcacttgtggcttcaccggcaaggagccccttgaaacggaagtagatgtccggaatgccctaaatcagcccctcgtaatcgagatagccgaagacgacgacttgttatgggcatgttatcgttgtcatgacaatgattgttcgcgacggcgaaggagcgacggcatatgaccaaggcaagcattcaggcagtggcccgcgaggccggcgtttccgtatccacggtgtcccgaaccttcgccaagccggatctggtgcttcccgagactcgagaccgagtgatggccgcggccgaaaagctcgactattcagtctctcgctcggccgccgccctaaaatccggccaatcgttccgtatcgcactacttgccagcgagaccatcgccagttggttcaattcgaacatcttcgccggtcttgactcggcgctgcgcccctccggctacgacactgtgccctaccccatgcgcaacgccgccgagcgccacgacttctttgcggatttgcccgtgcggcgcaatgcggatgcggtgattgtcagctccttcgacatcgaaccggctgaggtggagcgactgaagcatatgcacgtgccgattgtcggcatcaacatcccctccaccgatgggttcgacgcaggcgtgagcattgatgattacgccgccacacgttcggctatcgagcacctgattgcactcggccaccggcatatcgcgttcgtcggcagcgcaccgaccgaaaccaatatgcgctacagtgccgaggctcgtttgcagggcgtcattgatgccgctgccgcccatccggggatcgagctaacgcccctgagcattcaacgcggtcttggcgaaagcaacgcggcattgaacgccgtactgaacgcctcccccagcatcaccgccttctgttttgaggatgatgaaatggccgcacccgtgctgtatcgcctgcgtcaatacgggcggcgggtacctcaggacatttccatcatcggcttcgacgattccaccctgtccgccgccgtgggactgaccacgctgcatcaggacccgttcgcaatgggcgcgactgccgggcacatggtattggatgccattgccggcaagtcaatcgaaccggcattcgtacggccggacactccgctaatactgcgcgaaaccaccgcgccgcctgccgcgacagcagcgcccgcgcaggcgtgagcacgttaccaccgcaaaacgccgataaatcgatttttgcatgcgtaattcacatgatatcgttgtcatcatcaatacaacggtcgggccttcacacagcagttcgggcgcgaccggaacaacccaaccacaacgcacccggaacaggagggaatcggcatgaccgcaaataacctcaatgacgactggtggaagcaggccgtcgtttaccagatttacccgcgcagcttcaaggacgttaacggcgacggcatcggcgacatcgccggcgtcaccgagaagatggactacctgaagagcctcggcgtggacgccatctggctttccccgttctacccctccgatctggcggacggcggctacgacgtaatcgactaccgcaacgtcgacccgcgactgggcaccatggacgacttcgacgccatggccaaagccgcgcatgaggccggcatcaaggtaatcgtggacatcgtgcccaaccacaccgctgacaagcacgtgttcttccaggaggccctcgccgccgagcctggctccccggcgcgcgaccgctacatcttccgcgacggccgcggcgagcatggcgaactgcccccgaacgactggcaatccttcttcggcggcccggcctgggcgcgcgtggccgacggccagtggtatctgcacctgttcgataaggcgcagccggacgtcaactggaagaatccggacatccacgaggagttcaagaagaccctgcgtttctggtccgaccacggcaccgacggcttccgcatcgacgtggcgcacggcctggccaaggacctcgaatccaagccgttggaagagctcggccgcgaatacagcgtggtcggcgtgctgaatcatgacttcagccacccgctgttcgaccgtcgcgaggtgcacgatatctaccgcgaatggcgcaaggtgttcaacgagtacaacccgccgcgctttgccgtggccgaggcgtgggtggtgcccgagcaccagcacctgtacgcttcgatggacgagctgggccagtccttcaacttcgacttcgcgcaagccaactggtatgccgacgagttccgcgaggccatcgccgccggactcaaggcggcggccgaaaccggcggttccaccaccacgtgggtcatgaacaatcacgacgtgccgcgcagcccctcccgttacggcctgccgcagatcaagggcgcgccctaccaccagctgccgcacgactggctgctgcgcaacggcactacctatcccgaggatcgcgagcttggcactcgccgcgcccgcgccgccgctttgatggagctcggcctgcccggcgccgcctatatctatcagggcgaggagctgggcctgtttgaggtggccgatattccgtgggatcacttggaggatccgaccgctttccacactgctcaggccacgatggacaagggccgcgacggctgccgcgtgccgctgccgtggaccgccgccgatgagccggccttggccgatttcagccgcccgactccggccgatgacggtaccggcgagaaccatgtgccgctgtgcgccgccggccagttcggcacgggcgcttccttcggcttctcgccggctacgcgcgctgagggcgtgacgccggccgccgacccgcacctgccgcaaccgctgtggttcaaggattacgcggtggacgtggagcaagccgacccggactcgatgctcgcgctgtatcgcgccgcactggcgattcgccaggagtcgctgaccgccacgcgcgacaccacggccgagcaggtggacatgggcgacgatgtggtggcgtacacccgcgcggcggttggcgggcgggtgttcacctcaatcaccaacttcggcaatgccccggtcgcgctgcccgatggctccgtggtgctggcgtccggcccgctgacccccgaaggccagctccccaccgacacttctgcgtgggttatcaagtagagcttttgcgagcttacccgacgccagtcatccatcttctccggatgctggcgtcgtcctttttcccggctaagctgtctccatttcggggatgactgccctttctttccattcgcgacatgccaaccccgaaatacttaataatattctatatacttaacaagagatgtgaatcttacagattttcgttaaggattgaggtcgacatggatgccgagcattacattcgcgagacacttggtctgccctgccaaatcacttcttgggatggcactgcctcactgccgctatttctgaccaacggacggacattcagcaaactcaccatcgacaacacgagcatgctaatcgcgagcggagaggctcacccattcagcatcacacgcgtcaccgccgacgccagcaggcttgagcagcggacggatctgcccattgtctttcagtttccccggctttctgcataccagcgaaaggccctgattcagaatcacgttcctttcatcgtgcccggtacccaactgtatatcccttcactgggcatggtgttcacccagcgcatctcctcacggctgctggagaacgcacaggatatcgaggtgcgacccttctcccccgcaacacagctggtctggctgtatttgctctactccaacgagagcaaagtccaatcagatattgcccgagcgcttcagtttaccgaagctcaggtcagcgttgccgtgacgctgttagaacagctggcattcgtgcaccgcaccaagcaaggccgcagcaatagcgtcgaactactgacttcaaggcagaccagccgacttgatttactgaaatcatcttggcatctcctgaagtcaccaatattcagcaaatataccgtcacgaatcgcaatcgccagatgattgccgacgagctgattccggccggcgaatttgctctttcgcgcaggacgcaactggccaccccaaaactgcgaatctatgccgttgaacgtcattggctcaagcagcacaacaaggaactatgcattatcgaccccgctttggaaaaggtgccagataatgcatatattctggagctgtggaggtacgatccccgcctacttgctcaatatacgcaggaagactaccttgccgaccccatttccacggccctgactcttggcgagattgccgacgaacgtttggaagacgccatacaagaatccatccgcaatactttctcaggagtgacaatatgacacaaggcctgcagctcatcagaacggcctttgccggctacgaagattcttacgtaatcatcggcggcaccgcttgtgacatcatcatgaccgacaacgacctggacttccgagccaccaaagatattgacatggtgctgattgccgagggacatcttcgcgagtttgcacaacgattgtggtctttcattcgcgatggcggatacacctctatcacgaagaactccgcacagcctcacctgtaccgtttcatgcaccccagtacgtacgggtatcccactatgatcgagctattttcacgtcaccctgacttccctattgtgccgaactcgttcctgacgccattgcatattgcaaacgacgtttccagcctgtcagccatcatgctgaacgacagctactatcggctactgcagcaaggccgcgaatcaatacaaggcatcagcgtgcttaacgagaaatatctcattcctttcaaggcgaaagcatggttggatctcaacgcccgagaacaacatggcgagcacatagacggaaaagatctcaagaagcataaatatgatgtattccgtttggctcaactacttgctccagaggatcgcgtgtctctcaacgacgaggcctaccatgatctcgctgattttcttggggaaatatcccatgaaacgcttccgatgaagcagctcggcatacggggaacacagcaagacatcattgatttgatagccggcgtatatcaactgtctatcccaccacgcgatgaactgcccaccacgcgatgaactgcccaccacgcgatgaactgcccaccacgatgtcagcgtaattttgtattccgcggaataaagccgttttgcgtcaccacgtggtgggtagtttgctacgtcgtggggattttactacgtggtggaggtttgactatatggtgggaccatgcgaaaggccgccgctccgaatgaatcggagcggcggccttttggtatgcactggggaccaccctcaggcgcttacgcgccagcgtactgcaaacacggacagcctgaaggctgcgattgccggctcgctgtccgtgcgcacctcacccgaggggagccaaggaagaatcactgaacctgggcgcgggcgatcttgccggtgaaggagttggcctcgtcggcatccttgacgccatccttgttccaggagaacatggcgcgcagcttcgggccgacggtctcgatgcgctcgttggagtacttctcctgcagttccttgaagtgcggggcgccggcatcctgatcgtcgatgaactccttggcgaaggagccgtcctggatgcgctgcaggtggtattccatgcgcttgcggcagtcctcgttgatgacggtgttgacgtagtcgccgtactgggcggtgtcggagcaggaccaacgagccttgttcaggccgccctcgttcatcagatcgacgagcatcttgagctcgtggcagacctcgaagtaggcgatctccggctggtagccggcgtcggtcaggacttcgaagcccatctcgacgagcttgttcacgccacccatgagcacgttctgctcgccgaagagatcggtctcggtctcttccttgaaggtggtcttgatggcgccggcgcgcagggcaccgagggccttggcgtaggcgagggtcagagcccagccgtcgccgcgcgggtcctgctcgacggccacgacgaccggcacgccacggccagcggcgtactcacgacgaacgatgtgacccgggcccttcggggcaaccatgaacaccgggtgatcctcggacggcttgatgtagccgtagtggatgttgaagccatgagcgaacgcaacagcagcacccggcttgatgttgggctcgatgtcgttggcccagatggtgcgctggtactggtcgggggccaggatcatgatcacgtcggcctcggcggaagcctcggccacggacttgacctcgaggccctgctccttggcgaagtcgaccgacttggaggtcggacgcaggccgacgaccacgtcgacaccggaatcgcgcaggttcagcgcgtgggcgtggccctgggagccgtagccgatgattgcgaccttcttgccttcgagaacagaaagatcaccgtcgttctcataccagatctgtgctgccattattggcactccttttcagtagtggggtgtggcgccgctgggcgccggggtatctacggtgtgcagataagtcctgtgttgcgaggattgtgtccttcaaaccgaaatcaatcctaccgagaacgccgtcgcagccccgctggagtccacaacgtgagctaggtcactattggagtatggacagccgtgtgcagagaacgatcctcgataacgactctgcacccttttgaacagaatcgcacaatcccacatatggggaaaggctgagatatcaacgatcttgcatattcggtgttcgtttgcctgcaagaaatcagcgcatagttgttattgagaatgattcgctgcgcgcaacaacacaaaaccgccgctcccgtatgggcgggaacggcggtttgctagcttaaatccccttcaggggcggcggtcactgaacctgggtacgagcgatcttgccgttgaaggactcggcctcgtccttgtccttggcctcggcgttgttccaggagaacatggcgcgcagcttcgggccgacggtctcgaggtgcgggtgagagaactcttcctgcagcttcttgaacttcggggcgccagcggcctggtcgtccatgaactccttggcgaaggagccgtcctgaatgcgcttgagctggtactgcatgcgcttcttggtctcctcggtgatgacggtggaggtgtagtcgccgtactgagcggtgtcggagcaggaccagcgagccttgttcaggccaccctcgttagccaggtcgaccagcatcttcagctcgtggaagacctcgaagtaggcgatctccggctggtagccagcctcggtcagcacgtcgaaaccgaggtcgcacaggtggttgatgccacccatgaggacgtcctgctcaccgaacagatcggtctcggtctcctcggtgaaggtggtcttgatggcacctgcacgcagagcgcccagagccttggcgtaagccaggcacagcggccaggtcttgccgtccgggtcctgctcgacggcaacgacgaccgggacgccacggccagcggcgtactcacgacgaacgatgtggcccgggcccttcggggcaaccatgaacaccgggtgatcctcggacggcttgatgtagccgtagtggatgttgaagccgtgggcgaaggccagggcagcgcccggcttcaggttcggctcaacttcttccttgtagaccttggcctggtactggtcaggcagaaggatcatcacaacgtcagcctcagcgacggcctcgccaaccggcttgacctcgaggccctgctccttggcgaactcgacagacttggaggtcggacgcaggccgacgaccacgtcgacaccggagtcacgcaggttcagcgcgtgagcgtgaccctgagagccgtagcccaagatggcgaccttcttgccatcgaacacggacagatcggcgtccttctcgtaccagatagttgctgccatttttggcgctccttttatttatttgtttatgggggtgaaatctttaattgttattgtgctctgctggttctgcagaaactgtttttagttttggctttccttgtgggcttttccgatatgcaggtttagtcctgttgacccggaaaagccctgcagaggttcacttagtggaattgagatttttcacgttgtgaacttggcgatatttagttatggaggatttcacttggtaaagtcagcgtccttcgtctcacggcaggtcaggaccgacaccaggcagcacacggccatcacggcgaggtagaggcccacggagtggacgccccagtgggagctcagccaagtggcgatggtcggcacgaacgccgcaccgacgatggcggccaggttgtagccgatgccggacccggagtagcgcacgttcgcctcgaacagttcaggcaggaacgcgccgatcgggccgaaggcgacgcccatcagggcaaagccaacgcacaggaacaccatgttggcgaagaagttcttctggccgaccagaccaccgtccagcaggaacgggaagagcacggcgaacacgacgagtgcgcaggaggagaaggtcagcacgcgcttgcggccgatcttgtccgcgtacaggcaggacagcacgatgaacagggcgaacacgcagatggagatcatgagcatgagcaggtattcctggttggtgaagccaaggccgccgccgccttcgcccggctccttggtgccccaagcgagggaccaggtggcgagcgtgtagaacagcgtgtaggtcacggccacgaggaaggtggcctgcagcacctgacgccaagacttgcggaagacctcggtcagcggggacttgacgaccttcttctgctcctgagccatacggaagatcggggtctcctccatgtgaacgcgaaccacgaggccgacgatcaccaggatggcggacagcaggaacggcacacgccagccccaagccagcatcgcgtcctgattgttgaaggattcgagcacgaagtaggtgccgttggacaggaagaagccgatcggggcaccgagctccgggaaggagccgtacagtgcgcgcttgtcttcaggcgcgttctcggtggcgaccagtgccgcaccggaccattcgccgcccaggccgatgccctggatgaagcgcagcaggcagaggatggcgactgcgccaacgccgacctgatcgtaggtgggcaggcagccaatcaggaaggtgccgacacccatggtcatcaggctgacgaccagcgtggtcttgcggcccatgcggtcaccgaagtggccgaagatcagcgagcccagcgggcgggcgatgaaggcgatggcgaaggtcagcaagctcatcagcagtgcgacggtggggttgtccttcgcggagaagaagatgtgcgggaagtagtttgccgcggcggtgccgtaggcgtagaagtcatagaattcgatggcggtaccgaccatcgatgcggcgatcacggtcttgaccgaatcgcgtaccaaggtagcggctttacctgccgcctgccctaagccagtctcttcgactgctgcagtcattgttactcctgttttgctctcgttcactctcattggcgggcgattatttcgtctcacagggaggttgttgttctgttgctgtgttgttgccgtgtactgtccgctaccgtttccgtctgcgggattctgccgtaagccttgtgagcgcaacaaaaaaagccccgcatcttgcagggccttaccgattgtgtcagcttgattggccctgccttcgttgacggggcttcaagcatcaatgccgaattagtccgccagcgaagacgggctaataattcgtgcggatacaaacgcagaagcattgaatccagtcatcgcgtggcctcctttcggtatttcctcaggccgttcgacctgaactggaatgtaaacataggtttggctgtcttgccaatccagcaagggttcacattgtggacgccacgtcgccgagacgaacgcccccgccgcggggaggaacgccgccggcggccggggagccggaccggcccgtcattgcgcggactcggcggtgagggtgacgattccggccagcagcaccatgacgatggcggacgggaagagcaggtaatagccgaagctgctcgcaaatgcgctgaccagcacggctccgataatggcggcgagcgccagaccggccgagttggcgagcgcataaatgccgaggtcgtggccggctcggcgcgggtcgggcaaagagtccatcaccagttcaaggcctaacgcatcgtagacgccgaaagcgaatccggagatcagcgcgaagagcagcatgccgttttcgcgtgccgtgccggtggaccagacgccgagcccccatgccaccgccacgccgatggcatacagcaggcaggatgccgccaccactgcagtggtggcgatgttccgttcctcgatcttctcggagatcggcccagcggcccaggacgcgagcgcagcaccgatgagcgttgccgcggccatgccggcgatgaggaggcccgcgggaatggtcaatggcgcggaagtgaacaccacagccttgccatacacccaaaagcgcacgagataccacagaaagaccccggtcagtccaacgcccgtcatcatgcacacgcgagcggcgaacacacgggcgaatgcaggcgcatgtgccggcggacgcagctggtcaaacacctggctcgactcgaatcgttgatgtggctgctcctggctggaaggctccttgggcagcatgatcacggtcaggatgccggaaaccgcaaacagcacggcggtgtaggcaaacggcgtgaaggagtcgaacatcacgccgagcgcacccatgcatacaccaagcgcttggccaagcatcacgccgataccgtgccagcgctcaatgcgcggacggaatttgtccggaacccgttcgctgatggcgctggccaacggcacggaaatcatcgcataggcaaactgcatgagcgcccagaagaaacacagcactacgaggcctgtgttctgccccagaaccagcgtgatcagcgcgcacagcacgccacccaccaccatccacggggtacggcggcccagaggaatacgtgtgcggtcggacagcgcggagaccaagggcatcgcgaacatggaggccaccacgccaacgaccaccagcacggccagaggcaccaccaagtcagtggcgacgggcagcggacggctggtggacggattgatggtgaccgatatggcagaagcggtgtcgtagtcgaacaatcgcgccacggcgttgggcatggcgatggtgttcaacgccgcccaaggcgcgccgaccagaatcgaagccacgaaaaagccccaattaagacgggaaatctgaacagcggtgggtcgctgaccattggcggcgaccatcggatcgcgcatatcgagatatgcagacgacagatcaggcgcaggggcatccacgctggccgcggcagcggcagcagccgacgaaccggcggccgccagacgcacggcctgggcctcgggctgatcggcggatgcctcgggaggacgccgacgatccttgatggccagtcgggccacggcatccttgtcttcgggactcaatgccttgtcgagatccgggcggtcgtcaatacccgggcgcacgtacggttccaacatgttgctgctctttctttgctctcatcaccggcgggaggtaccggccagctccgactgagcatgacccgcaaccccgccacatgcaaaaccgcccgagcgcactagcttcagtgcactgcgggcggtttgttttccatggacccagcttacgccggacgcactacttggagcgcgcacagcggagtggcgtttatgggccaacggttagtcgatatcggcaatcggcgggttgctcagcagatcatcagtctcgtggtcaccggcggcatcggtccaggcgaggctggcgaccggagtggtgttatccgtgccgagtccgcggccgggctcgaagatgagggcggccttggtcttgccgtcggcagcgatccagcggaaggtgatggatgtgtcgccgtcggcttcgtagctgaactcgccattgaatgcaggcagttcgttgcggaacttggccagggcgttcagggccttcaccaccgggcgctcgaggttttcgtcgatttcggcggtggagtagtaatggcgattgatgtcacggccgttgttggtcttgcgcagcagttccatgtcgttgcggccggcgagtgcgcccacgtagtagacctgcggcactccgggcaggaagaactggactgcgcgggcggccagatagtgctggtcgttgcagccgagcgcggagtagtacgtgctgttgacctgatagaggtcgaggttgctggcggcggcaccggtggcggcctgggattcgccgtgggtgttggcgtggatggtgttgaccagattatcgacgtcctcgtcgggcacgaggcccttgaggctgcggtcgagctgatcggagccgatgtcgatcacgccgatgccgtcgtgcgtatcgagcacggtgacggcgttgttcgggcggatttcggtccagtggaccacgggttccacgtgaccggtgaacagcgagtgcaggagcagcggaggcagggcgaagtcgtagacgcggtccaccttggaggcgatttcaacctgcttcttgtagtagctatgcacctcaatgagaatttcgaggcctcgcttgacgccttcctcgcgtaggcgtgagatgagcttaaaggtcttgggggtcatgaagcagctggtgccggcctccttggcgccgtagcccacggcgtcgagacggatgtagctgacgtgggatgcggccatctgatcgaagatggacatgaggtattcccagcccttgtcggaatcggtgtcaatatcaacctgctgcggagtgaagctgacccagaccaggcgggtcttgccggcgaacttgtagtgggtgaacggcaggcccgggcgcgggcggtagatgccggccagttcctcttcggtggcgccgttcgggaagacggagctcatggtcagaaacatcgggtaatactcggattcctcacctttttcaagcacgtcttggaactgcttggattcccagctcatgtggttgacgatggcatcgaccatgatgccgtgggtcttggaaagttcagcgacgtcgtcccagctgccgagacgcgggtcgactttggtgtggtcgatcgggtcaaagcctgcatccgcaccatcgaacggagtgaagaacggcaggatatgcacgccgtcatacacgccgtcgaagcgggtgcgcaggatgtcggtcatcgagctaagagtgccatcgccgagacgatcggcgtaagcgatgagctgcactttgtttttcatgggacctcccttggttcatggatgcaggtgcaatgtgtacgcagtgtatgcgtgcttttacatacttatacgtatcgaaccggtttgatattacctcgaaagggacgttgatgtctagtaataccgcaaaatgcgcgtgtcgaaccggtttgatgcggtgttctacacaacccagcctgtccgaccccaatgtgtccgtttctgcaaaatcggacatccaaacatctcacgcatcacacatgaccgattctccggaatcggacacacagaacacttttttcggaactcagacgtccgattcgacagaatcggacacatgtgcacaagtcggatgatgagcacgactatcgacgggcgtcctctggttgtggacgccgctgaaatcgatgagatccacaccgggcacacgcatgaagacgcgcagcatcaacgtgtggtatcgcctggcaccagcgtcatgggaataagcacgttcggctcgaacggtttggggatgttcctgcgtgaagcgttagccgcggccacttcctcattggcaatagcctgcacgatatggtcggccgccgactgtgcgatcgccgagaaatcctgcgcgaccgcggtcagcttcatgccagccaaatcagtcaaatacgtaccatcgtaggcaacgatctgcagctcgtcaggaatggaaattccgcggctcaacgcttcgcgcacgcagaacgacgcaccaatgtcggaactgaccacggcatcgacgccgtcggtcgccaccttgtcgagcgcattgctgaccgcacgatgacagccggcaaaatccatcacttcgccagcttcaacatactcgtatttcacgcctgcggaggtcaattcctgttccaacgtgaggtaatagcgcaccgtcgggaacgtggtctttcccaaatcgaacgatccttcctcgacttctccgcgcgcagccaaatcgaagaattgatctcgcggaccgccaatcatcaccacatgtttggcaccattgcggatcagcatctgcgcaatcaatcgcccaccctgctcgtggtcggatccaatcgacgaaataccgtctccaagcacacggtcgaacgcgacgatcgggcgatgaatcgacgtccaataatcgccgggatgcgaagtgtgcgcacacatgacgatgccgtccatcatgtgccgacgcaacatgtcgacatactggatttcgccctccgcctcatctgcggtagagcacaacatagtgcgtaatccttgcgcggcgagcgcatgctgcagatgtgcggtaaacgttgcaaagaacgggtggcggatggtgggcacgatgacgccgaccagattcgtacgatcatgatacagattgcgggcaagctcgttcggcacataattgagcagttgcatggctttgcgcacacgttcgcgcatgtcatcagacacgtacccgttgccgttcaccaccagcgagacggtgctcagagacaccccggccttcttcgccacatcgcgcatgccgaccatgatcgcacctttcccgttatcactgttctatcgctgtattctcacgtgcttaccgctaatattacattcatttacattctctcgaacctgttcgacagtccggcaacgaaatacagcttcttagtgtcgactcctgcggaggcgaaggccttcagcagcggcttggtctggtcgaacgcaatcaccagcgttgcatccggactggcggccttgatggcggttgcgctcagtctctttcacgttactcagcgaccgtccgtgtaacgtgaaaattacgccggattggcaagcaacgcaatgccgaaaccggcggccacgcaaatgagaggcaccgcgacggttgctattccatagcccagagccagcgtaaaacgacgctggcgaatcaatgaaaccacttcgttgagcgccgtggagaatgttgagaaaccaccgagaaatccgacaacgaacatcatgaccgtgtccatatccaccga

SEQ ID NO: 12 - DNA, 40840 bp, Unknown
  R30_18m  MAG No. k141_2775
ccggcccgaacccgcacgggcaccgggacctccccgcatacccatgagacccacgcccgggaccattcccggccagccccgacggcgaggccgaacggcgcggcgcgtccgcgaccgtgggagcccaacgcccggccccccggtccgccgcgcagacagctcccctccagaggggagccagaaactggcttggttatggggtcgctctacactggcttctgctatgcattacttcacccctaaacgttgcgccacgtcgaataaaatcatgtaccacgataaggcgcaggctcagcgtgccgctgatcaaagcctgatcgagcgtggagccgagctatgggtgtaccgttgcgaatattgcggatgctggcacctcacacatcgcgatccacaatccagttaccggcatgtaccgctgaaccagcaactcaagccacacagtcgtaaaaagggctacaagccacgtagacgttagcgtcagaagctccacaggcctcgccaacgccgtatctgaggcaggttacggtccaaacacgccaggtcgtaggctgctaagcgttcagggcgctcggacacactccgtccaacactcacatcaccttggtgctttcaaggttgcggataacccaatcgttgaagcgaattaccggcttgcgcaacataagtcccaacagcaatgagggaacaaggaacagtgccagtttgcccatggaaacccagtattccatgccgaatgagcccgccatggccgaatgcatcgcatccaccgcataggggaacagtagccatttagaaacgacctggaagaacgtcggcagtgtttcaatggggaatgtgccgccggaaccggctacctgcataaccagcagtactacggcaatggctttgccgatatcaccgaacgatagggccagcgtatacacaatattcgagaacaccagtgcagacaaccacccgaccatcaaaaactgaatcggatgctcacactgcacgccgagatagaacatatcgcccaggcacaccagcgtaccttgcagcaaagcaaggaaaccgaaaatcatgtatcggccgaaatattcgtggtgcaagcgtaaaccgaactgccgcgcattgccggaagactcggcacgcggcttcttcagcacatccaacgcggcggccggtccggcaatccgcccggcaatcatggcctcgcgaagacccactcccgaaccgagcggcagatcattgcccaaccctaagatacgggccttctcatggtcggaaatcgatactttcaacatggcgaccagaatgatcgcaccgacccagatagacagaatcgtgtagaacggagccatcgcggaaccatagttggcaacgggatagagcgcgatgcggtcgaccgctacgggtgccgccagcatggaagcaatggcatcgggcttcgcagaggaaatcacagacaggtcgttggtgccgccactggtgatagaggcgagttgggaagacaagttgtcgagtttcttcgccgaacgggtcaaagcgctagctgcgtcagtcaaggccgactggatatccgtcaggctgtctgaaacgccgccagaaagacctgacacgctgctgacggtcgacgcaagcccgtcgattacggaacttgcctgcgtggccacttcgtccatggacgaggtcagattgttcagttgcggtttcagcgtgctcttgtacgtgtctgaagcctgagtaatcgattgtttggcggcggcgatttgtgatttcagatctcgacgcgctgtatcggcatcggcagtaccatttgctatgtgcgtggccgcatcgcccaacgcggtggcggcttgctgcatgctctgctgcgtctttgtggcttggtctgcagccgcgttcagttgagcggcaacggtatctccgcccacgggcagtgaagccgcttgtttggcgagatctcgtaaagcggcggcatactttccaaagctgtcggcctgagcctccactttggattgcatatcggtcagcttgtttgatatctgcgaggattgtgagcccacatcggcaaaagcggcatcgatctgcttggcaatggtgtcgtaggatgaaccggcctgctgcaatgccgtaccgacgccatcggtggctccggacaatgccttgtcgaggctggagacgccgttgcgggtctgtttcaacgcctttttggttgtggccgcagctgagcctgttgatcccagcagcttatcggtggaatcaatgatgctgttggcggccccgagcagattggcataggaatccatctgcgacgcagtgccggtcaaacgagacgacatggtggcaatatgactggaggcgttgttgacgtactgctccatttgcgggctttgcgcgtaatcggccacgttggaaaccaaatccagcgccacgctcgccaaggtcttcacaaatgtctggtcgatggtcgtggccacggtggtagcaccctggtcggtgatatgcggagcgatcggattgattttctcattgagatagtattcgagcttggcgtgcttgatcttcggtgaaaacagcgtcatcatatcggagctgaagctctttggaataatcagcgcggcatagtattcgcctgagttcacgccatcgatggccttagcacgatccacaaactgccagtcaaggtcatgattggccctgagcgtattggtcacggtttcgccgacgttgatggtgatcggcatcagatcggacttatagcccttatccacgtttgccacggcgaccttcaaggccttggtgttgccgtacgggtcccagctggcggcgatgttgtaccaggcgtacagtgccggcacaatcaccaatcccatagccacgattacggcgatcacattgcgggtggcttggcgcacgtcacgtacgaatattttccagataagcttcatcgtgcgcctccttgcccagactgcccagactgcccagactgaccggactgctcgaactgtgcggtgtgcgcagtcggctcggcggcctgatcgccgaacagtgtgagtcgttcagtggtttcgccgatatccggattgctgcccatcgccgcttcgtgacgtccgtggccgtggaaacgccgccacacatatccgttgagcatcacattgcggaactcgtcggcactcatggcactgacgccaagctgcatggcgtaggtttcgcgtgcgtattcaaccacaatgagataggcgtcgataagaataatcgacagaatccaggaggtcagcatggcgattttctcttgggtgatgaacagcagtaccaggaatacgaacgggagtacggtcagcaatgtcagaccggcaacgatcatctttgggtaccgcgcgaagaaccggtgcgcgcgatgagcgatgatatcgcgcagttccttgctgtcggacaccgtgcggaatacggagttcaagctcacctgttcgttcaccatgctgttgtgctcggtgatcatcaggtcggtatctcccaaacgatggtcgaacagcgcgttcaggttcatcgcataccggcgtacgacaagtcccacgaaaagcgccgccggcagataccagaacaggtgcagcatgtcgagccagtaatggttcgcgtacaggccggcgatcgggccgcgcatcgcgttgatgccgtaggtaaagggcagccatgggtgcagttcgcggaagaagttcggcatcatttcaatcggatacaggccggaggcaccgggtatctgcacaatgaccagaattacggcgatggctttgccgatatggcggaacgccacggccagcgcgtaaataatgttgatgtagacgaacgaacagaagattccggccaagatgaacagcagcggatgctcgcattggatgccgagcaccagatcgccaatggtggcgatgatggcttgcaggaatccgatggtgaccagcagcagccagcggccaagatatgcttgcgtagcggtgatacggcgaatgcctttgcggtcgacctcaagcttgtagatggcaatcagcacgaaaccgcctacccacagtgccagattcgtgtagaacggggtgactgcggacccgtaattgtcggtggcgtacacgactttcgtggtcagggtgacgggattgcccatgaactcgccgaatcccttgtcatccagatgcagcgtatcccggattttctggtaagcggcggaactatcgagcgtggcgatatcggtgcgtacggtggcgacatcgctggccgcctggcgcagcgaatcctgcgtgctgctgatggtggttttcgtttggttcagggtatcgacaagctggtcgaacagcccgtcggcctgatccaaggtgccggacaacgaagtcaacgtgccatccagcgtgccgttcagggcggcgaaactgttcaatgatgaggtgagcgacggcattacggtgccggtcagcgagccgcgcgcggtattcagcgccgcgatgccgccggtggtggtgttggtcatggctccggaaaggttcgtggtggcgtctttgccggagttgatgaactgtgtggtgtcggtatggaaggtgttgagctgtgtctgctgtttgctgatcaatgagtcgagcgcatcgatttgtttccagatgttctggccgaccgggtcggtggtgtctttgccgatgccggctttggtcagcgcgtctttcagatcgctgattgacgtttgggtggcgttcagtggggccgaaagtgtgttggtgatggtgtcgacggagttctgcgcgctgttgaaggagccggtgatgctgccggcggcgttgttgacgtggacggccagtccggagagttgtgctgaactgctgtcgagcgcgccgaccagtgtggtggagaaggcttgtgacccggcctgtgtttccgccaacagtgtgccggactggcgggaggcattctgcgcggccgcgacggtctgcttgagtgaggcggtggtctgtttggcgtcggcgagaatcgtgtctgattgggccagcgtgtcctgtaagtcggtgagtgaatcctgaacggtgttcagcgtggacatcaccgtattgagatcatcgatcgtatcgtgctggactttgccagtggcttggccgagatcgtctccggtttcggaaatggccgaggcaacggtggtggctaccgtggtgacgaaggcggagttgatctgctcatcgatggtggtggcgccggtgtcggtgattttcggcgcgatcgcgttcttcttctcgttgacgtaatacttgattttcggctgtttggaggttccggtcaccgattcgaccaagctggcgctgaaatccttgggcagcacgatggctgcatagtatccgccggtctccacgccgtggacggcctgttcctcattgtctacgaagcgccagccgagttcgtcgttctgcttgagtttcttgacgacctgccggcccgcatcgagatggccgaccagatcgttggtggtgccttggtcttcattggctacggccacttgcagattgccggtggctgaatagggatcccagttggcgagaatgttgaaccatgcgtacagcgagggcagcattgctacgccgagcgtcaccacaacggcaacgggattgcgtaagatacgtctgcaatcgcgtagaaagacttgccaaaccgtccgcatccagtccctcttttccggttcgtagtcattgcggccacatgcagtctattcccaccactggtgcggatactgctggtttggtgggttttcttgcaaaactggccgttggttgtccgcataatgggactgatatgtgaacgtttgttgatggtgcgacaccggcgggatggctgtgcaattttgccggtatccggtgatgaaatgttgaggtgttggaactgagtcgtcgcagtgctgagaccgagacgactcagtgacgagcctatccgaggctatctcgttggttctggtctcactgatccagacggaagccctgagcggcggccttgtcgagcagtgtctgatggctgacatcctgccgactgatcgtgacgacctgatcgctgaaagcgtccaccggacggtcggcttggcgcagattgtagtaccggtgaacttcctcgtcgaaggcgggcagctggtcgagtacgccatcggcgtcagccgggtaggtgttctcgaagaactgcatcgtgcgcggcatgcgcggcttgacggtcgggttctgatcgggcttgccgatggccagacccagcaccggatacgtgtattccggcagattcagcacgtcgataaggccggggatgttgttgagcagagagccgagaatcacgcagcccagtcccagcgaataggcggcggtctccatggcgtgcagggccagcactgcgtcgttctgagcttgggtgaagcgatagctgtacttgagatggaattcgtcggaagcgggatcgatgcccttgcgttcggcgatgcgtgcgttgcggtgctcgtcgatgacgaacacgtacagcaacggcgcggtggcgatatacggctgatggccgaattcggcgagcttggctttggtggccgggtcggtgatacggatggcggaccagtcgttaaggaactggctggacgcggcatgttgggcgacggtttcgagcgtggcgcgggtatcgtcgtcgatggcctcgtccttgaacttacggatggggcggcggcccagaagagcctcgattgttgcgttggtaaccatggctttattgtcgcacggcagacgccggacgccacggtggattacctcacagtgaaatgccgatattgtgtggcggaactgtgctggactgatggttcctgtcgattgactgatggttccttgacgaaattccagcgatgagtcatcagtcagccaacagaaaccatcatccaaccgggggattagcggctgggcttgcgatggcggtggtcgacgaacgccttggagccccgatccgacagctgcgaaaccactgcgccgagtgcggccgaaacggcggcgaatgccagactcattgccagactttgcggcgcgtctgccgccagtcccttgcgcagattgcgtttgcttgtgcccttgtcccatatcatctggaatgctttgccggcaaccaagcctgccagcgctgggactgccgacttgatgagcttgtcgcccagagaatcagggtcgttgagccggtcctcgcgcagcctgttgaccttctcgtcgatgcggtgcaggctgtcgaccgcgcggtcggcgctggaggggaagtcggtgttcgtttcgtcgctcatgactctcagtctaatagcatctcaatcatctcagcgcaaaagatgggcgttaatggtggagtcatgaacgagcgcagactagagtggaggcatgagcgaacagaacgtgaacggcaccgttgccgtcgagaactctcgtggcggcaatggatttttggtgttgctgcgccacggccagaccgtgtggagcgaatccgggcagcataccgggcgcacggacatcccgttgaccgcggtcggcgagcagcaggcagcggatgctggaaggcgcctgcgcgaggccttccccgaaggattcagccagagctgtgtgttttccagtccgctgaagcgggcgtgccaaaccgctgaattggctggttttgcggaccacggtgtgttggacggcatcgctgaatgggattacggccgagccgaggggcgtacgcgccagcaggtgagtgaggccagcggttttgaatgggatgtgtggcgtgacgggccgcgctcgctgacgcccacgctggagggcgactgggtcgagaccttgccttcgggcgaacaggtgccggtccatgccgggcctggcgagacgctggaagaagcggcggcacgcgccaagagcgccatcgacgagattacgccgctgctgaaagacggccataatgtgctgttggtggctcatgcgcacatcctgcgcatcctcacctcgcaatggctgggcgtggacccgcatttcgcacggttgctgcgtttggatacggcgcactactcggtgctcagcgtctataagggagataacgtcatcgaacggtggaacgcctagccccggttgcgctgcgattgcgctggcctgcccgctactgcgggcgggcctttattgtttgtggcgggaattgcggtatgtcgataaatgatttgcaaacgatagcgtcggcgtgttgttttttgatgggtataagtggcaatcgattgccatgaaagatatgttagcgctctcatagttgcgaacgcttgcattgcgataatgcggcaaaaatgactgaattaatgggatatttgttgacaatggcctgaaaatgatgatttatgacgcgccgatattgctatcgtttgcaaaaagaagcaaaccgttgcacaatagtgcatgtcgatagtcgtaaaggtgcgtgctagcgtacctgtcctgaccggggacggccgggtcgacgatgaaagagaaaggttcgatgatgaatcgtacagtcaagtcagcagtcgcgatggcggctgtcgctgcgatgtccctcggcgctttggcggcctgcggaagctcgacctccggcgatgacgccaagggcaaggtctactacctgaatttcaagccggaagcggctgatcagtggaccgctctggccaaggaatacaccaaggaaaagggcgttgaggtcaaggtgcagaccgcggcctccggtacctacgagcagaccctgaagtccgaaatcgccaaaaccgaagccccgaccttgttccaggtcaacggcccggtcggctaccagaactggaagaagtacaccgccgatatgtccaatacggatgtgtacaaggagctcaccaaccaagatgtggccctgaaggatggcgacaaggtggtcggcgtgccgtacgtgatggaaacctacggcctgatctacaacaaggacatcctcaacaagtacttcgcgctggatggcgccaaggccacgtccatggacgaaatcgacaacttcgacaccctgaaggccgtggccgacgacatgcaggcccgcaaggacgagctcggcatcaagggcgcgttcacctccgccggcttcgactccagctccgactggcgcttcaagacccacctggccaatctgccgctttactacgagttcaaggacgacaacgtcaccgagcagccggccaagatcaagggcacctacctgccgaactacaagaagatcttcgacctgtacatcaccgactccaccaccgaacccacccagctgagcgccaagaccggagatgatgcgaactccgagttcgcgctcggcgaggccgccttctaccagaacggtacctgggcctggaccgacctgcagaaggccggcatgaccgccgatcaggtaggcatgatgccgatctacatcggcgtcaagggcgaggagaagcagggtctgaccaccggttccgagaactactggtgcatcaatgacaaggcctccgacgccgacaagaaggccaccgaggacttcctcaagtgggtgatcacctctgataccggcaagaaggccctctctcaggacatgggcttcaccaccccgttcaagaccttcgatgacgtcaaaagcgacaacccgctgaccgaggccgccgtggaagaccaggagtccggcaagacccaggtttcttggaacttcaccatgatgccgtccgaggaatggaagaacaaggtcggccaggcgctgctcgagtacgcgcagggcaccggcaagtgggatgccgtcaagaccgccttcgtggacggttgggcttccgaatacgaggcctcgcactgagtctcatagagtcccatagccgataagtaacaatccgcggcgcccctgcctttccttctccaggggcgccgctttgtattgctgagtctcgcacaaaatcgtccgccgcagaaaagtgtgaggcacgcacccgctcaatcgcacactgtgggtccatggattggcgatttttcgccatttcccacaatgtgcgattgagcgttattgtgcggttgcctcacgctttttctatggtgggctttgttgtgtgagcctacttaacgcgggaggtggaggagcggaccttcagctgggccgggaacacgatgtagggttgctcaatcggcttttcgtcaatgagatcgagcgtcatgcgggctgccacgcgggccatttccaccggatcctggcggatggtggtcaggccgatatcgccggtgtagaaactatcgtcgtagccgaccagcgagacgtcgccgggcacggagaatccattgcgctccagctggaacataagcggcaaagcgatgccatcctcctggcatgcgatggcggtgggcatctcatcttggctcatgagttggtcgaccacgtcgctgatttcataacgtccatcgtcatcgaccttgcagacgatgacctgcggctcgatgccttccctgcggcagcaggcggtgaatgagtcgaatcggctttgcacggagaagctcagcgacacctcgcgattggtgctgatataggtgatgcggcgatgtccgagattgataagatggcgggcggccagcgtggagccctgcacgtcgtcgatattgacggcggcggtaaagccgcgggcttcgggctcgactgaattgatgccgacgatcggcacgccgaccgaagccagttgcgcgatttcgttgttgtcgatatcgaaagacgccacaatcacggcatcggcgttacggcgtaccggcaacatctcgaagaattccttgcgctcctcgatgctggaaatctggaataccgaaatatcgtagccctgcgtgtgcagcacctcgttgagcccctcgatgaccgaggcggtgaaccacaggcggatatggccgctcatcagtactgcgatgcgcagggcgcggccggatttcagggccgcagccgagcgggagagtgagaaattgagtttgtcggcgatggcgagcacgcgctcgcgggtcttggccgacaccagatccggcctggtgaaggaacgtgagacggtggagatggagacgccggcctcgcgggcgacatcctgaatgctcgtagccattgcagcccccttgcgttgaatggaaaatcgcaatacacatgcacaactgactacagtgtacatgctgattgattgatttgcggcgatgacaacgattgtattacaaacgtttgcaaagtgtctatgacggcgtcagattggctttatatagccattatcttagttgaaagaagattgctggagctggagtatgctcgagattgaaacgctgaaaatgacaacgtttgacatataatgattcgacgtttactatgaacataggcttgaacgagaacaggccgtgcatgcggttctcgatcggcaggctcgcattgagttgaactccgcagccggcgcacgatgcagtgtcgcaacgcagcggactcaaggaggaggaaaagtcatgatcagcatggctggcaaggcgatacgcagatggtgggcgctgttcgcgctccccacattcgccgcattcatcatcgggttcctggtgcccttcatcatgggcgtctacttaagcttctgcgaattcaccaccgttaccgacggtgaatgggtggggcttaagaactatggcaaagcgttgaaagacaaggaattcctgcacgcgctcggcttctccaccgcgtttaccatcgtgaccaccatcgtgatcaacgtgatcgccttcgccatcgcctacatgctgaccaaggcgatcaagggctccacgctgttccgctcggtattcttcatgccgaaccttatcggcggcatcatcctgggctacatctggctgctgctcctgaacggcgtactggcccactggggccgcgccctgacctataaggcgtcctacgggttctggggcttggtcatcctggtgtgctggcagcagatcggctacatgatgatcatctacatcgccggcctgcaagccctgcccaccgatgtgctggaggccgcggccgtggacggcgccaacggacggcagaccatgttccgcatcatcatcccgctgatgatgccgtccatcaccgtgtgctccttcctgaccgtgaccaacggtttcaagctctacgaccagaacctcgcattgaccaacggtgcgccgagcaacatgtctgaaggtctggcgctgaacatcacccgcaccttctacggccgtatgggctgggaaggcgtcggccaggcgaaggccgtgctgttcttcatcctggtcgcggtcatcgccctgattcagaacaagctcaccacgagcaaggaggtggcagcctgatgaacgagaacaagcctgtgaagcatggcgcattatggaccgtgctgtttgccgtcgtctccctgttctggattttcccgatcgtcctggtgctgatcaactccttcaagcagaaggcgtacatctccaagaacgccttctccctgcctgccggcaaggcgttcgtgggacttgagaactatgtgcgcggcatcgagaccacgcagtttttcgcctccttcggctggacgctgcttatcaccgtcggctcggtggtgctgattctggtgtgcacctcgatgtgcgcatggtggatcgtgcgcgtgaacaactgggctgcgaagctgctctacaccctgttcctgttcaacatgatcgtgccgttccagatggtgatgttcaccctctccaagatcgccgacatgctgaagctcaataccccgtggggcctgtgcatcgtgtacctcggtttcggggccggtctggccgtgttcatcttcaccggcgtgatcaagggcatcccgcaggagcttgaggagtccgccatgatcgacggcgcgtcagtgccgcgcatcttcttccagatcgtggtgccgatcatgaagccgtcgatcgtctcggtggccatcctcgaagccatgtggatctggaacgattacctgctgccgtacctgacgctcgacctcggcaagtacaagaccatctcggtcgccgtgcaatacctcaagggcggctacggttccgtggatatgggcgccatgatggcctgcctggtgctggcaatcatccccatcatcgtcttctacttggtatgccagaagtatatagtctctggtgtcatggcgggagccgtcaagggctgacgactcgcgtcgtcagcccatggctggaagcccagtgggcttccagcaggctccaggctgagccgcgacagcggcgaagctaatgatgagcctcgtcgtaggcgagtccgtaattgcagggccgaaggcggagccgtcaagggctgagctccaccaatccggctcccctctttgaggggagccgtcggcggaagccgactgaggggagtatcctgagctccatcaagtctcccctcagtcatctgcgatgacagctcccctcagagaggggagccacaggcgacacaaggagtagttgatgaactggctggcaccggactcgaaattcatgcgcgcgtggagcaatcttgttgacggcgtatggatcaacattctgatgctggtcacttcgattccgctcatcaccatcggtgcggccctgaccgccggccatgatgcttgccgccgctccatcgagggcgagggcaaaggcgtaaccgccaactacttcaagtcattcaaagccaacttcatcaaagccacactgctgtggctgccgttcttggtggtgctgattgcactggtctggtcatggatcgtcctgcagatcacgccgctgctcatcatcaaattcgcgctgaccatcctctggcttatcggcttcgaatgggtgttcgcgcttcaggcacgcttcgagaacaccgtggccggcaccttgaagaacgccttcatcttcggcatctcccacatcgcgatgaccgtggccctggtcatcgtggatgccgtgttcgtggcgctgctggtggccagctggttctacatgcccggtggactgttcctgctggtgattcttggttacggcaccatgctgatgctccatatccccgtcaccgagcgtgttttcaatccatatctcattgactaggcgggttctctcgcgaatatgcggcgatcttcgaggtctgagcgttctctgtctacgcaagcgcggtaaagataacaaattgaggctattcgctgtttgtggtgggtgatggtcaagtggtggtgacggctttgaggtcgagtctgccgcaggtcaggtagatcatggtggcgaagtagtccatgtcgcggaagcctctcgcccgtcgtttgacgttctggatgacgctgtcggcgccctcgagcacggcgttggtgtacgggtgctcgaagtaggcgacgatctcggcgaagtggcgtcggatcatgcgggcgaagtccttcatgggctcgagcctcgagtgcatcatccacgagcacaggcgatgcaggcgcacccatgcctcggacggggtgcggctgtccgtgtggatgtcctgcaggacctcgcgcatccggcaggcgcggccggtcttcaaccgttgcctcgtcaggttgcgcttggtctccacctgcagttcggtcaggctttcctcgttgcgcagccacaggtacttggtccgtttgagcggcgggttggagcggccttccgtcttcctgacctgacggcctcgttggcgtgcctggccacgtggaacttgtcgacgatccgccgcgcatggggcagatgctcacggatgtccttccggaagcccaggctcatgtcgcaggcgaccagacgcacatattccgggaccccgttgtggtccatgaaatcacgcgagagccgttcgaccgtggccgggtccttgcccggcgtcacgttgatgacatcgtgctccacgagatcggcgaccacggtgatgtaattgtggcccctgcggctggtctcgtcgatgccgattggcccgtacccgcacctcgtcacagcttgtataatcacgattatactaatcgtgatacaataaatcgtgatgcgatagaaatacgccggcgtatgacataaaggaggcgggcagcatggcattcatcggacgagacgatgacctcaagcaactgcaggaatgtttcactgagcgtagggcacagcttgtgttcgtctacggccgcaggcgcgtgggaaaaacagagacgcttattcaactcgcaaaagacaaggaaaccttattcttcgcggcgcagaatgccactaaagatgaacagctggcatcgttctcccgtctcatgttcgaggcgggtgccccgggcaaggattatctgagtcaatatccttcttgggaaagggcgttaaccgagttaacccggctgccagagccgagcgatggcggccgcaggcttgtgatattcgatgagtttccttatctggtcaaatctgatccgtcattgccgtcagtgctacagaatctttgggaccacacgttgcgtcatgcaaatctgatgattgtgatttgcggcagtgccatgagcttcatcgaaaaggagctgttgggagaaaaatcgccgctatatggtcgtgcgaccggcatcctgaagatgctgccgatgccatattgggatgcagcgcaattcttccccaactatagtagcgaggataaggcgctggcctacgcaatactgggcggtatcccgcgttacctagaggaatttgacccagatgagaccatagacgcaaatgtcaagcggcatattctgagacgcattgctccgctatacagcgaggttgaatttttgttgcacgaagaactgcgggaaactgcgaaatataacagcgtgatacgggcgatcgcgctcggcgcaacttcgctgaatgagatcgcgacacacacgatgatggcaaacgcaacagtatcgtcgtatctcgccaatcttatggaactggggattgtggaacgtgagttcccagtcacggcgaagcctaaggagcgggcgaaaggttcgcgtgggctgtatcagctgagcgacaatttcttccgattctggtattcgtttgtctttccgtatcgttcggaattggagcggggcgatgtggaaggcgtatacgagcgtcatatcaagccggtattacatgattttgccggcaaaccgttcgagggtctgtgccgtgaatggatgtggcgtgagagtgctgctggacggttgcccttccgtgcgcgtgcggttggccgttggtgggatcgtcaggatgagatagacgtgatggccgttgacaatgcgtctgatgctgccattgtgggcgagtgcaaattccgcaatgcgccggtggaccgttccgtgctgaatctactgcgagaccgtgctgcgcgaaccggtatcggccagcgaacatacctgctgttttcgctcggcggtttcgatcaatcactggtcgacgatgctgcggcgtctcaatccgacgttcagctcgtcggcatcgatgagctgtttcatgaataaatcccatttgcgaatagctctcactgagtgctcatcagtgagagctattcgcaaatggagccttacttcttcgcctgagtgagctggtaggcggcgaagaggatggccagccagatcacgccggcgatgacggcgatgcggtagctggtggagaagcacatcagcaccacgaccagcgccaggaacgccagcaccacccacggggtcaccttggcaaacggcagtttgaagtgaatcgcgtccagtgcctcctggccgctcagaccggccagctcggaatcctcgggagcgccgcccgcggcgaccaccttacggaacttcatttcggtgagcatgatcatcgtccagttgatgatgccggcaatggtggcaatcgacatcaggtagttgaacgcgaactcaggccacacgaacaccacgaccacggcgatggcggtgatcgcggcggacgtcagcacgccggccactggcacgccgcgcgagttgagcttgcccaagtaagcgggcgcattgccctgcttggccagcgagtacaacatgcgggagttggcgtacaggccggagttgtagacgctcatcacagcggtcaggcacacgaagttcaaaatgccggcagccgcgtgaatgcccacggaatcgaagatctgcacgaacgggctggacttgccatcgatggtgttccacggcactacggccatgatcacacccagagcgccgatgtagaacacgaggattcgccaaataatatcattggtggcgcgcggaatcgtggtcttcggatcctcggtttcgccggcggtgatgccgatgagctcggtgccgccgaagctgaacatcaccacaaccagtgccatcagcaggccggtccaggaaccgtcggaattctgccccatcaggccgttcgggaagaagccgttacccacggtgaaccagttcgcgaagcttgcgcgcacgccggatgcggtgggcaggacaaagatgatgacggccaggccgccgataatcatggcgatcacggccacaatcttgatgatggcgaaccagaactcgaactcaccgaatttagagacgcccagcaggttggcggcgcagatgatcaccaagaacacggccgccgacacccatgtcggaatcgccgggaaccagtagttcacaaacgaacccaccactgatagctccaccatcgagacgaggatgtagttgaaccagtagttccagccggaaataaagccggcgcgcttggaccagtagcgggtggcatagtagctgaacgcgcccgccttcggatcctcaacggacatttcagacagtgcacgcacaatcgcgaaaatcgcgaggccgccaaccaagtaggcgagcagaatcgagggtccggccagcgcgatggattcactggaaccatagaacaggccggttccgatggcgccgcccagcgcaatcagctggatgtggcggtttttcaatgacttgcgcagcgtggccggcaccggcacgtcgtcggtttcgcgcggcttcttaggcgcatcagtagtactcattgtgctcttctctcacatttcttgggtttggcgcacgcggggcttgccgtgatgcgcaacgttcgttattctatgccgccgtatcgtctcagaaatggtcaatcgtctatttgtgcgctattgcaagcgcgggcgtgggcgcggccggtgagcaggcgaagctatagcgagcgatgcttatgaaaccgcacgcttcactgagttcactgagttcactgaattcactgtgctcactgcgtggcaggcatacacatggtgaagatggtgtgggacaccgattcgggagaggccgcgagatcggtggcgagccaatattgcaaaagcccaatgctgccggacacggcgaatcgcatacgcatctgcgcctcggctgggtaacccgccgaagattgcaactgttcgcctacaccgcgctggctgtaaatcaatcccagcagctgctgctggaaaccgatatccgctttcgggctcatcagcacttggagatgattgcgattgtcggcaatgtactggcagatgcgctcaataacatgctcgatgccggcaggatctggctgggcgagtagctgttcgagtgcggtggtgacccaggccatggtttcgtcttcaatgtcgtgcagcagttcctcgatgctcgcataatgcgcgtaaaacgtggaacgattcacatcggcccgctcgcacaacgctttaacggtgatggagccgagcggctgatcgcgcagcaactcgataagcgcgtcctgcatggcacgtctcgtgtagcgggtgcggcggctttccgtcaattctttggccatggccttctccccaagttccgacaacccacaatccaactgttggttgcagaaccgacacagtgttgttttacttgagtatagcaggaagttctggcggggcctatggggctaggtggctgccacgagcgcgttggaggtgtgcgatggcgtatatcgaattcgaccatgtggtcaaggaatatccttctggcagcagtgtgattcgcgcgctcgacgaggccagcttcaccgccgaacaaggcgaattaagcgtgattctggggcagtccggtgccggcaaaaccacggcattgaacattctgggcggcatggataccaccacaaccggccgcgtagtggtcggcggacgcgatattacgggtctgcggaaaaaggaactggtgacctaccggcgcaacgatatcggcttcgtcttccagttctacaatctggtgcctaaccttaccgcgctcgaaaacgtggagctcgcctcgcaaatctgccctgaccatttcgatccagaggaaacgctgcgcaaagtcggactgggggagaggatggacaacttccccgcgcaactgtccggcggcgaacaacagcgtgtatccatcgcccgcgcgattgccaaaaagccgaagctgttgttgtgcgatgagccgaccggtgcgctcgattacgagaccggcaaggaagtgctgcagttgctgcaggatatttgccaaacacaaggcatgaccgtaatgatcatcacgcataattccgcgcttgcaccgatggctcacaaagtgattcgcttccgctccggcaaggtgaccagcgaggaggtcaacgcaacgccgcggcccatcgccgatatcgaatggtaggtgattggcgatgctcactgcaagacactctgtgaaacgccccgtgaaacaagcgaggcgattcgtgaaacaacctgtgaaacattctgtgaaacggcggaacctcgacgatagcggcggtcgaggagcgggcgtttctgcggtatttgccaaagatacgttgcgttgctggctgcgcagctggaagaggttcgtctcgatcgccgtcatcacgctgcttggcgtggccgtgctgaccggcatctacgccggatgccgcgatgcttttctggcggccggtcgtttttacgatcagcagggactgcatgacctgcaggtgctatccacatacggcctgaccgatgatgatgcaacggcactgcgccgaatcgacggtgtgcaaaccgtgcagcccgaacgttctcagacggtgaccacgttggtggacggcaccaagaaaaccgtgaccatgcaggaaatcggtaccgaagggcttgatcagccgtacatacggcagggcaaactgccgaacaaggccggcgaagtggcggttacgcagcaattcctgaacgatagcggactcaagattggcggcaccattactgtgacgccacaagacacctcttcatccgtcatatcggtagcggccacggagactgacgattccaataatgccgatacggtaggtgtcgccgccaatgcctcggcatccgatgcgaagtccgacgccaatacggacgccgacgccgagcaatccccgcagttccccacgaaactcaccatcaccggcgtcgtactcgacccgcgcgacctcaacaatccagacggctattcgggcatgacctccttccggtccacctcatccgaggactatacgttctttgcacccagcgacggcgtgaccggcaatatatacactgcgatatcggttgccgtcactggtgcgtccgattttgacacgttttccgatgcctacgatgaagccatcaaaactgtggccgaccgtatcgaacatcagatacaggccacacgccagaaagcccgtcgtcaacagatcgtctccagcgcgcagcgcaaactggatgatgccaaagacgaggccaacgagcagctggacgaagcccagaagcagatcgacgacaactgggccgagctggaagccaacaaaacgacattgcaagatagccgtaccgaattggagaacaacaggacaaccattaccgatggcgaacggcagctcgccgatggacgtgcgcagattgcatcggcccgtcaacagatcgcgcaaggtcgccagcagatagccgaagcgcgcacccagctcgaatcgggcaaagcgcagctcacctcggctcgcaaacagctcgatgcggcgcaaacggaactgactgccaatcgcacgaaaatcgaacagggcattacccaaatcgaccaaggcgtggcacaaattgatcagatgctgtccatgattcaacaggctgacaatctactggcgcaacttgacccgaatatcgacttcaactcacccacatggcaggccatcaagcaactgctcgcgcgccttggcattaccctgcctgaagtgccgtcaatcagtgagctgcggcaacagctggccgccaagcaaacggaactgcaaacgcagcgagacagtctgacccagcagaaagccgatttgcagcgcacattaaacgaaaccattgcccccgcacaatccaccttggaccagcagaacgcgcaactgaccgccaaggaacaggaagcggctgcaggagaggcacagctcaataccaaatccgcggaactcgaagcgaatgccgcaaccctcgaaacccagtcggcgcaacttgaagcgcaggccgcccaactggccagcggcaagcagcagctcgaagaaggcgagcggcagctggaagaaggcgaacaacagctcgcggacggcaaggcgaaactggatgatgcgcagtctgaactcgatgcgaagcgaagcgaagcggaaagcgaattcgccaagcagcaacggcgcatcgacgatgtggccaacgcacgttggtatgtgcagacgcgcgcttcgatcgacggattcagctcgctcaaatcagacgtcagttccatcgaatccatcggccgtgcattcccgattgtgttcctgctggtcgccgtgctcatgagcctgaccaccatgacccgcatggtcgaggaagaccgcggacttatcggcacctaccttggactcggctatggcggactcgccgtgtccagccggtatctgctgttcgcgttgctcgcctgcctggtcggcggcggcatcggtctgctggtcggattccttggcgtcccggcattcctgctggtggtgattgagggactgtatatattgcccggtgtgcgactcgaatacgactggctgtacggttcggccggcatcgtgctgttcgtggtcggcgtgggcgtggccaccgcgctcgcctgtcgcgaggagatacggcacacgcccgccgcgctgatgcggccgaaggcaccgaaagcgggcgctcgcatattgctggagcggattcgcccggtatggagccggctgaacttcctcggcaaagtcaccgcgcgcaatatcttccgattcaagtcgcgcttgattatgaccgtgggcggcgtggccggttgcacagcgttgattatctgcggatttgcgattaatgacaccgtcgacacgattggcgtcaaacaatacgagcagatctaccagtacgacctgatggtcgtggccaatgacgatgacgccaccgcgatgcgcaagcaggtggcacaagatggccaaaccaccgaaacgctgaatctgcgcgtggatagcggcgaaatgagcaatgcggcgcaggaaagcgaaaccgtgcagctgatgaccgtgcccaacgattcgctgaatatcttgaacgatatggtcacgttggaacaagccggcgatgatgaatggttcggactgcccaatatcttcggcaaagcgggtggcggcactgtagcgttggatgatagtggcgtgattgtatcgcagtccgccgccaactcgctgaatattcatgccggcgacaccgtcacgctgggcaatggcggcagcagccgggccaaggtgcaggtcgcggccgtgacgcgcaatcttgttggctctgatgtgtacatcagtgagcgactgtacgaccagaagtttgcggccggcggtgtgacgtcttcggcttcgggagatggcactgcctcgaccttgacgtggaacgcgatgctcgccaagctgaaaggttccgagaccgaacaggccgaatatgcggatcggttgggcgaggaatcgtcggtgctcaaggccgtgagctgtgcgcatctggccgccacgtttaagttcgatttgatgggtgccgtggtggcgctgattgtggggctcgccggcggcctggcgctggtggtgctgtttacgttggccaatacgaacgtgtccgaacgcatccgcgagatggccacactgaaggtgctgggcttctatgaccgcgaggtgcacaactacgtgaaccgcgagatgatgatattgaccggtatgggtgtggtggttggtctgccgcttggcaggtggataggcggattactgactgctgcgttgaatatgccgtcgctgtatttcgaagtggaagtgcactggtacagctatgcgattgccgtggtggcgacgctggcgttcgcgctgctggtgcagctgttcaccaacccagtgctcgatcgcgtagacccggtcagctcgctcaagtccgtggaataagtctcattgttgttgattatgtctggggtgaggcaggcgtaataaaagtctctgttaaaccagaattgacataggagagtcgaagtattgtccagcccgttaggccaaggcgttgggggggggtttatcttgtgggtctgtaagtaaagtgtgcatttcgttccaagcgtgcgaagacccgattttcaactggaatcaacgatcgggctttcgtgctcaacgattactattcacggctgcggagtatagctgggtagcgtctcggctatgtccgtagtgtccgggcctgcccgccaacgtcgtggccggcgtgccgcgcatcgagaaggacccgcgcggagggggcgtcgtcatcgtcccggtgcgcccgtacgcgaaggacatgggccggtgccgccagatgcggggagcatggccggccgtacgaccgtctgggcgtgtgccgctggcggcatctcgacatcggctgcgccaggctcctgttggagcacgcgcccaggagcgccgtgccggcgctgatggattggctgcaatgtattagacagtccgatgggggacgattgacatgaggttggaggccgacgatggccggcccgaagcatccccgccactacgaggagtcgttcaagcggcagatcgtgcagctttacgagaacggcaagccggcgcgcgagatcaaggacgagtacgacatcccgcattccacgctgcaccgttgggtccagggcatccgcaaccgcggctccacgaaagccgccgacaaccgcacacccgagcagaacgagccggtcgggccggggaggcgcgaccggcggttggagatggaggtggacgtttcagaacaagcggcgccggtattcgcgcgaaggcaggcgtgatacgggccaacgcctcccgttatccggtatcggcgcgatgcgggatgccgggcgtcccacgctccacctgctactggatgatcgaacatcccgaagccgggcgggtggacccgatcgccggcgacgtgcgcgcggtctggcgcgacggccatgagcgctgcggcgccgggaaggtcaaggccgccccggaaaggaggggcgtcaccgcgtccaggaggcgcgtcggcggcatcatgcgcgaacacgaacaggccgccgaagaaggagctcgcgtaccggaaccactgcaccacgatcgagcagctgaggcgcgacctcaacgactacgtgtggcggtccggcaaccagcggctccactccacccccggataccggagcccgaagggattcaccgaacaaggactcgtcctctaagaaaccgtccaacacaccgttgccaatccacatcgaggagttctcgaaactcggcgagaagatcgaccgccgccgcttcgacatcctgcgcaccatccgatccggcctatccaacgccaggctcgaggccgtcaacaacaagatcaagaccaccatcaagatgggctgcggctacaggaacctcggcaacctcatcgccccggtcatgctcaaatgcggcggcctcaacctccaactccccggacgccaataacccgtaagccagaccagtgacccacacccacacaaacacccgaagagccaaaatttatacgtcaacattcatttccttgacattattaaatcaatatgatttaataaatttgtcgatggagacacggatccaataggagacgcaaccgagcgaaggagcaaggatatgattacaggaaaactcttcaaagcggcggctgtagccgttgcggccatggtcgcattatccggctgtggaatgagtagtgcctctgccgatgccaataccatcaaagtgatgtattacaagacggattcgtttgtccgttttgatgctctgatgaagacggtgaaggcgaaaatcgaaaaagagaatcctggtacgacggttgagctacaacctgtaaccgcgaacgataacgattacaaaacaaaacttgcattagcgcaacgttctgcggaaacagccccagatgtgttctatgaagattcatcacaaattcgtgctgatgctgatgcaggttatctgttgaatcttgattcttatttggccaagtgggatgactggcagaatgatttttccgatgctgctaagaaagttggcaaaggtaaagatggtacctatgcggtgcctctgagcaccgatacacgtgtgatttggtacaacaagcgtgtgttccaaaaagctggtattgttgttccttggcagcctaaaagttggcaagatatccttgacacggcggctacaatcaagaaaaaactacccgatgtcactccaatgagcatgcttgccggtactccttccggtgaaggtacagtcatgcagagtttctacgaattgttgttcgggacgtccgctggtgatgacgcccttcaggatcaaaaaagtgagaaatgggtcattggctcacaaggtatgaaagattccctgaaattcatgaaaacgatttatgacaagggatatacgccgagtgcatctgaagtacttgatgcaaactatggagctaaagtcggcagcgattatcttcccaaggataaaatgggatttgctgtcgatggaagttggatgccgtccacttggacgatcggaggctcctacgaatggccagactataccgatgttattggggcggcactcttcccgactcagaagggcgaaaagcctggatatgtgtctatgtctggtggctggacgatggctgttggtgccaagactaagaatgctcaattggcttttgattttgttaaggaagctactaataaggacaactctctgacctatgcgaaagatatggtgcttactgctgttcgcaccgatgtcgctgaagatcctagctaccttgaggcaagcccttatcaggagatcaccactgaagccgtgaattacacgcacttccgtcctagcgttactgaatacaccaaaatttcctctgaggttcagaaagccactgagaatgtcatcactgggcagatgagtgttgatgaggccgcaaaggcatatgacgatgcggttatcaacattgtcggcaaagacaatgtcgtaactaagtgatgatgcggtaggcgtgcgacgcggcggcagattgagccgatgattctgatgccgccgcggtccatgtttacggtgcttttataggcaaaggaacgaaaatgaaattcgccaaacggtattggacagtattgccctcaatgattctgttgtgtgttttcatggtagggccaatattatgggctttttatgggtcgctgaccaatacgtcacttacgggggttaatgcagtcaatgcgcaattcgtcggtatgaagaattacacgcatatgttcactgatagagacttcccgaattctgtatggctgaccattatttttgtgcttgtcagtgctattatcgctcagaatttattgggtatggcggttgccgttcttatgtcgcgcgccaacaaagttgtgagccaatttgtcagtattagtgtcatagcggcttgggtcctgccagagatggtggccggttttgcgtgctatgccttcttttctcgtgaaggtactcttaaccaaattcttggtgtgattggacttgggcagcgcgattggttgtatgccttcccaatgtttgcggttattcttgcgaatatttggcgagggacggcgttctcaatgatgaattatcaagcagccattggcgaagttgataagtctttgattgaggcatctgtggtggatggagctaatgcgaggcagacatttattcatgtgacggttcccgttattaagcaaaccattatgaccaacttgatgctgatcacccttcagactatgtctgcattcactttaatcttcgtgatgactgccggtggcccgggcgtgaagagcagtacgttgcccatttacgcgtataaagctgcttttaagttcggcgatatcggatatggcagtgccattgccgttgtcatgctggttattggcgcaatcttcggtgtgatttatatccgcgctctgaaggatgagaagggagtcaccaatgagtaatgcaatcgctatatcgaagacctccgaacataggccacggctgcaaacgcccaattcaccaaggcgtggtgtctctgcatttttcgcctactttgctatgggcattgtatttgttttattcttattgccattactgtggctattgtttgcggcatttgatactagtgcaacatttgagacgaaactgccaactcactggactggggcgaatttctcggccattatgacgaaggatctgactttccttcctctgtggaatagttttgttttatcggcttccactacaatcatcgtgttgttctgtgcggtattgactgcatatccgatatctcgttatcagtctaggttcaataagccattcctgtattcagtactgtttggcacttgccttccgatttcatgccttatggtgccggtgtatgcactgtttgtttctatgaacatgttggattccactatcggtacgatactattcatgtcggcgtcatctttgcctatggctatctggatgactaagaactttatggactctgtccccattgagctcgaggaagccgcatgggtggatggtgccagcttgcttaaatcgattagtagtgtcgttgtgccgctcatgcgaccaggactcgcagtagtcagtatttatgtgtttactggagcttggggcaatttcttcgttccctatatgttgctgatgtcttcgagtaagcaacctgccgcagtcaccatttactcgttctttggattgtatggcactgtcgcttatggccaattagctgcattttcccttatctactccatccctgttgtcgttatgtacatcatctctaacagattcttgggaacatactctctggctggtggtgttaagggataaggcattccaggatttcgcattatttgtatagcgactatattctcgaaaggaaaatcatggcaaagatgacatatgatgaaaaagtgacgatgcgcatagagcgcgcaattagtcagcaccttgctgatgctatgtacttgcatagtgttcccgtatccataacctgctggaaagttgggggtgagccggtgccgttcgcaattgccagaacggctgagtaccggaactttaatgtgggcgagtcttggggtgcggcttgggacacttggtggttccacgttacaggtaatgtacctgagtcttgggcggggattgaaggtactaggcccgaactagttgtagatcttggccgtattggtttgggcccaggtttccaagcggaagctttagtacgtacctcggacggacaagtagtcaaggctttggaaccgtataatgcatgggttccgctcccggagcctggtgaaaattttgacttctatattgaagcggccgccaacccgcaaattactccaggtttcccgtatttgccaactgatttgggcgatgaaggtgtcaaagatggtccggaactttaccggatgcaacgtcttgatgcgtcattattggaccttggggtgtggcatctcacccaagaactacgaattctgtctgggttggctaaagaggtggatccaaaacgcactaggcatgcggatattatgcatgctcttgagcaagctgcagatcttattgatccgaacgacgtacatggaagtgcgcctaaggttcggcatgctcttgttaaggtgctttctgccacagctccagaaaaagggcacactgcatttgccgtgggacacgcacatattgacactgcttggttatggccgttgcgtgaaacaaaaaggaaggtggctcgtacattcagcaacgttgtggaattgtccgatgaagataaggatttggtgttcgccgcatcttccgcgcagcagtacaagtggctcaaggagaattatcccgaggtatttgtcgaggtgaagaggaaggttgccgagggcaagttcattcccgtaggtggtatgtgggttgaatgcgatgccaatatgccatctggcgaatcgctgacccgccagtttttgcaaggtgttcgattcttcgaggagaaccttggtggatgttcaccagtagtatggctacctgacagctttggctactcgggtgcgttcccgcagattgcgcgtcttgcaggtttcaagtacttccttacgcaaaagatttcttggaatgacaccaatacattcccacatcatacattcttatggcaaggcatcgatgggactgaaattttcacgcatttccctccatcggatacctacaattccaacatgtctgctgcggatgtggcgaaaacggagattcaatattctgaaaaagggaaaggatcgtcgagcctgatgctgtttgggtggggagacggtggtggcggtcctacccgtgagatgcttgaggcggcgcgtctgcaaaagaatctagagggatctccgaaggtgcgaattgctacgccgatggaattcttcgagcaggcagagcgcgaattaagagatccggcccgttggcatggagagctatatcttgaattgcatcgaggaactctcacatctcagtctcataccaagtacggtaatcgtcgttgcgaatctttgctgcgcgaggcagagctatgggcgaccgccgcaactgtgctgaagaggaaggcgtacccatatgaagagatatcggaaatatggcagaaagttcttctttaccaattccatgatattcttcctggatcggcaattgcttgggtatatagcgaagttgaacgcaactaccgtgagctggagcatcgactcgaatcggttatcagtgagtccattcatgcaattagcggtgacggtgacaaattgatgtttgctaatgctgcccctcttatacaatgtggtgtgcctgcaggcggcatcgatgttgccgttgaacctatcgcgtcaaaggtttgcatgttggatgatggcagtattcgcatggcgaatgaacgtgtctcgttcgttcttgatggcaagggccatataatctctgcggtcgatctcaaaactggacgagagacgattgatccgatgcaacctggcaatgagttgcaattgttcgtggactctccggccgagtgggacgcctgggacattgagaagaattacgagcgttgtcttcttgacgagaccgtggtgtccaaggttgatcttggagcagatggaacgatggtggtcaatggtgtcattggttcttccccatacagccagaccattgctctcgatgatgatgtggatgctttgactattcgtacccatattgaatggaaggagagcgataggctccttaagcaggcgttccctgttaaggtatatgcgactgaagccaagtctgagattcagtatggtcatattacgcgacctattcatcgcaacactacttgggacgaggcaaggttcgagaccttggctcatcggtgggtgtatgttggcgaaggaggattcggtgttggcatcgctaatatgactaattacggcaacgatatccgacaaatcattatgagtgatggacgtcccggaactagaatccgcctatcgttgttgcgtgcgccgcacttcccggcccctcgagctgatgtgggaagtcatgattttgcagtgtctttcaccataggaagcagcgttgatcgtgcgatttcccaagggtaccgtcttaatgtccctgcgcgcgcagtccatggagagcatgcgctagcgccatttgtgtcggtggaaggagatggcgtgcttgtcgaagcagtaaagatggctgaggaccgctccggtgatgtaattgtccgactgtatgaggcgtatggttctcaaagcagggttgtgctgcataccggatttggttggaagagcgtgacggagactggattgttggagcgtgcatgcgacgcagttcgtcccgcagtagtggatgaaagcagggttcaatccaatgtagaactggagctacatccgttccaaattgtaactcttcggtttgccctaaattgatttctgctttacctgagattagtgatgcgccgttctatctgtgatgggcggcgcatctttggtgcgaggttggggatgcggacgaaaagttggacgcgtgagtgtccggattggagtccgctgtgttcggcgaggcgcaaaggcggaaagccgtcgacgtgtgcttccggggatgcgtgacgctgaagaaggtgatcgccgagctggggtacccgtccgaggggtgcctgacgaactggatggcccgggatccgcggcatggtcgccgttccccccccccgtatacgcttgacgtcagggccagggccgccggacgcgtcatcgccggggagcgttgcgtcgacgtcgccaaggacgttggccgctcggcgacgagcgtgcggaagcgggccggtgcgtacggacgggaaggaatcggcggactcatgaacatgggcgacggcatacgggttccggcggtggacgacggtgtctttagtcaagtcggcgtttctttttttagtcaggttttttttcgggtttgggcgcggggcgtgccggccggtggttggttattggttttgtggtttgccgaacatgagggcctggctgatgcggtggctctgtccggtgaattctatgagccgtccgtggtggacgatgcggtcgatgatcgcggcggcgagtttgtcgtcggcgaagaccgtgccccatttgccgaactcgatgttcgtggtgaagatgatgctcctcctttcgtacgagttggtgatgatccggtagagcagcctggccccgtcgacgtcgaagggcacgtagccgaactcgtcgaggatgagcaggtcggctttgtcgatgtcgcggagcatggcgtcgaggctgccgtcgcgtttggccttgccgagctggagcacgagctcggcggtgggcaggaacctgacgctcatgtcccgttcgatggccttcatgcccagagcggtggccagatgggtcttgccgcgcccggtcctgccgtggaacacgaggtcctgggccttggggacgaagtccaatgagaggagttcctcgcgcgtgtacccgtcgggcagtttcacgttcgcgaagtcgtagccctccaggcttttgggcacggggaaccgggcgcgcctcaggagcctggcgcgtttggcgtcctcgcggttggcgagttccgtggcgagcaggcggtcggcggcgtcgatctgccggggcgttgcccaggagaggaagtcgtccatggtggtgttggatatgaacaggccgcgcgcgtgggcgcgcaggacggcgggatcggttcttctggcttgtttcgcgtcgtccgtcatcacgactccttcccggtgtcggcgaacgcccggtcgtattcgctcaggtcgaccggctcgtcgtacgagacgccggcgccgccgtcggcgatcctggccgcggcgagctggacgctggccctgtcgacgccgccggtggcctcgagcacctggagcatcgccccgacggcgttggcccacccgttgtccctgtcggttttcttgagggtctgcaggccctcgcgccgcaccgtttcctcctgcaggtccagccatccgcgaagcgggtcgggcagcgcttcgcgcacgcggctgttgggccacgcgttgggcctgttgcaaagcagctccaattggcgcgacgggtcggagctgtcagtcggcatatcgccgtaggcgcgcggatgcgaggcaaggcgccggcccgatgaatcgaggatctcgatctccagggcgcgtatgccgatgatgacctcgcggcccgcgctgccggggtcggcggaatagcggtggcacccctcgagcgtgacgcaaccgtatttgtcggccttcatccgctcccagcgcaccacgtcgaacggcttcgccggcaggggcagaagcgccccgcgatcccgctcgaacaggtcggcctcgcgttcgcccttcctccaatgcgccttgtcgccaagccccaggcacctgtcgggcagcttctcgttgaatccctccaggttccatacgctgggcctgggaacgaacagcttgcgcctcaccctgccgacgttcgcctcgaccgcgcccttctcatggccggaatgcgggttgcagaacgcgaaggagaatccgtagtgcgcctggaacaggcgggccggacgcaccttctcgaaccgttgcttgcggcccacgccggcagcgttgtcgaacacgatgcgctccggcaccccgccgagccattcgaacaggttctccaacgcctggcacgtgcactccgcattctccccgggcatcagctgcgagggcgcgacgttcgaatgcgggaaatccagcacgaagtggtgcatgcgcgccagcgcgccccgccattgaacgtcgacctcgccgaaatcggcctgcgcctcgcccggatgccacacgaggtccatgaaccccgaggagcgttcctccgcgccatgctcgtcgcgcagcctggccaccgtcctggtcaccgtcgacagggagacctccgcgccatgctcgtcgcgcagacgctcccatatccgagtggccgtgtgacgctgcttgcgccacgacccccggtcctcggcgagccactgctcgatcaggggaactcactcgtcgatcaccgacggacggcgcctcctcaccggcggccttggcgacaggtcctccattttcaggtacttgcggaccgtgggctcgctcaccccgaccttcctggcgatcgaggcgatggaatccccgttccttcgcaactgacgaatagactgaacttcgggcatgctgatcatttgcctttccagccctccttgatacatgactaagcaccatcaagataaggcacgcgggtggtcggcatgctccacgcctaaacccgaaaaaacttcgtgactaaaacctcaaaatcctattgaatcaatacacgacgggcgcgacgatccgatggggctggaacggcagatcgccgcgctgcctctggagaacgcggtgacgggggcggtcgcggttgtaaaagccggcggcccgagcctcgacccgtgcgggccggcgaaccgggagaagacgcgggtcgtggaacggatcgggggcgggttcggcctcgaggccgtgctcgatgccgtgacgctcggtcgcggcacctgctactaccagtgcgcggccatgcgggccggggacgagcacgccgttctgcgcgaacggatacgcggtctgttcgagcaaggcggccgcgtgcggggccatgcgtaccatccaccggctgctgcgcatggatgacgccgagccgttggccgtttcggagaaggtcgtgcgccgtatcatgggcgaggaggggcttcgtcccgtgcacctgcggaaacccaaggcggtggagctcctacgggggcgagccgtccgaggcgccggccagcgctcgtggagcgcggcttccacgccgagcggccgaacacgccgtggctcacggacgtcgcccggttcaccatggacggctgcaagtgccggccgtcaccggtggtcgactgcttcgacggcatggtcgtggcctggcggctgtcgcgaagccccgacgcggccatgagcgagggcatgccgctcgacgcggccgccgcgcttcgcgacggggagcgtcccacggtccgttccggccgcgggtgccgctgccggtggcccgggtggatccgcatctgcgaggagcacggtctgacccggtccatgggcgccaagggctgcagtccggacaacgcggccgccgagggattcttcggacgattgaagaacgagttcttccgctgccgcgactggaggggcgtggggtaccgggaattccgcgaacggctcgccgcctacctggcccgctacgatgagacgcgcatcaagagatcactgggctggcaaagccccgtgcaataccgcaaaagccttggactggtcgcatgaccatccaagaaaacgtccgcatccccaacaaaccaagatttcgcgctcaaacattacgacaaacgtcgggtgctgtgactattggtaatgtggccgtataatcaatgaactgcagtgttgcaagaatttttacaaggaaggtggtcctcctcatgcatagtgtgcgtccgtcgttccgtaaaggaacaaatatgccggctgtcgcaggctacaacagccgtgttgtgcttgagacagtgcgcaagcatgaagggctgagccgtagtgatattgcaaaacacactggtctaactgcgcagactgtttcgaatattgttcgacgattattggaagagcagcttatatcggagaccggtactgcagccgggcagcggggaaagcctcgtactttactttgtctgaatgaaaatggtcgctatgccataggaattcatattgatccgattatcacgactatcgtattggtcaatcttgcgggtgaggtcattgctcgttcgtatcctgttgtatctgcaaatgctactgatgcgctatgtgatcttgcgcattcttgcgaacagttaattgacctcagcaaggtggatcgcgatcttatcgtcggtataggcattgctatgcccggaccgttggatttgcggactaatatggtacttgatcctccgaatttaaatggctggcataaggttcctgtcactaatgaactggcaaaacttactggtatgccagtaatgctagaaaaggatgttactgctgcatgtcatggagaatcatgggtcggaggaggtgccgccgatcgtagttttttattcttttatctgggatttggcatagcgttcggtgtgtctgggcaaggaaatgtataccgcggatataccggtaatgagggtgaaattgggcacattgtcgtggacacaggtgggcgggagtgttggtgcggacaacgcggatgcgtgtcaaattcctgcgatccaacggccatcgtgctagatgccatgcagcgtggcgtctatgatgacgcagatggcttcgacctgaccgacatgttcgttattaatgaccgttttaacgatatttgcttaaaagctcagtgtggggattccgtgtgcagagatgtgctccgtgagactagtcgaaaaattggtcgtgcggctgttattctctctgatttattcgatatagaccatatagtcctcggcgggccgaattggaaacaactcgaagagccgttgctcgccgaaattccgcctatgttagagactaagacagtgatgcggcgggtccatgagtttaaggtatctcccactgctgtaggtgatgatgttgcagcgcttggagctgcagtttctgtacttgatcggcagcttagcccgaaggcggctccgttgcgattcgcttaaaagttgcaggagatggtcagtggtgtggggtcgcaaagatgaagcatcagagtgctttcgcctccggtatctgggcaataattagtctctccctccgtcacgcttcgcgtgccgcctccctcatcagagggaggtaattcgcacgaagttcaatttggtgttggtaaattgaacttcttggctgaatatttacagtatcatcgcatgtattcttgagctgagcgttttcgtgacatatttcggtgatacagtccgaacttgttttgaacgagtatcgcgtccggtgcgtaacaatcgggcggcggagaagagaaatgaaatcagtatggccgatacgaatgtgaatggtggtacacggcaggctacgggcaaactcaagtctgtcgaaagcctggaccggaccaacgagatggagcgcggcctgaacaaccgccacgtgcagttcatcgccatcggcggcaccatcggcaccggattgttcctggggtccggcaagtcgctggcgctgaccggtccctcgatcgtcttcgtgtatatcctggtcggcgtcatcatgttcttcctgatgcgcgccatcggcgagatgatgtaccgcgaccccagccagcacaccttcatcaatttcatcacccgctacctgggcaacggatgggggcatttcgccggctggacgtattgggccgcgctcgtgctgttgggcatgaccgagatcacggccgtctccacgtacttcatcaccttcttcgacacgttcggcatcgacctgacccattggaaatggctgatcgaactgtgtttcctggtgtcgctggtgtccgtcaacctgatcgccgtcaaggtgttcggcgaggtggaattctggttctcgatgatcaagatcacgctgatcggcgcgatgatcgtcaccgccgtggtcatgatcgtgatcggctaccattacccggccgcgcggattcatggcgtggatcatgtgagcccggcgggccacgccggactcgacaacctgttctccggcttctcgttcgccccgaacggctggatggccttcctcatgagcttccagatggtgttcttcgcctatgagctgctcgagttcgtgggcgtcaccgtctccgagaccaagaatcctcgtgaggtgctgcccaaagccgtcaacgagatcatcgtgcgcgtgctcatcttctacgtgggcgcgctcgtggccatcatgtgcatcgtgccgtggacctcgttcaagccgaacgaggacggctccttcgcctccccgttcatcatggtgttccagtatgccggtttgaactgggcgtccgccctggtgttcttcgtggtgatcaccgccgcgtcctcgtcgctcaattcgctgttgtattccgccggccgccacctgtatcagctgtccgaggtgtcgccgaacccgatgctgaacaagctcggcaaggtgtccgaccgcaaggtgccggcccgcgccatcctggtgtccgcggcgctgatcctgctgtcgccgatcgtcaacgccatccccggcatctcgggggcgttcgtgctgttctcgtccgccagctccgcggtgttcctgttcatctacatcctgacgctgctggcgcatcgcaggtatcgccgttccgccgatttcatcgcggacgggttcgtcatgcccgcgtggaaggtgctcaatacggtggcgatcgtgttcttcgtgttcatctacctgacgttgttccttgcggacgatacgcgcaattccgcgattgccggcctggtgtggcttgtgggcttcggtgggttctctatgctgcgcgaacgctaccgtagccgcgatttgaaggccgcactggaacacaaggagtgattggacgggctgattggctggcggctattagttgggtggctgttggctgttggcggctgactggttagcggccgatagccaatgactgggctgatcgtcagccaatcggctgcctataggtctcattgatacattcggtcatccgattagtgcatttgcgcggacaattagtgcattcgatcatcggattagtgcatcagtgtgcaattattagtgcaattagccgcctaattagtgcattaggacataaaacaatgtcctaatgtactaattagatgctaaaatacgataagtgccatgtcctaatgtatgaattatcgctatgaagggcggaatgcgatgacgcaggatgaacttatgcaagtgctgcaggccggtgaatcatctatggtcgagttcaagcgctgcagcgaattgcctcatacggatacttttgagactgtatgctcattcgccaatcgttctggtggcagcatttatcttggcgttgacgatgacggtcaagtgctcggcgtcgattctaagcgcgttagtgagatagagcgcaacgttgtcaacgtagtgtctaatcgtaagatgttcgagccggctccaatggtggaaacggaacatatcgagtacgacgaacggattattgttcgtatttgggtagctccgagttcttcggttgtgcggttcaagggcgcagtgtttgatcgcattgctgatgtggatacacacatcgaaagcgatatccagattagtcaaatgtatattcgcaagcagaactactattccgaacggcgaattttccgttacgtgactccgtttgatttgcgtcctgagctgattgcgcgaatgcggcagctggcggtcgctcagcgagctgggcacccttggggaactatgtctgacgaagaactgttccgcagcgccaagctatacgatcgtgattacacgaccggcgaagagggctttaatcttgctgcagtgctgctcttgggcaaggatgaagtcatttcctcggtttgcccagcgtatattactgatgccgtggttcggcgagacaatattgaccgatacgatgaccgacttatggtgcggaccaacttgttcgattcgtacgagcaactccgtgaatttactgagcggaatctgcctgaccgctttgtgttaaagggcgataagcgagtgagcccgcgtacgatgatcgcccgtgaattggtggcaaacagcctcatgcatcgggagtattccagtccggtggtggcgcgtgtcaccattgataatgaatccatccggacggttaatgcttcgcgctcattctttgaaggtcgaatgaagctgggcgagttcacgccaatgccaaagaatccgattatcgctaatgtgtttgtgcagaccggcatagccgagcagctgggtagcggactgcggaatctgataagagcgtcccggcaatatactgagcgagagcctgagttccgcgatggtgacatattcgaggcgacgattcctattgttcctgcgctgaagaccgtggatggttctggttttgctagcgtgagatctgtagttgagaaagatgccgaagagggtgcgaggctcattggcggggaacgtgtggatggtaagaaagcagatgcaaccgcatcgggtgaaattgattcgcgggcagcgatgctgtcggcgatgaatcgacgcttgacagaggttgactatgtgactgtacctgaactcgccaagataacagagctcgataacagaacagtccgcaaattcctaaacggtttagttgcgcaaggaaagctgattgctgaaggcaacacgcgtggtcggcgttatcggaagggatagcgggcgcgatatctcgatgcagtgggattcacttaagggctacggcaaatatgattcgtagcgattgggccagcgcaattcgaatggctcatgactttgtgcgtcgtttgtggtgataacgcccgattttttgcgcactttcggattccgggtctgacgtaagagggcatggcccgcgtcctgtgtacgattttcattcgccaaaacaaaaaaccgcgattggaagccaggagacggaaccaagacccttgaacatcatacagatcgaccagaacctgctcgagaccaggctcgaccgcttggtcgccgaaaaggtcgccgagctattgaacgcgatgctcgacgccgaggccgacgagatcgccaacgccgccaagtacgagcgcaccgg

SEQ ID NO: 13 - DNA, 28650 bp, Unknown
  R30_18m  MAG No. k141_2884
cactgagttccatgttggtgccaaggactgccgctggatgactcttgatgagatgcttgccgaccccggcatcaacaaaatcaatcatgatgtcgttgcgatggtgcgggataacttgtaattgttgccacttcgggcatatgacgattgagccaaagcatgttctatgtttcgataatcatcaaaagcagagcatagtatgctctacggggatttttctataccctgaaaacaccgaaaatcaggatatagggcagtagcacgaattagccaacagcggtataccaaggaataaggccttttccgcccgcgatgtaacgtagatccgtaccttacgaacctcatatataggatcgcgaccaaagcgtcgctcgcaacaccgcccgcgccatcatcgccagccatcaccagcatcacacaccgctcggtgagtcgtatgtttgcgttcacaaaaattacatgtagtgtgtctccgcgtatgcgtagcggtgtgtgatggtgtgtgatactgcacgcacacggagcagtggcatactgacggtcgttggtaactccgtaccccacgtagcggtggcaaatccgcctccgttcccggatggtgggaacgacacgccccgtcgagaagaaaaggtgcgttatcgcgggggggggcgggggtgccgctttccgaaaattccaaggtctttaccaatatcggataagaatcttcccctatccggggggacgcattcgcacttttttattaatagcataacgccttgtacatgtaacgccaggttctggcgtacgcgattgtaagagagacggacaaggccatgaagagaattgcagaatggttcgcagcggtaggagccgcagcgggcaggagaggcaagcggttagtggccgtcgttgccgccgtggcgatgctcggcggcgtcgccggcgtggctggggtaagcgccaccgccatggcggacgatgggaatgcctccacaacacaatcgcagaccaccgatgagaaggcggccgccagcgtgcctgttcctctttccgctgagggaacaaacggtgtgccagatgatccgacgttgtctgctccggcccgcgagaagaccgttaccgccaatggagacggcacatacaaggtggcattgaacgtcaccggtgcgaagagcgcgggtacgggcgagattgtgacgaaccagccgctcgacatcgtgctggtgctggatgtgtccggctcgatggccgaaaagattgcttggaaccagcctacgaagattgactcgctcaagaccgcggtcaataacttcatcaaggcgacggccgacgagaacgcgaagattaccgaccagagccagcagaaccgcatcgcgttggtgaagtttgccggtactgcttccgataatgtgggtaacgacacttattgggatcatcgttggggacagcgctataacaactcccagattgtgacaaatctgacgtcgaatcttaatggtctgacaagtacagtcgactcgctgaacgctgcgggagccacgcaggctgactacggttttcagaaagctcgagtcgcactgcagaacgcgcgcaccgatgcgaaaaaggttattatcttcttcacggacggacaaccgacgagtagtaatgagttcgagaagtcggttgcaaatgaagcggtgagaaacgcgaaggcgcttaaggatgcgggagcaaccgtctactccatcggagtgttcggcgacgcgaacccgaacaacacgtcaaccaactggaacaatcgctttaacgcctatatgcacgctgtctccagtaactatccgaatgccacggcgtggaacaggcttggcaatcgcgccgacaacagcagctactacaaggccgccaccgatgccgaccagctgaacaacatcttcgagtccatccgccaggagatcaccaagacggcagagtacgccgacgtgacgattcacgacaagctgtccagctgggtcgtgagctccgacggcgcctccgcgaatggaaagcccgcgggcttcacgtacacgaagacccagcacggccagaccacggcgtgggctggcgccccggaggcgacggttgcggctgatggcaccgtgtcttggccggtcacgtccaacggcggcaagcttgaggacggcgtcacctacacggtgagcttcaatgtcaagccgacgcaggctgcgttcgacaacgctgcctcggcaacccctgagaaggacgccgcgagtgatgaggcgaacacggacgatccaaacaagggtaacgcgaacagctacttcacgaacaacaaccccggggctactgtcggctacaggaccgtggtgacctcctcgcagggcggcacgacgacgagcaatccgcagaccgccctctacccgcagaagccgaccatcacccttccggtctccaagatcacggtgacgaagacttggtccgacggcagcgagaatcacgcggatgattccgtgcaggtccagctcaagcaggacggcagggattatgccaatggttcagcaacgctgaatgccgccggcaactggactcacgagtttacggtgtctgccggccctgaggggcacgcatactcggtttccgaggtcaaggttgaaggctatgactccaaggtcgataagactgacctcaagctacaaggtctgaccgcacaatccggtgccttcacggtaaccaacacaccttcttacgtggccttgcccgcttcggatgtcaaggtgacgaaggttgtgcagggacatgctgctaattcggacttcagcttcaacctgaagtgcgtggatagcacggatgcgaatgctggtaagtgtgctgacgttaccggcttggtcaacaatggactgactacgactgtgtccaagggcgaattgactgctagcggcgcgagcgcgacggttggcttcggcaatggggacctgaagttcagggttccgaccggtaacgccacgcagctcgtctacaagttcaatgtgacggaggaccgtaccaatgtcccagctggctggcgttacgacggcagcacgaagacggtgacggtgaccattgccaagaacgatgacggccagtgggcggcgactgtgaacgacaacaacccgacgttcatgaacaagtacatcgctgtgtcttccctgccgttgaccggtggtcgttcggcccgtgactggctggtgtatggcggtggcctgggtctgatggccttgttggctgctgcgggttacacggtgtggcgcaagcgtcaactcgtctagcccgttcctggctcccctccctgaggggagctggccggcggagccggactgggggcgcaggagacttccctcagaccgaaaagagcaattaaagatttgcggattgcgaagccccttgtgaaaagggttcttagcctccgtgattgcagaaaacaagtagtaaacaagttaaggaagagagggtttctcatgaagttgaggaagcttttcgcgggcgtcgctgctgcggcgaccctgttgggtggcatggcgttcggtgccgccaccgccaacgcggcggatactgaccaggccacgattacggtgaacaacgcccaggcgggttacacgtacacgggttacaagttcgccacgttcgataacgtccagggcacggccccgaatgccacgtccgtcgaagtgaacaccgtcgccgcgtggaaggacgccgtgtaccaggcggccgacgcggccaacggcggccagcagaacgatgttcccgccgagtacgccgagaacccggccgcgtacgtggccacgttcgatgccgccaccgcccgtaggttcaccgacgagctgacgaagcgcatccccgcgggcgagcagggcactgccgccgtgaacggcgtgatcaccgccaccgagggctggttcctcgtgaccagcacggcaaagacggccggcaagtccgctttggttgccacccagatcaccaacggtggcaagacctacacgaagatcacgctgaacaccgaggacggccagcacaacatcgacacgctgggccagttcaacgccaaggacgagaacgtcccgacgccgccgaccaagacggctgacggcaagggcaccgtgagcgtgggcgacaccgtgaactacacgatcaccgccgtcgtcccgcccgcagcagccggctacgacacctacaagtacaccatcaccgatgccgcatccaagggcctcaacgtggccgaggacaacgccaacttcacggtcgtcgtcaagaaaggcaacgccgacggcaccgacaagaccctggccaaggacaccgactacacgctgacccagaacggttccgcctccgacgagaacggcaccgtgacgaccatcgcgttcccgaacgtgaaggactacgccggcaagaccatccaggtgacctaccagggcgtcgtgacctctgacgccgtcgaccaggtgaccaacacggccaccgtgaagaacaataacgaccagaccggcgaaggcacgactgtcgtcaagaagctcggcaagttcgacttcaccaagatcggtgtcggcaacgacgccacgggcctggccggtgccgagttcaaggtttccgccgataacggcaagaccttcatcaagttctcccaggacgccaacggcgtctactacccggacgccaccaacggtagcgagaccctgacctcagccgacggcaagggagcacagaagacccttggcaaggtcgctgtccgcggcctcgccgaaggcgtctacaccgttcaggagaccaaggccccgaccggttacgccgagaacttcaaggtcaccttcaccgtgaccatcggcgagaacggcggcgagggcactctgaccgttgacaatctccatcaggtcaacacgaccgacaagacggtcttgaacgtcaagtccatcacccagctgccgctcaccggtgccgccggtaccatgctgttcaccgtggtcgccgtgctcctcgccggtgttgccgcgaccgtgttcgccaagtcccgctccaccaagcgcgccctcaacgcgtgaatcgagagcaatgaacgcgtggtctaattcatcagtgaattgaccccaattggaagcgagtgaagtgccaacttcgctcgcctccttttttcttagactttcaaattcgacataaccagaatcaaaggtgcagcatggcaatggatcctattacttcttcattgttgagcgatttcatcgctagcagtggtttggaacatgaaacggatataacccgccagtttgaatacttcgcgaactattgtgtggttaccaacagcagcccttcaagcgacttcgaatatacggatatcgcaacgggtgacaatgctccgggaatcgatggcatggccatcatggtgaacaatcagctggtctccagcactgaggatatagatagtctcatcaacgccaacgggcatatcactgtgcggtttattgccatctcggtcaaaacgactgccggattcaataccgggttcatcagcaatctattcagcaacgtgcagttgttctttggggacaaccccggagcgacgttcaatacgccggagatggagaatttcctcgaacttaaggactacatatacagcaccgcaatcgtcaagagatttacccgtaatcccgatctcctcgtatcactggtgacattggggtcatgggatgacagcaatgaacagttcagagcgctggtcggccagtactgtcaatctttgcaaagtacgatgctgttcaaccgtgttgactttcgtccgtatggagccgctcagattcagatgctatatcgcaaggccgtggcaaaaatcgagaatgccgtgactttcgacagggccttgatcatgtatgacgataacgacaagggcgaagaatccggatatataggtgtgctgccgttcggagagtatcgcaaattgttgttgaatgatgacggcaatgtgcttcccgtctttgaagacaatgtccgtgggtatctcggcgacgataacgaagtgaacagcgctatcgctaaatccatcactgaaggtgatgcgaatgcattttgccagaaaaacaacggtgtgaccatcgtggcttcctccgttaagagaaccggcaaccagttcgttatcagcgattaccagattgtcaatggttgccaaaccagcaataccttgattgtcaaccgagacaaaccaaatatcgataaactacttatccctattcgcctcattgtgacgaaggatgagtcgttgaaaatcgaaattactagagccaccaacagccagaacgccgtcaagcgtgagcagttggaatctctgtccggtttccagaggaaacttgagcagcattacggcggcatgagcaacagcttcgggaaagatgcgctggtatatcagaggcgtgaagggcaatatcggggtacggaatatcagaattcacccttgctggttactatcgcacaacaaatcaaggcatatgccgcaatgtatgtatcaaaaccacatgaggtgtccggacgatacggtgtggttctgcgcaagatgggtaaatccatcttccaagatactgattcactcgctccctactatttaagtgtgttggcgctgaagaaattcgaagcattacttgggaatggtatcgatcgccgataccgtaagtgccggtatcatgtgctgatgctgatgcgtacggtaatcgacatgcagttctccgacataaagccgaagaagcgtcgggagggaagcgacgcgatgattacggccatcctgcaggatcccacggcctctcttcgttgcttccgccatattgtcgactacatcgcgagccaagcggaagatatcgagtttgataatcgaaaatgcttcgaacgcaaagagacaacggagaaactgttgaagtctgagcgtttggccaaactcgaaaaggcgattcgcgaggattcggctatcgctggttgtgcagctcgataacggcatggcattcggctgattccccgttatagatgatgacttctgttgacggcttgcaataaggccactatgccaatggcaatctgatgtctgatggttgggtgacataccgtttgatgtgtagggcaagatgacctggcgcagatttttttcggcggcctcgctcggcaacgagcgaggccagtttattgttctcgactacccaatttctgtgtcatggtacgtaaaacttgtgttattgacgcaaaaacttgttccatccgaaatttcggagccaccgtcatctaccggccaccggttcacgtaagaaaagcggcatatgttgcacctccccgcaagggtgataatagggggagtgccggcaatgaggcaaggagcagtttatcggggatgaaacctaccctactaggggttagaaaagcccgtataacaagtactatcatcccaagctatgacatgcccccatattcaagggggtgcgaacgaaccttccagagagtgcaggagatgaaaatgactgtcggtggagggagctttagccccgaagagatcaagtacctgaagtcattgccggcggtggcggaagccacttcgaaacgcattacctacactgacgactttaaacggtatttcttgacccgttataacaaaggtgcctcgccggtgcgattgttccgtgaggccgggctcgatcccgccctgatcgggtacaagcgcatcgaacgttgtcttgcccgctggcgcgaggcacaggatgagatcctgggtgccgaagcgtcggaacccgcccagccttggggggggggtatctcatttgaggctttatcgatcgggaaccgctggaacgtcagatacttcgaacgagtggcgcgaggcggagagtgccgcgattacggcgaaagccggcagcgaatccgatttctacgtatcccccgaacgccgcgccatcatcttccccatctcccgcaaagagcagaacaacgatctgcgtgacctgctgatcgcacagcaagtacgtcgtatcgatgagctggagcggcaggtcgatatgcttgaggctttgctgcatagcgggcgacgggggagcagggcatcatctttcttgcttctgaaacgcgaatcgggcgagcggggcttgtctgcgggcaataatgacgttgctcccgcggattcggataaggagaatcgtagcgaggatcatggtgagggccatggcgagtaatcgatcgtattggagacttgcctaacacacacgctaagatgggcatcgcaataatcggcaatgagcaggtaatcggcgaggcggtgcatggagcaggaatccaacgagcaagaacctaacgaggcgacggaaatcgtaggcggcaaagtagagaccgtcgaggtttccaagcaccccgaggcttccatacccgagaccgatttgtctctggcggatatcgagcgccgtcgttcgcatccgttgcgttgggcgctgattattcttgccgtactgtgcgccatcatcgcgccgtactggttcggccgttcgttggcggtaaataatactgactccattgtggccgtgctcgggggagtgtctccgcaaggcatcgcactggtcggttgggtgaccgtggtgattgcgtacgtcggattggcgatggcggtggtcgtctcgccgtcctggccgtggctgatcgtgttcgtgatcgggttggccggcgagcagttcatcgcgggactcagtatgctcaatctcaatttctggtattccacgtacgtggtctacggcaagcaggccggcctggcgaatgccgcgaatctgggcattatgggtgcggcgatcggcatcgccgtatatgccctgatgttcgtgggtctgctggtgattatccggaagacctcaccactgaacgtactgaccaaaagctgggcaagtttcattctgtacttcgtgattgaaaccatcgccctgctcgtggtgttgtttggcggattgctcaccactgtgtgagtgcgtgtgccccagtccggcccctgccgtatagttttcgtttggcgtaatttcgcccgcggatagagagcgtttcgagcgaacctgcacgaaacaccgcgcaacgacacaataaggaggacgccgtggcactgacggctgacgagaagacccagattatcaacgagtacgcgacgcacgaaggtgacaccggttcccccgaggtccaggtggctctgctgtccaagcgtatcgccgacctgaccgagcacctcaaggagcacaagcacgaccaccactcccgtcgtggtatgcagctgatgatcggtgaccgtcgtcgcctgcttgactacctcaagcgcgtcgacatcgagcgttaccgttccctcatcgagcgtctgggtctgcgtcgataattgaagacttccgcccgagtacctaggatggtgctcgggcgttttacatatcgccagccaacggcaacaacggcaagagggttagaggataggccagcaggtaaggccgacaagagaacccgaatgaaggggttgacacgaggaacgacggccaaggggccagtcgaaacaaggtatgtgacgtccgctgaagaggacagttgcggttcaagcgagtcgccaaaccgcagcacagtatgtaggaataattagaaaattaaagaaggaggaaccctatggagggtcccgaaatcaaggccgttgaggccgtaatcgacaatggatcgtttggcaagcgcacgctgcgcttcgagaccggccgcctcgcccagcaggccgatggcgctgtggccgcctacctcgacgacgattccatgattctgtccaccaccaccgccggttccagcccgaaggagaactacgacttcttcccgctgaccgtcgatgttgaagagaagatgtacgccgccggcaagattccaggctcgttcttccgccgtgaaggccgtccgagctccgaggccatcctcgcctgccgcatcatcgaccgcccgctgcgcccgctgttcccgcacaccctgcgcaacgaagtgcaggtcgtcgagaccgtgctcgccgtgaaccctgatgacgcttacgatgtcatcgccctgaacgccgcttccgcctccaccatgatctccggcctgccgttcgaaggcccggtctccggtgtgcgtctggcgctgatcgacggccagtgggtcgccttcccgcgttggagtgagcgtgagcgcgccgtgttcgagatcgtggtcgctggccgcgtgatcgagaacggtgatgttgccatcgccatgatcgaggccggtgccggcaagaacgcctggcacctcatctatgacgagggtcagaccaagcccgatgaggaggtcgtggccggtggtcttgaagccgccaagccgttcatcaaggtgatctgcgaggctcaggatgagctcaagaagatcgccgccaaggagaccaaggaattccagctcttcccggagtacaccgacgaactgtacgcccgcatcgacgagatcgcccatcaggatctggacgaggcgctctccatcgccgagaagctgccgcgtcaggatcgcatccatgagatcaaggagcacgtgcgcgaggtgctcgcggacgagttcaccgacatggacgacgccgagaaggacaaggagctcggcaacgccttcaaggagctgcagcgccagatcgtgcgtcgccgcatcctgaccgaggactaccgcatcgacggccgtggcctgcgcgacatccgcaccctgtccgccgaggtggacattgtgcctcgcgtgcacggttccgccctgttccagcgtggcgagacccagattctgggcgtcaccaccctgaacatgctcaagatggagcagcagatcgacgcgctgtccggtccgcagtccaagcgctacatgcacaactacgagatgccgccgtactccactggtgagaccggccgcgtcggctccccgaagcgccgcgaaatcggccacggcgccctcgccgagaaggctctcgtgccggtgctgccgagccgtgaagagttcccctacgccatccgccaggtctccgaggccatcggttccaacggttccacttcgatgggttccgtgtgcgcctccacgctgagccttttggctgccggcgtgccgctgaaggccccggttgccggcatcgccatgggcctcgtgtccggcgacgttgatggcaagcacatcttcaagaccctcaccgatatcctgggtgccgaggatgccttcggcgacatggacttcaaggtggccggtacttccgagttcatcactgccctgcagctcgacaccaagctcgacggcatccccgccgacatcctggccgccgctttgcagcaggccaaggaagcccgcgccacgattctcgaggtcattaacgagtgcatcgacggcccggctgagatgagcgagttcgctccgcgcatcatcaccaccaccgtcccggtcgagaagatcggcgaggtcatcgggccgaagggcaagatgatcaaccagattcaggaagataccggcgctgaaatcgccatcgaggatgacggtaccgtcttcatctcctccgagggtggcgaggccgctaagaaggccaagtccatcatcgattccatcgccaacccgcacgtgcccgaggccggcgaaacctacaacggcaaggtcgtcaagaccacgtcgttcggcgctttcgtgaacctcacccccggcaccgacggcctgctgcacatctcccagatccgcaacctggccaacggcgagcgtattgacgccgtcgaagacgtgctcaaggaaggcgacaccgttgaggtgatcgttcagggtgtcgatgatcgcggcaagatctccctggccatccctggtttcgaggatcaggagaacaacgcccgaccgagccgtggcgatcgcgatgaccgccgtggcggccgtggccgtggtgaccgtgacgatcgccgtggcggccgtggccgtcgctccgatcgcgatgaccgtgacttcgacgatcgtgacgaccgtccgcgtcgccgtcgctccgatgacttcgaggatgattacgacgaccgtccgcgtcgccgtcgctccgatgaccgtgacttcgatcgcgatgatcgcgatgatgatcgtccgcgtcgccgtcgttctgccgaccgtgacttcgacgatcgcgatgaccgtgatgctcgcgactcccgagatgatgatcgtccgcgtcgccgtcgctcttccgatcgcgatgaccgtggcgatcgtgatgaccgccgtggcggtttccgtggcggccgtggccgtggctcggaccgcaacccgcgctacgccaccgacgacaactacgacgactaccgcgccgaccgcgaagagcgcactgagcgcccgcgtcgccgcgtccgtcgcgactttgatccgttcgaggactaaagccctctcacggatcggtcgcggcatagccgcccccccacctacgggaagcccgcagggcttcccgcttaacggttcggcattcgaggactgatcgttctctagcttctctcgggtgagaagagcttaatcgcaaaccaaaaggcttctataccgtttcattcggtatagaagccttttggtttttcggcttcttcgcgctacatatttcgatgttgaatagggcactcgtgctgctgccatgtacattcagttgtcagttgacaactattctcatgcatcaagaatggcggaaaacagccattaagatgattggagccacgctaaaaagcgttgacaactgacaacagtttgtacacggcaccgcatggcacctatcctgttgctcacgaccggatctattctctcgtctgttgttatgcccaacagcaaaatccgcttgccgtgccgcgccatgtccgagtcatggccagccgttgattgaatggcggatgatcatcgaaggtactcatgggcgttgatcactgtggcaacaacaaaggccgggcccttgtgagagcccggcctttatgccgtatggcggcggattaatccttaaaggctaatccgttgtcaatcagcgttacagaatcgccatgcacacgaagtccagaatgaacagcgcggacacgatccagagtatcggatggacctccttggccttgcccttgcaggtcttcacgatgcagtacatgatgaagccgccggcgatgccgtaggagatggagtaggagaaggccatgaacacggctgcgaagaacgccgggatggcttcggcgatgtcgtcccacttgacttccttcagggaagcggccatcatgcagccgacgatcaccagcacgccggcggttgcggcggacggcacggcggagacgaccggggccaggaacgcggacagggcgaagcagatcgccacaaccacggaggtcaggccggtgcggccgcctgcggcgatgccggcggaagactcgacgtaggtggtggtgttcgaggtgccgcagatagcgccaatggaggtggcgatggagtcggcgaacagggccttgtccatcttggaggagaagccgtggccgttctccagagccttctcatcctcggcggagaagatgccggtgcggcggccggtgccgatgaaagtgcccagggtgtcgaacgtatcggacatggagaaggcgaagatggtcacgatgaccagaggcagcttggagacgtcggagaacagcgccgggaagccctcagcggagaagatcgcgccgaaggtctgcggcagctgggagaaggtttcgctgatggactgcgagttggaccaggtggtaacgccgaacgggatgccgatcacggtggtgatggcgatggccagcagcatgccgcccttaaccttcatcacggtgaacacaatggccagtacgaggccgatcaggaagacccacagcaccttgtcgttgaagtcggccagactcggggtcgccgccacggcgcctcccttggccgcggctttcgggtcgccgggggtgaacttgatcagtccgacgttcagcatgcccacataggccacgaacaggccgatgccgccgccgatggcgtgttgcagggactccgggatggccatgatgatcatcttgcggatcttggtgacggtgatgaggatgttgatcaggccgcacaggaacaccatgcacatggtctgctgccagctgaagccgaggccgaagcacacggtgtaggtgaagaacgcgttgaggcccatgccggcggcctgggcgtacggcacattggcgaacaggcccatgaccagagtgccgatgatggccgcgatgatggtggccaggaacacgccgccccacggcatacccgtctgcgacaggatctgcgggttgacgacgatgatgtaggccatcgcgaagaacgtggtcaggccggccagaatctcagtcgagacggtcgtgccgttttccttcaaatggaagaacttctccatttactctctacttccttggttttatgcggggttgcgcaccgcgcgcataatgctgcggctggccccggcgagaattgcgactcgccctgatcggcctgcccaacgcgcgtcaggcgctgcgcatccaatcagaaccgtggccgattatagcttgtggaggtaacgtgaacggatccgggagtagactgactgccagaataattcggaacaactcagggacacgcagggcacacccgtggaaggaaggcgcgcgatgaaaccggccgtcgaagtcagcatcacctcttggaagaagaatgtcgtcaagcccggtcaggagtacggccgcgtactgctgatgcctggcaccggctacaactgcgaccgtccgctgctctactggtcggcccaggctctggtcgaggccggctggcgaatcgaccgcatgaacgtacgcaacgcttccgacgacctgtccacggtgattccggtcctcaatcaggcgattgacggctggatggccgccgcgcgcgagtccggcgcgggtaaagccggtgattccggggatggcgttgccgtcgatgattctgctaccgtgctggccgatggcgcagctggctcgccgaaccgtgattccgacaccccgtccggccctcgcctgttgctgatcggcaagtcgctgacgacgatgacctacccacatgtggcctcacactacggtctgccgttcgtgctgctgaccccggtgctgcatcacgccgacttcgatccatccgcccgggtgattccggtgccggctgtcggcgatgatatcgtcgccgaatccgaggctccgagcgtggccgaagcaagggcgatcatccgcgcagaactggccgaccagtcgcacgccgccagctcccgatactccggcccggcaccgctgatctgcgccggcaccgccgacccgttctacgatcgagcccgcgccaacgcgctcaccccgcacgtgcacgaatacccggatgccaaccattcgatcgaggtgcccggccactggcgtcgctcgctcgactatctgaaggaagtcaccgcgtccgtagcccagtacgccgccacgttgtaatgccttgcgacacgcccgaattctgcaatgtcgctgaccatccgtaatctaatcatccgtaaaccacagaccgttggttgaagtgtgcgcgagtgcatttccgaagtttggttcgccaagccagcgcaggttgagagatataagcccgtcaagggccggcgaaggtcgcttcgcgagattatattgctctgcctgtgcgcagggcttttttgttgcccggccgaaagttccgaactccaagtcaacggccgacttaggaaggaacgccatgaagaggcccgaaaaggaagcggtagtcgctcagcttacggaagaattccgtaacgctgacgccgtctacctgaccgagtaccgcgggcttaccgttccgcagatttccgatctgcgtgaaaagctaggccgcgatacttcctacaccgtggcaaagaacacgctggcacgcatcgccgccaaggaagcgggcatcgagggtctcgacgagattctctccggcccgaccgccatcaccttcgtgaagggcgacttcatcgaggctgcgaaggtcatccgtgacttcgccaaggacaacaaggctcttgtcatcaagggtgccgccgctgacggcactgtctacgatgccgagggcgccaagaagctggcagacctcaagtcccgcccgcagctgcttgccgaattcgccggcgacatcaaggcatcgatggccaaggccgcgtacctgttcaacgccctgcctaccaaggctgtgcgtacgatcgacgccctgcgcgaaaagcaggagaaggctgcctgatttacgccctcacggcatgaatcagtcgcttcgataatttaaacaataaggtttattaggcagcggatctaccacttcgtccgccgccaagattgaaaggaagccataatggctaagtacaccaacgatgagctgctggaagccttcggcgagatgaccctggtcgagctctccgagttcgtgaaggccttcgaggagaagttcgacgtcgaggctgccgctccggttgccgctgttgccgctgttgctggcgctgctgctccggctgaggaagagaaggatgagttcgacgtcatcctctccgccgtcggcgacaagaagatccaggtcatcaaggctgtccgcgccatcacctccctcggcctggccgaggccaaggctctcgtcgacggcgctccgaaggccgtcctcgagaaggccaagaaggaagatgccgagaaggccaaggctcagctggaagaggctggtgcctccgtcgagctcaagtgatttgtgcggcataagccgcaatcacagcttttcgaggaaccccgcacctgtgtttcaggctgcggggtttccgcatactgagtagactagttgacgagggcgaggcggagaacgcgatccggcgtggaatcacaaagctggcaatgagcgaaagttgtcaattctgtgcccagtaatccgccaaaagccggtaaaagatgacacaatggcacgtagtgtggtcaaatagtgtgtccaggaaggcggtcacggtgagcgagtggacggtgaagatcaacggtgtcgaccggatcagcgtcaagccgggggagtgcgtggaaatcggccgtaagccgttacgcccccttgccgatgatggcaacacccgccttgacgtcgccgatcagaccaaatcgatgtccaaacggcacgccatgttcacggtaaaaagcaatggtacggcttcggtccgcgatcttggatcgaccaatggatcgtatgtggtgcgggaaaatggtgatttgttgcgcttgccggccaatgtcgagttcctgttgccgacgtctcccatgcgcatgcagttcggtgatgtgcctgcggacttcattcgtatcgacgatccagtggcaaagccactcgaccttaaggtgcctgatttgtttggctatgcggttcacgaagcaccgcaggagccggatgcggcggatatgtctgtcgacgatattcttgatttgcgggccggcgagccgaccgccatcttcagcgcggataatgttcgacgcaaggtcgacgagcttgaacttggctcgctgaatatcacgcagccagtgacgaaaaatgatgagccggccataccccgtgacctgttcgcggatgcgttggcccagcatgccgagcaggagaccgaacgcaaaaaccagcaggccatggactccgtggtactgccgaagcagcagaccgaacctgagtcgacgactgtaacgcccgcatccaagcacagcaggatctccggtattgtcccggtagatgccatcgcccatgccgttgttaagcacgctcccagcacaagcgagccggcagtggcgtcggcggcggttgttgaatccgatgtggtggctggcgcaagcaagtcagccgaaaacgttcagtccgctccgaataccgacgattctcagccggtggacgctgttgcacagcattctgaaggcactcagtccgaagccgcccagtctgaaaacactcagtctgagaccgcccagccgacaaccacccagcctgaaaccgctcaaccggcaaccgacgcacccgaggatcagcagctggcgaccgaaaccgaaaccgcccagcagtcggtctccgaagcgtatgaagcgtctgatatctactccacgggcgtacacactccggtcttcgagcccggctcggtgttcgagcgtgtggccaagggcgagctgaaagcacaggagccggcagtcgaagtcgatggcctgacctctgacgaggcaaaaaccacgcaagatttcaacgttcagttcgaagtcgcccgtcatcccgaattactggcgttcctcgccatgaatccgtacctgtacgacgacatgtattcttggctcgccgcccgtggcgaggccgatattgacgaagccctgtctcacaacaagggctatcaggaataccgcgaagcggttggaaagtgagtcgagagatgacccagagccagactcagaaccagaatctcacggaaggtctgaatcgcatccgtcgctggcgtgaccaataccgcagtatgcagccgccatcgccgctcgaggatgtgaatcaactggccgcgaagctggagatgacccatgcccatccctccggcatcgcccagctgttcgcttccggccatgttcggttggattcgttgttccgtgacacgggtgtgcttaaggccgccgaacgccatatcgggcgcgtactggatgaccaggccgccaagcgcaggatttccggcgtggcggagttgtcgctcgtggtcggtgtggccacgtggaggggcaacgcgctgccggtgctgttgtacccggtgagcgtcacgatcgaggatgatggcttgtcgaccaccattcgattcaccggtcgcgtgaccctgaacgccgcgttcgtcaatgcattgcgtgagcagggggtgttcctggatgaggattccctgtttgacggtgccagctatgacagtggcactcccgaaacttccgcgatgttcgcccgtatttcgtccgaagcatcggagcgtatctccggcttcgccatcgagcgccagattgtgctcggatgcttcatggacccctcgtcgcagatgatcagcgaaagccgacagttcatcgaccagctggagaatggccccaccggcaatgtgctgttggacgcgcttgccggcgacaaatccgcccgcaccgcgctcaaagatgccaatattccgcaatacagtcctttcgacgtagacccgcatgccgagtacgaagtcggcgatgtggacaatacggtgcgatatgccgcgtcacttgccgccaatggccatagcatcgtggtcgacggcaccttcccgaagggcaccgcggagcaggctgtggccatcgcatcgcgctgcctgatgaatggtcgttccgtgctgtacgtgcccggcgtggccgagcagaagcgtctgttcatccagacggcctccgccaatgagatgaaggcgcaggtactggatgtatccgatgaacacgccaacgccgcgcttgataagcagctgattgccgcagtcggattccagcccggagtcgccacccagcgattcgaccagctggccgacgaactcgtgggcgtgcgctcgcgcttgacccgctatctgggcgacctgcacggggacaacgataagtggaatgtgtccgcatacgagaccattcagaacctggcccgtatctccgtgctcccgacacaccccgccacccacgttcgacttgacgagtcaagtgccctgagcatcgccaacgatattgacacatggatcagcaagatggaacgtgccggcgagctcggcgaatacaccatcggcccggaagacaccgcatggtacaaggcgtccatcaccactgaagaacaagcggtaaccgcttaccagcgcgtggacgatttgctgcgtcgcttcctgcccgccacccgtgagcaggtggcacgcaccgtgcagacctgcggattcccggttcctcccaccactcgcgagtgggagcgtcaggttacggttttgaagaatctgcgacgagtgcttgacgtgttccagccagagattttcgagcgagacatcagctccatgatcgaggccaccaagccgaagagccagcgcaaggccgagggcacgtcgatgggattctgggagcgccgccgccacgtcaaggaagccaaggatctgctgcgcgtcggcgcgcaggtcgaggacttgcacgaagcgttgaaggtagtcgccaagcaaggggagcagtggcatcagttcgtgcctcacggcggttggccggtgctgcccagcaagctcgacgagatcatctccacccaagaggcgctggtcagcaatatgaccgcgctggataccgtgctttccaccacacccgccggcggcaatctggaaaccgccgatttcgagaaggtggaagcacgcctgaaagcactgctggatgatcgcaaggcactggacaccttgccggagcgttgcctgctggagcaggaattcgcttctgccggtctgaacgagttggtcgccgatctcaacgctcgccgggtgggcgtggagcaggtgcgtggcgaagtgcagctggcatggtggaccaccgtgttcgaggacattgtgcgttcttccgccatcatctccaaccaggatggtgctgcgctgcagaccgcatccgaccgcttcgcacaggtcgatgtggagcacgtgcgctccatcggaccgatggtgtcgcaggaatccatgcgccgcctgtgcgacatgctgttctcccgcactcaggaagccaaccagatgcacaccgtgctggcagggcgcgccagtgtgtcgctgagcaggattcgccgtgatcatccggagattctggccgcggccaagccgattctggtggcctcgccgggtacgctcgccgcacttaccgagccgggtgtgctggctgatgtggcgattctcgatgcgtgcgcgcacattcccgctatcgagttgctgtccatcatcggccgcgtgcagcaggtggtggtgatcgcccactgcgcgacggtaaccagcgaaagcgtcaagcagctgatcgacacgttgcctcatatcgaggtggatgctgccccgtctcgccgtgcgccgcgcctgtccgcattccttgaatccgagggatatggtcctgttcgctatgatgtggccaccgagccggctgccggtgaggtgcgattccaccgtgtggaagcgagcggcgtgccggttatgtcttctggtctggtggaatccagtcagtcggagattgatgaagtggtgcgtctgattacgcaacgtgccgccggttttgctgtggttccttccagctatcgacttgtggtcgtgatgttgaccgacgcattccgcacacgcttgggtgccgaattgaagtcgttggcaggcaaatccaaggcgatgggccgattcctgcgccatgtgcggctggtttccttgcgtgacgtggccggaggtcgtgccactgacgtgattctgacgatgtgctatgcgaaaaccacgcacggacgtctgcttcagcagttcggcccgctcgaaagcacaggcggtcgcggactgttgctggatgccctggcattggcggaccacagcttggatattgtgtcggcctttggttccgaagatttggatgaagaacgactgcaccagtccggtcctcggttcctgaagaccatgttgacgtgggccgaacagcttgacgaccgtccggtgcttccgttgcgtgatgcggcaggcggcaacatgctgttcgacgatatcgccgacaggttgcgcgcgcgaggactgaacgctgctgttgattatggattcgacaagggcgtgaagattccgctcgtggtgggattgaaggacaagccgtttgccttggccgtgcagaccgatgacgcgaactttatgtccgtgcaatccacgcgcaggcgtcatcgtttgtcggcacaggatctcatttccttgggctggaatgtgatgaccgtctggagtgtcgccgccttcgtgaaccccgataaggaagtcgaccgtatcgtcagccgtatcggcgagatctaccgcgaggttgaataatcatggcggaatactcggctacacggcgcacaccgcgcaagcacaagcgcgtggtgatgaaaggcactgagcagtttgacgctgacggcgtcaaactcgagcccggagacatgcagaccgaccaacaacggcaatccgacgacgacaaacgcatcctcggcgaactgcctccacactgggctgttttcaacgagcgcgagtaggagttgaggcgcactctgtgcgccccaactctgtgttttccgcagccgtacggctgcggaaaacacaacatcggccgaaggtcgattccgcttcctaccgcataacggccataatcgctccggcctgttgcagctccataaccttggccgcggcctccggcggcattgcgaacgacaccagtcggtcgttgcttcccaatgcgccagtcgtatccggtttgtcgacattcatcaccgtggcgttctcggccagcgtgcaatcggcaccttcgcaaccgacggcggaaaccagtctcacctgatcgccggccaatacatcgtcgacgctactggccaagcggacttcaatcaccgtagtgccggtcggtgctacgggcgcatctctggccatatgcgtggaaatgggatcggctgcttcgatatcgatttgcgccaccttgcccaccacatcctcaatattgcacgcccaagatgggcctatcgcagataccggcatatcagccaactgaacgtcggcggccagaataatgtcaccccgtcgaatcgagcgagcggccaccaccatcggctcggtctccaccacggccaatacggcttcaagcccaaacaacactgcgagtcccacgcacaacgcagcagtgagtcggcgcaaggcatccgccatgcgccgtcgccgcaatgagccgcgcgcaggcggcttaataaacgaaaaggtcaccatgcaaccatggtgacctgaagtttttcgtaagcgcaagctgaatcgacctatgtggttctagcttgccaagttatccacaacgcttcaaacccgtgcaacagacagtgcccgtagtgccaatatccgcggcataccgccgtcgacaccgtcgtttacagaggaaaaacggggagccgaccttacttgccggatttgtcggtgcggtagaatccgtgacccttgaactcaatcggcacggcggaatacaccttgcgcacctgctcctgcgagcacttggggcacacggtaatcggggcgtcattgaacgactgctgttcggtgaagtcatagccgcagttcttgcaacggtaatgataggtaggcaacggattcctccaacaaagtcatatttctcgcgcatggcgtgcaacaccatgccgtgcaaccgttcatatcctagtcgccgccctgacacattggcgttacggtcttactggccagcctgcttttgccactctggttccatcggccagtgtgcgtggctggttggtcagtctggcttgcgccgagtatcttggccggccggtcaactcagccggcccgattcgccaagccgccggtatccccccggcgtcagcactccgtcggccggcacatcatgtggttcggccggcaaatcggtgtccaacacctcccacggccagcacaccgcaatcagggggcacgcgggcttgcgtcgagccaaggcccggtcataccagccggctccacgccccagacgattgccttgcgggtccactgccaaagccggggcgatgaccagatcggccttctccaacgcttcgggcggtagaactgcgccagttggctcatcgggtctgtgatggacggtgctgggagagctgcagctaccggcattgttcgcgccacccactgcatccatcgagcgcaaggattccaatgaatccagcacactccagccaatttccaacccagatcccaatcgtggcaccaacacgtggcagccatgagccaacagccatcgcaacagtggccgggtttcgatttccgaacccatcgacacatatgccgccactgtggaaccatcctgaatcatgtgtgccgggaaccgtcgcaccagcaattcaccggccgctccacattcttccgctggaatgcgcttgcgccgagacagtatatggtggcgcagcgtcgctttatccatcttttctgttttctccgtgccgctggggtcgctgccgatattcatgccattgtccgcttcgctcataccgcacaatctagtgtttccaccgtaaaacgaaagtggccgaggcgaaggcgcaagcccttcatatggctacaataaaggccgtgtcagttttccagtcgattaaagaggcgttcaagctggaccaccagatccgtccgccgcgcctcacccatcccggtttcccgataatcctgcgccccctgaccatggacgatgaggacggctggaacgaagtgcgctggcgcaacaacgactggctggcgccttgggaatccggcgacccgatgcatggcggctccatcaccttcaatcaatgggtgcagcgacagcgccggaatgagcagcatggcgtcggcgtgattttcgccatcgaataccagatgcgtatcgtcggccagatttcgttgggagccatcgcgtatggtgccatgcgcaccggtgtggtcggatattgggttgaccaacggtacgccggccacggatttgcgccgatggcactggccatgcttgccgattgggcactcggagacccattcgggcccgcgttgcatcggctggaaatcgccattcttccggataacgcgcgctctttggctgtagtgcgtaaggtcggagcccatcatgagggactgcgcgagcggtatatgtatgtcaatggccagtggcgcgaccacgtaacatttgcgctgttggctgaagatatggggcaagggttctctgccagactcgccgccaccggttccagataagcgtcgaccggaagaattccgctccgacacgcccggacggaaagccccagttcgtcggtacgtctcctatccttgactctatgggttatgagtcactgagcactgtcgtcgtgctggtgattgtggcgattattatcgttgtatggctgcccgtacgtacggccaacggcatgaaacgtgtggacgagcaccggcaggatcgttattcgccttccctgcatatcgttgatgcagagaacggcagacgattcggagacatcaagccgcataaggcgaaaggggcagcaatgccagcatcaacaccgtcagcgaggctgacacctgagcacatcgcccatgtgcgggaactgcgccgcgcggccatccgccgccggcagattctcgccgtatgcctgcttgccataaccgtgttggtgtttgccgtatcgttccccctgcatttcagcccgctgcttgctcttattccgttcgtgctgttactgctggtgctggtgctgggagccaatgcctcacgccaggcccggcaatgggagcgcaaggtggtccgctacgagcggactcatagcggtacgggctggtccaagaaaccgtctgccgagtccaaggacagcaagcgtgtgaacaaggccgaaccggttgcggccgtaactgcgcctgccaaggagctttccgagcatgttgaggatgctgccaccgaggtcatggaacagcggcagattcgccgcgcgttacgcgatgccgagattgagcaggccaaggccaaggcgttgcgtcagtccgccgccgcatatcaggccgcggcggagcacgccaaacagtctgagaagtctgatactgcacagtccgccgccgataagcctgccgccgaaccgtctgctatggtcgatgaatccgctgaccgtaagtccgctgccgacaccagtgaatcttccgccgcgcccgatgcctccgctcgcacggataagtcgactaagtcggataagtccgtcgcccctcgagttgaaccatcgcttacggtgcgtgacgagcgtgatgagcgcgacgatgccgctgccgacgctacgtcggaactggccagcgtacgccctgcccgagcactggatgtcttcgatatggccacctcgcaggatctcatctccttcactttgggcggggaacataacgccgacaacgctccggaaagcttggagatcaagtcgacccgtcaggtgtccaaggcggaacctgtcgaacccgcagtggcggaaaagttgattgacgaggcccgagccgtcaaggccgcggacgatgccaaggccgccgatgcgggcaaggctgtcagtgccggaaacgctgtagacactgagtcggagcagcgcgatgatgccgatacgaacgccgctacggacgccgatgacgaggctgcaaacgccgcccagcgagccgcattccacgaatccgaggagcgtgccgacgtcgaagcgccagcggcgaccaccgattcgttgggcgcaggcctggactccattcttgcccgccgcggcaactgagcgttgcgattcgccgattttctctcacagcgttagcactcgagttggcagagtgctaataatcgcgctacgatgtgtcctagcgcaaagggacaacgcaagtgatcgtcagcctcttgaggcgttctggcgcggcattatcgaactacaagtagatacgaggtgacccacagtgtcgattaagctcacaccgttggaagacaagatcatcgtcaagcaggccgaggcccagacccagaccgcttccggtctgtatattccggacaacgccaaggagaagccgcagcagggtgaagtcctggccgttggcccgggccgtcgtgacgacaagggcgagcgcatcccgatggatgtcaaggtcggcgacaaggtgctgtactccaagtacggcggcaccgaagtccactacgagggtgaggactacctcatcgtcggcgcgcgcgacattctcgccatcctcggctgattagtcgcctagcgaacttcaacaaccccgactgttcccacgaacagtcggggttttctcttgtcaggcggaaaggggctcccctcagagaggggagccgaaaaccgctcccgccaaacgcccagccatgcctgctatgcataaaggtgcatgcgcgcaacgtagttgagttcggcgttgcaccgcatctacactgggtaacggattggggtccctatggaagaggctcagtcggcgacttggccgagcggcttaagacattttgcacaagacggcagtaggtcgacggtatgttgttttttccgtgtcgcaggttcgtggtgtcgtcgctgtgccaatggttgtctctctaccgacgctgagtgccgtggcatgaggccagcgtcggcagtgggccacgaaatggcgatgtgccgatgctgagccgcgttggcgtcgttatagggccagtttttggaccattgccgacggcaaatcggcgttttgtgtcggcgacggtccaaaaactggcggtctgccgacgataagtgccgtcatcgtcggcagaccgccaggtattgtccctgtgccgacgtaaaaagccctgccatcgtcgtcaccgagccatcttgtgactcactgacggcggcagcagggcggaagaggccgaaatcatgcgcgcggtgcggtctcacacctcgaatccggcctccaccagcgcgtgatcgatgtcgcgaatcaaatcgtccgtatcctccagacccacggccagacggaagaagccgcggtggaactcaggcgggtacaggtactggcgctcgtcatcctcaccgaggaacacgatcagcgattagtcatggccgagcgagacggcagacgtaatcacattgagcttggaaacgaatcggttgtgcccgtcgtggtcggtgtcgaggccgaacgacagcacgccgccgaacccggagtccgggcgggccagctggctggccgccacctcgtggtgcaggtgcgattccagaccggggtacgccacgaaacgcaccacatccagcgattcgagatgcttggcaatcgccaaggccgaggtgtcgtaggacagcgcgtaggtgttcgccagcgtgatggggcgacggatcgcgccggtttcggcgtcgaccctgttgccgaggtgaatggccagcgtgccgaatccgagcggctggtcgtcgaatgattgtccgtgatgtacaagatcagaagccatgcgcccagcatgccggcatgcgctgtgccgccgcaagcaggcgacgccactcgaaaaccgcgccattgcaaggttctggaacaccatataagaaaaatgattggtagaagtgcggggtgcggccttggtcggggctgtttgcagggccgaagcggaccctgaaaccacgctgtgagacacgccgataaaaccgcagaattccgcggtaaaacaaggttcgcgtagaggtcgatttgcgtacttggaaaatatgtggttatatagccaagttgcctgttgaggtcaaacaccgcggcgggaaacagactggcggatttcccaagcggtcaaagggagctgactgtaaatcagccgcttcgtgcttcagtggttcgaatccactatccgccacgccccgatagctcagtggtagagcacttccttggtaaggaagaggtcgtgagtccaa

SEQ ID NO: 14 - DNA, 11243 bp, Unknown
  R30_18m  MAG No. k141_3165
cggcgccgaccaccgtgtccgactcgaaatggccgaaccccttcctggatccgaccgcctcgggccggtccgcgatgggcacgcgcatcgggatgcgcggccctttcgccttcctgccctttttcctcgtccggcgtttcctgccgcgcgccaggtactggcgcaggtccagcgcccgctgcggcttggcgtagatccactggtagaggcactcgtggctgatccgcatcgacgggtcgccggcgtactgggccttcaaccgtccctcgatcagttccgggctccaccccctgcgcagcgcgtccagcacccaggcgcgcaacgggcccgagtccatgcggcgcggcttgcgggatccgcgccggcgccggtcggcctttctctgcgcggccagcgccgaatagaacggacccgaggtccacggcccggtcttcagccgtttcggccggtagggccggtacgacccgttctcgttggacgcgaaccacaggccgcgcctcagctcgcggctcacggtggacttgtcccggccgatcctctccgcggtccgacggatgcccggatgctgttcgcaatgcagcttctcgatcaggatcctctcctcggacgacaggtgcgaatactgttgacccatgagtgcgacaccttcttaagttagaaacttcgaacacttccaaccctagacaaggtgttgcacttctatttagaacccgggtcccgggatcgttcgatgcgtcttgctgtagaatcgtcgcaacggttccaacagtcggatgccgaagaggcggggaagatcaatgagttgggcgggtagacgacggctggcggcatgcgccgcggcattggcggcgctcgtcgccatcgccgcgggactcaccggatgcgctcctcccgtatggctcacgcatcacgccgatgcggatgcgaacggggcgggcgccggcggtaccggaaatgggacgttttcggactggccgccatacgcgaagaaaggatacgacatggatgccacacccacagcgaggcagatctcgatagcggaggcgctgctgaacgatcgacaggagcgggacgcgaacgtcgccggcatgaaggacggttggcccgactcgcaactgttccgtctggtcacgctggcggagacgctgcttgaccggatgtcggaacggtatggcgtggaattccgtgcatcagaaggatttcaccgtccggaactgcttgacccgacatggtggatcaacgtgacgcccgcatcggggccgttgcaaggcgacgtgttcgaagtggattatgtggaaggcaatggtgccgacgggaacgatctcggtccgtatgtcgcggacacgtatttcacggcgctgcgccgggacgactacaacggtcatcttacggaacggatcgaccggttcctcgcggcgcatcccgatctcgactgcgtctaccggatcagcgaccccaccggtccgaagaacgagacccaatggcggttgtcgccgtccgccgccgtcgacgatctcgcctcgtatttcgttggcagcatggagatctacatctccccggaaaccgtgacggaccgtgagcggttcgccacattcgcatcggcgttcatcaccgccatgcggaaagacgggctggacgtccactacgagatcgcgcagatcacacgcatcgacggcgacggattcaccatcggggccgcacgggacgctatgcgccattcgacggagacgcccgcgtgggactcctggtatacgggaggattcaccgccagcgcggacgcctccgcccccgagatcatcaaggatggtgaatgatcatggccgtggacgcgccgtcatcgcaaccgcatatgtgctcccccaacagagcgaaaacgacgattacgggcgtgtctcatcatcgacgatgttggccttcgcctgtgcgatgaggcggaaccaggcgacgggccgtcccaccatcatcgtgaccatgcatatcatcgtcatcagaatgaggcagaacagaaaggcgaaatccttgaaatacaggtacgccgcaaggagtaccacatccgacagccagaatcctatgatgaacctcatcgccagccaggcgttcctgaccgtcgaacgatagacggctcgtagcgggcgccgaccacccccgctatgcgcttcaccgtcttcgccggccattcgtaggtgacgccgacgctcaccttgccggcggcgcggccctgcgccttcgcgcgtcccatgcgccgtaccagcaggatgatgacggcgacgaacaggatgatgacggcgaacacgccgcccacgatcgcgaacggaatccacagatcccgctcggccatcggcctgcactcaccgttcacgcacacctcgccgtcgatcgccatatcgagcgcctgcgcgaataccggagtcaccgcggcaccaatcattgcaatcatcgtctattcccttccctgttcaatgcaccgtgacgctctcgatgatcgcatggatccgcttgagaccatccatcgcggtcggcccggtcgccgtccaacgatgagccgatgtcgtgggtctggcggcgagtcgacggcccgcacatgctcccggtgttgctgttcattcggaggaagacgcgaagcagaaaatcatcatgccgtatttgcggtcattgggatactccgaaaacgaaatgcgattcgagaatcccattaccgctcaagctggtagtcgaaaagtcactttattcagtgacatcgaaattcttgtggatgaccgacccgaagtcattatcgatgcagagaagcccagtcatacgctgaacgacaccgacgtgcttcaagtcacatcctatgccaagctggtcgatacgcaacccggattcaatttgtaagtgcaacacccgtctttgggtggcttgtcttcgagagtaccttgccgagctcgcggtaccaaacctcgttgggcgtttcccggtccaggaccttcatgggggtgtcgttgatctcgtccatgatggcctgcaggtcctcgtccgtcaggccgtcgaaactggttttcttgggcaggtagcggcggatgcgtccgttgcggttctcgttcgtgccgcgctagtacgaggagtaggggtccgcatagtaggcgggcatgccgagggcctcgtccacgagcaggtggcaggaggactccgtgccgttgtcccaggtgcggtcgatgcgcgcgggcgcggggatgtccttgtagatgtcgtattcggcgcgcgccgtggccggcgcgctcttgtcggggatgaggcgggcgaacaggcggcggctcctgcgctcgacctgcgtgtcgatgcaccgtttcgagggggccgtgccgatgacggtgtcggactcgaaatggccgaactcatgccgcgagtcgacacgtttgggccgctgggcgatgggcacgcgcatcgggatgcgcggccccttcgacctcctacccttggcgcgcgtgcggcgccgcttgcctctgggcaggtactgcctgagatccaggatcctctgcggcttggcgtagatccactggtagaggcactcgtggctgaccctcatgtgcgggtcgtcggggaattcgaccgcgggccgtccctcgatgcgttcgggcgtccagcccttcctcagggcgtccatgacccacgtgagcagcgggtcgtacgccatgcgcatgggcttgcgcgacctgcgggcgcgcgtctcggccttcctctgcgcggtcatggccgaatagaacggacggcacgtccacgccccggtcttcagtttcctcggccggtagggacggtacgagtcgttctcattggacgcgaaccacaatccgcgtttcagctcgcggctgaccgtggccttgtcgcggccgatcctcagggctatctggcgcacgccgagcccgtccctgttgcgcaattcgtcgatccggatccgttcctctgccgacaggtgggaataagctttcatatcgagcgcagcactttctctccggttgtggacttgaacacttccaaccatagagcaggtgttgcgcttctatctagaacccggggcgtagcaatggcagcggcgggtaatctacgatgggacaataggtcagggccgcgtccgaaagccgctcatccacgatgagcttctcgtaagcgggattgcgccagctgttgtggcgctgtgtgccgcctttggtggtcatttccggctgatacttgatgcggtcgatgatgtttcgtacgcaatctttggccagttcaatagccacgtcgtgccattcttccgcgctgagaccgccgtatatgcgcaacagattgcgcagcttacccacgtaatgggtgtcggatttgtcgttgcagaaaagaagtcggtctcgccatcgacctcgttcgtatcctcgtcgtcctcgtcgctttcttcgctctcttcgttgaacgagtattccagattacgcgttatcgcgttctcgattacgtcataggcccacatgcgtttgtcgtcatattgggcgaaggcgagcgcgctggaaatcagcaacatgttgttcaatggttcgcattgccgcatgttcttgtcattcgttgcctgtgcaatggtgttcaatgctttgccggcggtaggggagtcggcgaattccgccacattctccatatagcatcgcacgcgcatcgccagaccgtccataagcgtgagcaaaggctcggaatcatcatcgttttcggacgagagcagaagcgcgtggacttcgtgtatgcacagtcgcaggttgccgcatgcgcttgcgtaatcactggattgcagggcattgcccgcgatagcctgcacggttttgatgaattcagtgtaatcgaaggatttgctatatgcatttcctggcttattgacatgaataatgaagcgttcatggcatcggtggattgcgtcggagagcatggcttgcgcgtcggtgcgcgaaatcagcggtcgttcttcgcttggttgggcgcggaaagtatctgcggcttcgcgcagttgggtggactacaggaacagcagatgaccgttgccttgctctgcacgagcgttgcacttacaaattgaatccgggcgctggggtttcccacgtggcccccgactagactggatgaatatgcgatccttcttcgaagccatatccgtatcctgcgtcatccccgcgcgatcgccggcggacgacgaacgcacggtgttcgacaacctgtccttcagcatggaacgcggcgacatcatcgacctggtgggcccgtccggctccggcaaatcgagtctgctgaccgcatgcgcccgactcaacccacacgcacacggcacgttcgtcctcgacggcgtgggcagtgacgaattcagcgcacagcagtggcggcgagacgtctcctacctgccgcaaaaaccgatactgaccggcaaggacgtggccgaggcgatccgcctgccctggacgctcgcgattcgcggcaagggcggcaaggccgagcagatgctgcccgacgagcgcatccgcacgacgttggacgcgatgggctgcgaggacatcgacctggcgcgcgccccgcacgacctgtcgggcggtcaggcggcgcgcgtggcgttggcccgcacgctgcttaccgacccgaaggtgctgctggccgatgaggtggacgccggactcgacgacgacaacgcgtccaaagtggccgcgatcatggcggacgcggccgcacacggcatggcgatcatccgcatccgacaccgtccgccggacggacgcgccacccgcacgctgatgctcgatgcgggacggctcaccgatctgacgcgggataaggaggtgcgcccatgaacggcgcctacgacatcgacacctggggtcttgttctggcgttgggcatggtggccgtggcggccatcgtcagcgaactcatgcacatgggcatcggcaggaccctgatgtggtcggcatgccgcgccctcgtgcagctgtgcgccatgggattcatcatcagctacgtgattcgttcgaacagcgtgtggatggtgttcgctctgatgacggtcatgctggtcgcggcggtgcagatcgtgatatcccgcgcgcgcggcatccccaaaggtcttgccggaccgatcttcctgagcctggtcatcacgatgctgctcatgctggcgttggtcaccgaactcatcgtgcgcccacacccatggtatgcgccccagctggtggtgcccctgaccggcatgctgctgggcaacaccgtttccgcgctcgctgtcgggctgagccgattctatgaaagcatggaggaacgccgcgacgaggtggatatgatgctggccttgggggcgacggcatgggagtccgcccgtccatccgtcatctcgtcgattcggctgggactgttgcccaccaccgcttcgctggcctccagcggcatcgtgaccatcccgggcatgatggcgggccaggtgatagccggcggagatccactgaacgccgccaaataccagttcgtggtcttcggtgccatcgccgcgctgaccttgctggccgacggtctgatcatggccatggtctatcgcacctgcttcactaccgacgaccaatatcagacgcctaaagcacgatagcctcagtatcgatctcaggccaagcctcaggcgatggtgaccggcgtgccttccggaatttggttgtagaaccattcggcatcggccacagtgagtcgcacgcaaccatgtgaggccggctgaccgagcttgttgccttcctcttccatatactcgccggagttcgccccggtcggcaccgagtggaagaggaacgggccgttgaatcgcacccaataatcagcacccatgccttctgcgggattgtagaagtgatcgcctctcatcccgataacatagttgccgcgcggggtcgtatcgttgagcccggtgctggcgatcatcgtgtagatggtctcaccgccggattgcacatacacttcctgcttggcgatactgactttcacgctgagatcggagtattgcgacaaatcaggctgcttgccggtgggattcgtccatcgcgcacgttgcgcttccttgtcacgctgctcctgaatcgcctggttaaagaccggtacctgctggcggtccaaggatgaggccgatgcagacactcgcgatgccgactgttgcgcggattgactcaccttctgcgcctgcccctgaacctctgcctgcccctgtgcgaccgactcaccgcggggccacacccgttgggcgtcaatcgtcgagaagacggcaagaacgcagcacaacaatgcgcataccgcaaccacaatgcgccgtacaacgtaaattcgttgacgacgaatcctcatccgtgctcgacgccgctcagtcatgtcttccttctcgttgcaaagacttttgccgtaagtattgtagccgcttttacgatacgtcgcgtaccaatatcacgcgcgctattccgctgtcactattcctattccgttgccgtccacttacgtctcagcaacatccacaggccgatgatcacggccaccacgccgagcccgatgccgaacagtcccgaggattgcgccgcgtgcgcggttccctgggattccaacagcacgtcctgcgtgaccaccagcgacagcatcgcatcgagaaggtcacgaatttgaccgacgaatcgatggggttgtgcgtcttatgcgaaatcaccataccgcgaatcgcaatcaagaagaacccgcaacttacgcagcagacggtcaatcgccttaaggaggcgttctggaagctgtatgaaaccaagccgatcgagaagatctcggtgcgtcagatcaccgaactcgcaggctacaatcacgccacgttctacctgtatttctcgtccgtgcgcgacgtgcgtgaccagatcgaagacgacctcatcgcccagcgagacctcatattgaagcagtgcatgcatgacggcacactccccagcatcgcaccgcatatgcaaatgccatcgcaatcggaagcagcgcagcagccagcggcatcaccgcaagcccagtagcgaggtcaacccacagctggcggcgcgggaaacaggtcgcgccgcccagtacacgaatccggcgagcttctaccgagtcgcgaggaagaagaaacgcgggaaggggaagatgatgctgccgtccgactgtgtggggtattcctcgcggacttgggagaacacttcggcctcgaacttcttgcggccggcgtcgtcaagcgcctgcagatacggacgcatgccggtgccgcgataccagtccataatcgcctcatgcgagggcagcgtgtgctcccgtttgaatcgcagatactgttccgaatcccgggtaaccatgctccccacgctaatcagccgttcacatatcggccgatattatctcacaattcagccaagcagggcgtcgcggcgggcgatgagcccgtcaatcgcggcctcgccttcgatgacggtgaaggtcagggacttacgttcgctggtctgcggggcgatggtgtgcaggtcgccgcgctgctcgtgccagccgcggccgtggacgctggagttcgagggttcaaggccgaccacgtagtcgcccgcacccatcgacttccattccatgaagtatgggaagaggctggcgtcgaagtcgatgacgactccaagtccgagcttgcggttgaccacggcggcgaagctgcggccgttctcgtcagcggcgagctcgtgcaggtacacgctttcggggcggttcgcctcgggtgcttggatttcgttccacggcgtggtgtcggctgcggtggtctcgtcacgcggggtggccttgcggctggggatcacgacttcggcgccttcggcgagcaacggccagccgaagttgcagtggtacatccacatcagcggctcgtcgcggaaggattcgttggtcacctcatcctcgaccgtgatcgacggctggccgtacacgctggtgatcttgcggcgcatcaccagattctcgccgaacagttcggcctcgcgcatttcgccggagacctcgagcacgtagtcgccttcggcggtccagtgggcgtcggagcccacatgctcggccggcgtggtgcggatgcggccgtgcatcgggaagctgccggccgggtacttgccgccctcaggcgtgacgtacggcgcgcagatgttctcgaagccgcaggtgaagaacaggccgcccatgatggagcgctgcgcctccagcccgttggtgtcgaactggttgcggccgttcaggcccggcttggacaggaaggtgaggttctcgccgcggtattcgaactggcagacgtcgagggcgcggtcggccatggatacgaagcgtagcgggccgttcttcacctcgatggccttgaggccgtgggcacggccctcctggtactcgatcgggcgcacgtaggcggcctgctgaaggctgcccatgtgggccaacatgtcggctcgcatattgtgttctgtggatgtcatcgtcgtcaccgctccttgcaatcatcggcttgttgtccgtgtgcacatcatactgtaagcgttttccgcaattgtcgctatcaacaacgtatacgcatgtcgaaaagttggaccgaagaacaacgcaagcacaacgaaggctccccgaagggagccttccatcgtagcacacgttacgcgagaattcgtcgctcgcgctttacgcttccgcggcatcgtccttcagcgcacgcagcagggccttgttgcgggtttcgatgatgcgcttgccgtcctcgccctgccaagagaagaagccctgaccggtcttggcaccgaggttgccttccttgaccttttcggcgagcagcgggctcgggccggtgccgttgtccatgtcgtcgaacaggtaggtgctgatgttgtagaacacgtcgagtccgccgaggtcgatgctggcgatcgggccgaccaggttccagcggcggccgaggctgtacttcatcacgtcgtccacggtggccgcgtccgctatgccctgctggacgatgtagaacgcctcgcgcaacacggccagctgcaggcggttgcccacaaagcccagcgattccttcttgatctttgccggcttcttgccgatcttggccatgaggtcgaaggtgatgtccaccaccttcggatcggtcttttcacccggcaccacttcgaccagcggcatcaactgcgcggggttccagaagtgcgccaccacgaagcgctcggggtgccccatcaccgactgcagcgcggtggggctcaggccggaggtgttcgtggacagaatcgcgtccttgggggcggcgtgctccacttcggcccagacggacttcttgatgtcaaggttctcggccacggattcgatgacgaagtccacgtccgccacgccgctcgcatagtcggcgtaaccggtgatgcgggccagcaccgtgtccacggtgtcgccggccttgagcagtccggcttcggcgaagtcctcggcatcagaacagatcgccttcatcgccttctccagcgaggcctcgctgcggccgaccagatgcaccggatatccggccagcgcgaactgcaacgtgatcgcatggcccattgttcccgtgccgacgttcgcaatcgtcttgatatcgtccgctgtctcaatcatggagaccccttctttccggcggttcgcctggcgttggcgtacgcaggaacagcaccgtgccgttatgcgtttgctcgcattctatgccgatttcgctacgtgaacatttactgaacatttcgcggattcgactagcacaaatccctatatcagcacaaaagcccgttgtctatttagaagtgcaacatccttgttgttcggttaatgatagtagttcgtcggcgaatgcctcgaccggggtgcggtagccgagcacgcgcatgggacggttgtcggtctcgtccacgatggcctgtatctcgtcggccatggacgagtcgatgcgcgtgcgcttgggcaggtagcggcggatcgcgccgttgcggttctcgttgccgccgcgccggtacgacgggtacggggcggtgaagtaggcggccatgccgagccgttcgcgcagttccgcgtggcaggcgaactcggcgccgttgtcgtgcgtgacgccggtcctggcgcggcggcgtccggccttccggtgcgcggggccggcgatgtggcaccggccggtccacggccccgtcttgagacgctccggccggtac

SEQ ID NO: 15 - DNA, 19532 bp, Unknown
  R30_18m  MAG No. k141_3735
aacgtaagtctcctgattcgcgttgtcataatcgacgtggtcagcaacctgatagcagatatctcgaagacgtgaatttctgtcattacagtatctactggcaatcgtttcacacaagttggctaaataatcatttagccgattgttgagatcgatcttgtcatcaagaacatttagcagttccgcaactttgctttgttccccgcgggaagggagctgcacaggcatgttgcgaatatcggcaacattaatatgcgacacagttgcgccattggccaatcgcagcattctgtcacgctgttcaggagcattcagataataattcagatattcgggaaccacgaaagacgaatcgggtcgaagaagcattgtcctttgtcccaaacaaacctcaatcccaggtgagacgatagctacatttccggctggtgcttcacgtgcaagaatcagatcaccctgccttggtacagctcgggagacacgtctctcgtatacgtcttgggagaccctgtgaacatcagccagaatcaatcttccgcgcccaacattaggtgttcggatgagtggatatcccaccccttcatccttagcgctggtatgtggacaatcgacaatcaactcgcagacgtcctgcagtgtcacctgctcacatgccatagccgatggcctccagattcttcttgatctgctcttgcagacggttggattcctcgaagcattttgcgatctcgtcggtcagacgggtcatcttctcatcgaatggctcatcgtcttcctctacctcggcgacaccgacgtaacggcccggagtcaggatgtaatcttgcgccttgatatcttccgtcgtggcgatggcggagaagcccttctccgtttccaaggtgccatcacggaacgcgtcgaacgcagtcgataccttggcgatgtcctcatcggtgaactcgcggagcctgcgggacaccatggttcccatatcgcgcgcgtcgatgaacaacgtcttgccagactgcttcttgttcttggtgatgatccacaggctcacaggtatgccggtgctgtagaaaagcttatccggcatcgcaatgatgccttcgaccagatcggcatccacgatcttggcgcggatctcgccctcgttgttcgtctgactggacaacgcgccgttcgccagaaccatgcccatgcggcctaaacggttgaggtggtggatcatgtgctggacccacgcgaagttggcattgccctccggcggggtgccgtactgccagcgtacgtcgttctcgagtttcttccctccccagtccttcaggttgaagggcgggttagcgaggatgaaatcgaatttctcggtcttgtgcaggtcctcgaagaatgtgtcggcattatgatcgcccagatccgcgtcgatgccgcggatcgcgaggttcatggtcgccattttccacgtggtcggattggactcctggccgtacacggagatgtcgttgatgttgccctgatggcgtttgacgaagtccgcggactgtacgaacatgccgccgctgccgcagcacggatcgtacactcgcccgtggtagggttcgatgacttcgaccagcgtcttcacgacgcacgcgggtgtgtagaactcgccggcgttcttgccctccgcttcggcgaacttggccaggcagtattcgtaggtgcgtccgaggatgtcgcggctatcgcccttttcggccatcttcacattggtgaacaggtccacgacctcgcccagacgtcgcttgtcgagctcctggcgtgcgaagttcttcggcaggatgcccttgagcttgttgttctcggcttcgatctggcgcatggcctcgtcgatgaccttgccgatctcaggcgtgtgcgcggccgctgcgatggtcttccagcgggcgttctcgggaacgaagaagatgttctcgctcgcgtattcgtcgcggtcctcctcgaagccctcgccctcctcaacgagttcctggtatttctggtcgaacttgtcggagatgtacttcaggaagatgaggccgagcacgacgttcttgtattcggaagcgtcgatgttgccgcgcagcttgtcggcggcgctccagatctgttcctcgaagccgatctcggcggtattgtccttcttctttgccatgtcttgtattatcctcctgctcatcctattcgctgatcttggtgtcggcccacagctcgcactgttccatgacggtcttcatggcgtcctcgacgccttcgggcggatacttgtatttgcgcagcaaacgtttgatggcacgccgcatgccggccctggcgctttccttcttctgccagtcgatcgtggcgttgctccgcatcgcatcggtcagctcgcgggctatcgagacaagctggtcgttgtcgtagaagtccttgaccgcctgcggctgggtgattgcgtcgtagaacgccatctcctcgtcgctcaagccgagcttctgcgcgtcgtcgcggtccttcatgatctccttggccatgttgacgagctcttcgatgacctgcgcgttagtgagcatgccgttgagatacgcgttcaacgtgttctggagcatctcgctgaacttctgggacttgaccacgctggtgcgcccgtacgcccgcaccttctccttgatgaggcgtttcaggctctcgatcgcgatgttcttctccttcatgccggcgacctcctggaggaacgcctcatcgaacagggagatctccacgctgtccttctcgaacaggttgagcacgccgtccgcatgcacgctctgctggaggatctcgctcacctgcttgttgaactccgtgtacgtcatgccgccgcccccgccggagccacgtccggtcaggcgaaggacctgcacgcgcaatacggataggtaagccgcctcatgcgcgtcctcttcgcttaccatgcttttgcacaggctcagcgcctggttcatgagctggcattgcttgaggaacgattccgtgtcttcgtgccgttccggatcgagcagccagtcggttccttccgcgatggcgtcggcaagcgcctccctgctgttctggaagatgagtttgcggtagtcgaagccgtacatgagatcacggcacacgtcgagcttttcgaggaatttcggataggcggtctcagcgatgttcatgtcgccgtaattgtgctggtcacggctggtatagtccttcatcgcccgcttgagcgcgcctgcgatgccgatgtaatccacgaccagaccgccctccttgcccttgcacacgcggttgacgcgggcgatggcctgcatgaggttatggcccttcatcggcttgaacacgtacatggtggacaggctgggcacgtcgaagccggtgagccacatgtccacgacgatggcgatcttgagggaatcggaatcgtccttgaacctgcgttccatctccttcttgtgcgtggtgccgccgcacacgtcgaaccattcctccggatcctggttcgacatggtcatcaccacgccgaccttgtctttccattcggggcgcagctccatgatcctgtagtagatcttcatcgcaatcggccggctgtacgccacgatcagggccttgccggccaggacgtcggcgcggttgttctcgtaatggtccacgatgtcgcggcacaatgcgtcgatggtttcaggagtgtcgaagatggcatcgaggccgccgaggtcatgcttggacttctccacgctcgcctcgtcggcctggtccgcgaactccttgtagaccgcgtcgatgcggcccagcgcgttctcgtcaagatggagcgagaccacacggctttcgtagtagaccggcttggtggactcgtcctcgacggactgggtcatgtcgtacacgtcgatgtagtcgccgaagatctcgcgggtgttgcggtcatccgtggagatcggcgttccggtgaaaccgatataggacgcgttcggcagtgccttgcgcacgacacgggccgcgccgaccgacacatgaccgtccgcgttgatccgttcggtcaggccgtactggccgcggtgagcctcgtccaccatcaccacaacgttgctccggtcgcacaacggctcgtcgccgtccgagaacttctgcatggtcgtgaagatgatgccgttcgcctcacgaccctcaagcagttcctgaagattcctgcggctctcggcctggaccgccttctggcgcaggaacctggcgcagcggctgaattgtccgaaaagctggtcgtcgagatcgttgcggtcggtgatgaccacgatggtcgggctttcaagataacgctgcagcagatgtgcgaagaacaccatcgaaagcgattttccgcttccctgggtgtgccagaacacgccgatcctgccatccccattgacggcctcttccgctctgacgatggctttccgcaccgcgaaatactggtggtatgcggcgatgatcttcacgaccttctcggaggaatcgttgaagcatacgaagttttggatgatgtcgagcagccgttccttcgggagcatgccgtcaatcatggtgctccatgccgcggctttcgttccggaatagtcgccgtccgccgacttccaagccacgtaacggtcctcgtcggatgtgatcgtgccgaccctggtctgggtcatatcgctcatcacgcagaacacgttgggcacgaacatgctcggtatctgcttcatgtactggcgcaattgcaggtacgcgtgtgaagcgtccgtctcctctctcgacggggacttcagctcgaacaacaccaacggcatgccgttcacgaaaatgatgacatcgggacgtttctcggaatactccacgaacgtccactggttcacgacatggaaatcgttgttctcgggatcgtcgaaatcaagcagccggacgatgtcatcacgctcttccttgccgtcaaagaagtgcacttcgactcctgattgcaggtagtcattgaatatctcgttgcgctgctccaagctgccgatctcgacattctgaatcttccggatggcctcctcgacggctgcttccggcagatttctgttgattcgtcgcaacgcatccgggagaatatcaggaaggaatacgtcgcgatacgagtcgtcggtgcggcgaacatcgggcccgtacaggtgctcatatccgagtttctccgttagatgttcgacgatcagattttcgtaccattcctcgttcagtggatccatggacgtgatgttgttcagagaacactccgagaccgtacgagattcgactttggaaacagccattgcttaccccacaaacatatggattctcaagcaaaccacttttcggttagtctatcaaccagcctatcgttcgggtgtaatcaacatggttgtccatggctattttccggcttccatttaagattttcgcgtcgccgcatggcggaacacgtctagtccatcaagccggtggacaataagcgtccggctgggagcacgcccgtaatcgtattcaaaatctgcatgccgaccgcattgaacagttgaacaaatacctgacgtaaactttatggcataccacgaaacaaaaaagtggtcccgccgctaaacggcgggaccacttcatgcattccacgcgcccgtgcaccacgcatcaggcgcggtcagtccgccatggcatcacgccttggcgacctccacacccagctcggcaccttccttcacttcgaaggaggtagccagcgtctcatgggcgatcagatcgcggaactgctcgacatcggccacattggcggccggcacggtcagcaccagggcgatgcgatcggcgatgtccagatcggcagccttacgtgcgtcctgcacagaacgaatcacgtcgcgggcgtagccttcggccagcaaatcggcatccagcgcggtgtcgaggatcacgaagccaccggtcggcagagcggcggagaccgaagcggcggcctcggtggcgttctcctcctccacgcggttgatcagctcgtactcgccttcgaccagcgcaaggtcgccggacggcgtggagaccaccggcgcaccggacgcagcatcgacatgccagtcgccggacttggaggccttgatggcgaactgcacctgcttgccgaggcgcggacccgccgcacgggcattcacacgcagctcgtgcacgatcttcagaccgtgggcggaggcgtcctccagagtcgagaactcaatattcttgatattaagttcggacttcagcagatcgtcgtacgccttgacggcgtccacgttctcgaccaccacggtgagcttggaaagcggctggcgcacgcggatcttggcggccttgcgcagggacagggtgccggagacgacctcacgcaccttctccatcgcgtccaccagagccggatcgtcgaccagcacacggccgagttcggtatcggcaccggtcttctcgtccaccacgaacggccaatcggccaggtgcacggactcgccaccggtcagaccacgccacacggactcggcctccatcggggcgagcggcgcgagcacgcgcatgaacgcctcaagcacggtgtacagcgtgttgaacgcggaagcgtcctcattccagaaacggtcacgggtgttgcggatataccagttggtgagcacgtcgatgaagtcggagaccgcatcgcaggcgtcggagattgcgaactcgttcagcgacttctcggcggccagcaccagacgacgggtacgggccagcaggtagcggtccatctccggcagaccggcgacctcgtccgcgcgcagctggcgagcgtcgaagccagccccaccgttggccgcgttggcgtacagggtgaagaagtagtaggagctccacaccggcagcatgacctggcgcacggtgtcgcgaatgccttcggcggtgacgatcaggttgccgccacgcaggatcggcgaagacatgaggaaccagcgcatggcgtcggaaccgtacttgtcgaacacgccgttcacgtccgggtagttgcgcaggtgcttggacatcttctggccgtcggagccgagcacgatgccgtggcagatcacgttcttgaacgccgggcggtcgaacagggcggtcgccatcacgtgcagcaggtagaaccagccgcgggtctggccgatgtattccacgatgtagtcggccgggaagtgctgttcgaacttctccttgttctcgaacgggtagtggaactgcgcgaacgacatggaaccggactcgaaccagcagtcgagcacatcggaaatacggtgcatgtgcgacttgccggtcgggtcgtccgggttgacgcggaccaggttgtcgatccacggacggtgcatgttgatgttgccgtccttgtcgcgcggatagtcgccgaagtcggccttgagctcttcgagcgaaccgtagacgtccacacgcgggtacttcggatcgtcgctcacccacaccgggatcggggaaccccagaagcggttgcgggagatggaccagtcgcgcgcgttggcgagccacttgccgaactgaccgtccttgacattgcccgggatccagttgatctgctggttcaattccagtagacgcggcttgatcttggtcacggacacgaaccaggaggagaccggcttgtagatcagcggggtggcgcagcgccagcagtgcgggtaggagtgcacgtagctcttctcctggaagaggatcgcgcggcgctcttccggaatctcggcgagcgggccgtcgccggcgcgcaggttgcgcaggatcggcaggttggcgtcgaacacgaaatcgccctcgtagtcagggcactgcacggtgaagcggcagccgtcgtcgagcacgtcggtgctcttgatgccgtgcgcgttcagcgtgttcatatcgtcctcaccgtagggagcctggtgaaccaggccggtaccttcgacggtgtcgacgtagtcggcggtgaagatcgtgtagccgttcgggccgggcacgtggccttcggattcggcctcgtcacccgcgaagtacgggaagaccgggtagtagcgtcggcctgccagctcgttgcccttgagttcgcgcacgacctcgtaattctcgccgagttccttctcatagtgcggcagcaaatccttgccgaggtagaacttcttgccagcgaacctgccttcggtcgggcggacctcgacgtagtcgatgtcggcgccgaccacgatggcgaagttggtgggcacggtccacggggtggtggtccagaagacggcgtaggcgtcgtcctcatcgcgcatcttgacggccacggatacggtggtgtcctggcggtcctggtacacgtcggcgtccatgcgcagctcgtgcgcactcaacggcgtgcggtccttcgggcagtacggcagcacgcggtagccctggtaggccaggcccttgtcgtagagctgcttgaaggcccacatcacggattccatgtacgggatgttcagggtcttgtagccgtgctcgaagtccacccaacgggcctgacgatgcacgtagttctgccattcgttggtgtatttcagcacggaggcgcggcaggcgtcgttgaacttgtcgatgcccatcttctcgatctggtcgaccgagtcgatgccgagctccttctgcgcctcaagctcggcgggcaggccgtgggtgtcccagccgaacacgcggttgaccttgcggcccttcatggtctggtagcgcgggatcacgtccttggcgtagccggtcagcaggtggccgtagtgcggcaggccattggcgaacggcgggccatcgaagaacacgaattcgttctggctgtggtcgccggaagggttgcgttcaacggactgctggaaggtgtcgtccttgtcccagtagtcgagaacggtctcctccatgtcggggaagctggggttcggcgcgacgtgcgcggtctcgccgccctcgctcgccttgggatatacgttttcgctcaccgtaaatctcctgttagtactgtgcactggtcctacaggagcgtcattgatggcgattgccgggcgccgacgtgtgccggctggtttcacgaatgtcacgtaccgaaccgtgggccgattagtcaatcgcctcgcagccggaaccgactgtgttccgcccggaacagccatgtctgccgttcctgcctacgaggacgatgacgagcgctggtatgcgctccgcaccgcggtaccacctcgcttatcgcaccggttgcgccgctccgaactgttgcactcggagccgcgagcctgcgcgaccgcttgtgttcggctgtctcgggccgatcccgtcggttctactgggcgattgccgccgttcttccgaagactccccgctgataacggatcactgcctcacaacggtgcatatcctaacacgccacgcggtcaaatcgccgcccacggccacggcaccgtcaggagcccgatttagattgggaccggccaccacggaccgagaaaggattgtcggacaatgacgtatgatttcacgtccatcatgaacaggcatggcatggattcgatcgcggtcgacggactgggcaccgacccgggattcgcgccggacccgccacgcgagggtttcgacgtcatccccatgtgggtggcggacatgaacttcccgaccgtgcccacgatcccgcaggccatcatcgaacgggcgaagcatcccgcctacgggtacttctcccccaccgacgactattacagctccatcatcgactggcagtccacgcgcaacggggtcaccggattgacccgggaggcgatcggctacgagaacggggtcctgggcggtgtgatcagtgcgctgaccgcgttcgccgcccccggcgacggcgtgctgctgcacagcccgacctacatcgggttcacccggagcatcgaaaacaacggctaccgcatcgtccacagtccgctcacgctggacgagcgcggcgtatggcgcatggattacgaggatatggacaggaagctcaaggagcatcacatccacgtggccgtgttctgcagccctcacaatccctgcgggcgcgtgtgggaacgttgggaaatcgagaaggccatggaagtgtacaaggccaacgattgcgtggtcatttccgacgagatttggtccgatttgactctggggaaccaccagcacatccccacccaatcggtcagcgaggacgcacgcaacaggaccgtggcgttctacgcgcccagcaagaccttcaatctcgccggactggtgggaagctaccacatcatctacaatcccacactccgggaccgcatcgtggccaaaagctcgaaatgccactacaacgacatgaacgtgcttgccatgcacgcgctgatcggcgcctaccggcccgaaggccatgagtggctcgacgaactgaaggcggtgctcaccggcaacgtcgattacgcctacgactacatcaccaagcatttccaaggagtgagtctggccaaaccggaaggcacctacatgctgctgctcgactgcgagcagtggtgcgaacgccacggcctgagcctgcccgagttggagaaacgcggctgggatgtgggcgtcgcatggcaggacggcgacatgttccaggccccctacagcatccgcgtcaatctcgcattgcccttgagccgcgtcaaggaggccatgcgccgccttgaccaatacgtattcaacgcgtaaacggcatgcatccgcgattgcggtgtcctggaaagacgaatgccgtcaacgaggttggtgcccgttggcggcattcgtcatacgttggccgaaccgggcgaaacccaagttgccgtgcgctatgaggtggatgccgccagcggacgtgtacatctgaccgcccgatatgccggtgccaccgatgcgccgacgctgccggcattcggattggaatggacacttcccaagcagtacgagaacctgcgcttctacggccttggccccgagggggcctatcacgaccgtctgcacggtggcaagctcggcattttcgagcgcaccgcagccgaagacaatgcaccgtatctggtgccgcaggagaccggcaaccatgaagacttgcgttgggccaaagtgcttgacgcccaaggacacggcatgcgtatcagccaggccggcagcgaacatttcgcggcgagcctgttgccgtacagctcgctcatgctggaagaggcgacccaccagaacgagttgccgccggtccgtcacacgttcctgcgcctgttggccgcgcaaatgggcgtgggcggagacgattcatggggcgcgcccgtccatgagcagtaccagctgcccgccgatcgcgcctacacgctcgacgtgaatctggaactgttctaacagcgataaagaagctccctctgacgagggagcttctttatcgcacagagggagcttctttatcgtgctggtacgaaactgtcacgcaccactagggtggtggagatgaaggtatggtggtgcagcgtacgccgactggagatggcctcggcaagcatcgtaatcgcagtatcggccagctcattctggtcgatatcgtaactggtcaatgtcggcgaagtgtactgggcgatggtctggttattgatactgatcacactggtatcgcgaggcaccagcactcccgcagcggtaaacgcctgcagtacgccgactgcaatcgagtccgcagccacgatgaacgcatccggcatgtcatctcgatgatcgttaaccgcttcctcccctagagtgcgcccggtgtccacagtgaacgcgccttgcgcgtaaatcaggccttccgcatccagccccaaacgctcggtccaattgcggaatgcggttaatcggccgtcttcggggtattcgtgcaggcccatcgtgaagccggcgccgccgatatagccgatgcgtcgtttgcccgaggacaccaacatatccaatgcgtccaaaatggtttggcttaaatccggttgtaccgaatcgaacaggctgggcgcaggattgatgtcgatgaatacgccatagggcaataccagatggagcttcaacagtctatccgaagagagtacggacggtccgatggagatgaagccgtcgaaatcaccggcgtcggcaatcagatcgtcgatatgggaaaacgacgtgagttccatgtgctgggctctggcattgtcgccgagcacggaccgtagttcatcgaaataggcgtccgccagttcttcctcgcgggtggcgttgtcgagtacggccacacggcgtggcaatgcgatacggcgtgatccggtagcgtagccaagctgctcgctgacctcgatgatgcgacgtcgcgtctcctctttgacagacaatgtcgggtccccattgagcagccgggataccgtggcctgcgagaagcctgatttctgtgcgatttccttcatcgtgaccatagttgagccttccacgcctcagtacgtaacaatacgcagtatttcagtaaataactttactacatagtgtaactcacgtcatgcgggtatgacgccgtatggttgcagcatcgtcgatccgcagcgctgatgagaacgtgcatgtttcaggccctccgataattatcgggcaggcgggaatccccagaccgtggagtcaatgcgctggattttcccggacttgtcaaagacaacggtgatgtccggcgcagtaaaactgccggtcgaatccccgaatcggtacggattactccagtcgataacggcatgcatcgtcacggtccgagttttcgcgtcataggactcattcgagtactcgatactgttatgcgtggccgtagtcccgcccagaccgccgccattgccttgatgcatttgctgacaatacttcgtaaaatccgcgccgagaacattcgacactgcatagcgcctaaatgaacgtgttaggtctgcaccaattcacggccggcaatactccacacttctcagtaatcaattcgtaccaaaccgctcacgaatctgagcagcagtaccataagaggcttgcgcaccgaccccagtcgcggcgtacgcggaaacgtacgaggccaactgcgcactgtccgccaacgcatgacccgaggcaagtccggccagaaccgtgcccataaaggcatctccgcacccggtagtgtcgatggccgcaaccgcaactggcgcaatacgatagatatcatcaccatcgatgaccaccgacccatccccgccaagcgtaattaccgcctgattaaagccgaagtcatgcatctgccgcgccacatcagaccagtccagtccatcccaatcgtcatcgtcaggctcggcgatgtccagcagctgtgccatttcatgttcattgaccagcagaatgtccgaagcctcgataagttcagcgggtagttcagcaacgaatggcgaatcgttgagcaataccttgagcccggcatcatggcagaggcgagcgcatgccgtgaccgtttccatcggactctccaaacacagtcccagtacatcggctgaggtcagattatcccgcatcgattgaatatactcaacactgacgtaagcgttagagccgggagaataaacaatcgtgttctctcctgccgcgtctacggtgatgaccgtggtcccgctggccccatccacgtgccgaatataactggtgtccacaccggtatcgttcaatgcttcaagcaaaaaatccgcattagcgtcggaaccgagcacaccaaacaatcggactttggctccaagacgagcggccgaaacagcctgattccccgacttgccaccaggaagcacccgcaacggccctcctagcactgtctcccccggtttgggcagacgctcggtggtgacggtataatcggcattcatcgagccaacgacggacacggccccatgaatgcaatcaagagaaacaagcgtttcatccatagcaggcatgatattccctttctgaatgatagatgctgctggtgcggtagtctgttcgatcaacatgctccgcaccagcagtcgcaatcagacattgcgttttgccgtaaaactcttgcgaaatacgaacagtacaatcatcgacaacaccgaaaccgcacacataatccagaacatgttggaggtctgcgcttccacaccactgccaacaccgaacagaccacccttgcccatggtgtcactggccatgagactggagtatacgccgactccgatagaggccgaagtgttcatcatcagatcgagaattcctacgccacgaccattctcctcgaccggcaacgcatctgacgcagcgtcgtagattggcgtatatacagcggtaacaccagcaatgaacaagcaggcaagaaaagtcagcactccgaacccactcttaatgaatatggccgatcctgcgaagccgacaatcatgagcacgatagcgataaccagtgtgcgcatgcgtccgagtctgttgattactggaccagaaacgcatccaacaattgtggccacaatgtagaccaatgttagacacagcgaaaccgtggtcaacggcacgttgtagatctgctcaccaatcacgttgtaaatcggcacacaagcaaagttgaagaagtacagcacaaattgcagcagcagaatggacatatacgcaccattggtcacgaaagaatgacccaggaacggattcttgcctttccaaatccacagcacaaacagtacagcgaatacaatcgaggcaataatcatgccgactccggggaacgagaagcaaatggcaatgagcgcagcaaataccgccaatattcgcaatcctgcgccaacacacggctctcaacatagaaaaccgcgcccccaactaccggataagaattacttcaacccgataatcgaggtgcggtttttgcaggcgtaccgactactccagctccaccgcgccggtgtagagctgatagtactcgcccttttgcgcgatcagctcgtcatgcgagccacgctcgatgatgttgccgtggtcgagcaccatgatcacgtcggagttgcgtacggtggacagacgatgggcgatgacgaagaccgtacggcccttcatcaggttatccatgccggcctgcacgacttcctcggtacgggtatcgatggaagacgtggcctcatcgagaatcagcgcgggcggatcggccaccgcggcgcgggcgatggaaatcagctggcgctgaccttgggacaggccggatccatcaccctcaagcaccgtgttgtatccctcgggcagcatacggatgaagctgtccgcattgaccagacgcgcggcctcaatgcattcctcatcagtggcgttcagacggccataacggatgttgtccatcacggtaccggtgaacaggttcacgtcctgcaacacaatgcccaaagacctgcgcaaatcaggcttcttgatgccggccacggagatgccatcatacagaatctgaccttgctggatatcgtagaaccggttgatgaggttggtcacggtggtcttgccggcaccggtggcgccgacgagcgcgatcttctggccgggcttggcgaaccaggtgatgtcgtgcagcaccggcttgtccgggttgtagccgaaggtcacgttggtgaagcgcacgtcgccgcgcagcagcgtataacgcccatcaggcgaggtgatcgcctgctccttggccttcatcgccacctcgcaggcggaaccgcgcagcttttcggcggccttcagagacctcgtaccatcgtcgccgatctcacgcttccacgcccagtggccggtctcatggtcgacttcggtcatggtgcggccgtccggcccaagttccacgttcacgagcgtcacggtgcccttgtcttcctcgatgggttcgtccatcaacttgaagatgcgggaggcgccggcgagcgccatcatcaccatggtcagctgctgggagacctggccgatcgggttgatgaacgagcgggacaaggtcagcagggagacgagcgtgccgagggtgagcggcttgacaccggtcagaccgatgtcattgacgccggccagcgaaacggcggcaccgacgatggcgagcaggatgtagagcagatagcccatattgccgacgaccggcatggtcacattgccccaagtgttcgcctcggcggacgcctcaaagagttcctcgttcttctcatcgaaggtcttctgagtggcgtcctcatggttgaagaccttgatgaccttctgaccattgacggactcctccacgaaggcgttcacgtcgccgatccactgctgctgcttgacgaagtagcggccggaacggctcacgatcttgcgcacgatgaaatacagcagaacggtgaacacaatcacgaacgcagtgaacgggattgacagccacagcatggacagcaatgccgcaatcgcggagataatcgaggagaacatctgcgggaacgactgcgagatggcctggcgcagcgtatcggtgtcgttggtgtagtggctcatgatgtcgccgtgctcgtggctgtcgaagtagcagatcggcagcttctgttggtgggcgaacatatcgtcacgaatcttcttgagcgtgccctgttcaacggtgatgatcagccactgccaagcccaggatgccacgataccggccacatacaggcagcccatcagactgatggcgcgcagcaacggagcccagtcggggttcgattcccccaccatcggcaggatgtaggagtcaatcagcgattggaggaacagcgcggatccggcctgcgcggcggcaccgatcaggatgcacactacgatggcgataacgcgcaatttgtattggaagatgtagctgaagatgcgcttgatggttccggggtcggctttgcccatgtcaggcttgcgattcttgaaactctggtcgttgctcatcgtgcttctccttccttggtatcggctgcattggtatcagctgcgctggtatcggccgtgggcatggtcactgtcaccgtcacggtttcggacggctcagcggtagatggctcagcagcctgtccggcagcggccagttcttcgggcttagcctggctcttggtctgggattcgtaaatggaacggtattcgtcgcaagtggtgagcagttcctcgtgcgtgccggaggccatgatacggccggaatccatgacaagaatcatgtcggattcctgcacggaggccacgcgctgggcgatgatgatcttcgtggtgtccgggatctcgttgtggaatgcggcgcggatcagcttgtccgtcttggtatcgacggcgctggtcgaatcgtcgaggatcagaatcttcggcttcttcagcagcgcacgggcgatgcacaggcgctggcgctgtccgccggacacattggtaccgccctgctcgatgtacgtgtcgtacttgtcggggaattcctgaacgaatccatcggcctgcgcgagctgcgcggcatggcgaatctcttcatcggtggcgttcgggttgccccagcgcaggttttcggcaatagtgccggagaacagcacgttcttctgcaacaccatggccacctgatcgcgcagcgcctcgatgtcatagtcgcgcacgtccacgccgccgaccttgagcgagccagagctcacgtcgtacagtcgcggcaccagctgcaccaaagacgactttgccgaaccagtaccgccgacgatgccgatggtcatgccggaacgaatcttcaggttgatgtcgtcaagcacgggcttttcggaactgtcggagtagcggaaggtgacgtggtcgaattcgatggagccgtcggccatgtcagtcaccgggtgagccgggttctgcaccgtgctttcctcctgcagcacctggcagatacgctcggcagaagcctgagaaataatcaccatgacgaaaatcatggacagcatcatcatggccataagaatctgcatggcataggtgaccagcgaagtcagctcgccggtggacaggcccaacgccgcattattgccggaagcgacgatctgctgcgcgcccatccatgcgatgagaatcatcgaggcgtagacgcacaccatcatgatcggcatgttgaagctcatgatgcgttcggccttggtgaagtccttgaagatgcgctgggagatgcggccgaacttggagacctcgaaggattcgcggttataggacttgaccacgcggatgccctgcaggttctcatcgaccacgttgttcaacgcatcgtaggtgtgaaacacgcgctcgaacacggggtgcacgagcacgaccagaccgcacaggccgatggccaggatcgggatgcaggccaggaacaccatggaaatcgacggagagatgcggaacgaaaacagccaggctacgaccaccatgatcggggcacgcacgcccagacgaatgatcatcatgtaggcgttctgcaggttcgtcacgtcggtggtcagtcgggtcacgatcgaaccggtggagaaccggtcgatgttggtgaagctgaagccctgcaccttctcgaactggtccttgcgcaggttcttggcgaagcccgcgccggccacggccgcgtactttccggacaggaagccggcacccagcgaaaccatcgcgcacatcagcagaatcacgccgaacttgacggtggccggcatgctgccaccggtgataccctcatcgatcagcgaagccatgatggtcggaatcaggatttccagaataccttcgaccgccacgaacaccggagccaggatgctggctttcttgtattcacgaatcgaatggcccagcgtgcgcagtacatgtttgggcttgtccggttcgacggctttgcgcgcctgcgcgattgcctctgcggtatcgctcattcgttctcctccttcgtgtcagcaacctccgctccgtcttgatcgggagccatcaccacaggtgactgagggagcgtttgatgttcaaattcataatcaagagacccatatacaacagttgtacatacaacaatcagcgtgttgtagtatttccggctcttccgattttggcgtgtaagggcatgtgtcagaggtgggtttggatggcgtgtctgaagccgccggcgtgcagcaggcttctggtgatggtggcgtcgaggttgcggaagcccagggccatgcccctgagggtctcgagccttccgctacggcaggtccttacgttcgaacacccacatggtctcgtccgtggatctgttgtcggtaagaatcgtcaacatgaaccgctcaccgtcgttcttcacgtaaccgcattgcactgcaccttccgacttgagccggctacggacgacatcgtagtcaagcagtcgcaggagaccttcttgatattcgggagcaatcctcacataacaaaactcacgtaatgcttcgcggaaggaaccgccatgaccatcaagcatacgctgaaagaaatcgggcaccatgatcgaacgctgcgtatcggtattcagattgactataaatgacaccggataacgtacattcagatgt

SEQ ID NO: 16 - DNA, 65150 bp, Unknown
  R30_18m  MAG No. k141_3866
aatgccagcaatgctgaacattccgatgacatgcccaccgtgccgattcccgcacgcaaggctgccacgacgttcgacaccccctccaagcgtgagcgcatcgaggtcaagccgccgatcacccgattcatacgtcgtgccatcacccgcgtgttcggcgtatggtcacacatctccactcaggtggtgcgccaatggggctggtatccgcgagtggaaccctatgtgggttatggcaccggcgattactcgcgcctgatctgccgcacggtatacgcccccaagcacgcgcaatccggcgaactgatccgcggcatccgcggcatgcttgccgtgtccgcgccgcgcacccacgtgcaggccagcattgatgacacgccgctcaacaccgtgcagatcggcgtctccgaggtctatgacaaggtggaccgcacgcgcgatctcggcagcgaatacgccatctccgattccgccggatacctcgacctcgtggccgagcatcgtctggtgcccggcatccatcgcgtctcctacagcgtggccaaccgcaaacccgtgagcgccaacctgtacaccatccccgccagtgccaaagtcggcatcatctccgatgtggacgacaccatcatgatcacacaggccccggtgccatggaaggccgcgtacaacctgctgttcctcgaccccaagaagaaagcctccgtgccgggcatgagcgtgctgttcacccgcatcgccgacttgttccccggcgcaccgttcttctatctttcgacatcgccctggaatgtggagagttcgatccgcaacttcatcactgaccatggttttcccgaaggcccgctgctgctgcgcgacctcgacccgaggcccaagaccttcgtgcccaccggcccccagcacaaacttgagtttgccgaacaacttatggccgacttcccggacatgaagttcattctggtgggcgatgacgggcagaaggacccgaccacgtacgccaccatcgcccgcagatatcccggacgtgtactggcgatcgtcattcgtgagttgagcccgcgcgaatcaaccggattggcgtcggtgacgggactcacctcgacccagccgactccggtaaccgatgtaccagtattcaccggcaccaccggctcgaacattctgaagaccatgctgccgtatctgaagacggtgttgcgataagcgcggcgtgatgaacgccgaatgcgtcccggtgtggtgcctcgcctataatcgcgtggtatgactgacgagagcacaaacgccgcggccgcgatgccgccttacgccaagcgcgagccgaagcgccgcgaattccacggtgacgttttcgacgacgattacgagtggatgcgagacaaagactccgatgatgtgcgcagctacgtagctgccgaaaaccagtactgcgagcgtcgcatggcgcatctggcggatttccggcatacgttgtttgaagagctgaaatcgcatgtggaagagaccgatatgtctgttcccacgcgcgtcaatgattactggtacttcacccgcacgcagcagggcaaacagtatggcgtgcaatgccgcatccccgtgcgcgatgccgatgactgggacccgccggtcgtggatccgcaaggcgcgcccggctccatgcccggtgaacaggtcgtttttgatgcgaacaaggaatccgaggggcatgacttcttccggctcggcggcttggatctgagcaaggacggccgttggatgctgtacggcgtggatgttgcgggagacgaacgatatgatttccgcattcgcgaccttgccgggctggagaccggggagccggtcagcgaactgcccgaacagttcaccggcattggcagcgcatgcttcacgccggacggccaatgggtgttctgggtggaattggacgattcctggcggccgctcgccgtgtggcggcatcgtgttggcacggcggtcgaatcggatgtgtgcgtgtaccgagaaaccgatgaacggttctgggtgggcgtcggcatcagttttgatgagcgcaatatcgtgatcggcaccggttccaaaaccaccaccgaagtgttgatgctgccggtggccacgcctgaaggcgaattccaagccttcattccacgtcagaacgatattgaatatgatgtgagctttgcctgttttgaaggcgcgggggagaacggtgcggatgtgccgctcgccgtggtctaccacaacgccgccaatccgaatttcgaaatcgacgtcattgacatgcgtggccatgagccgccgtaccgactcggcgaaggcgtgtgcatcgccgccgggtcgccgtacggctgtgaacatggtgagccggataagccgattaccgaggcatacttcaacgccgccaatccggcgatattgcagggtgcccacggtctgggcatcgaaggcatcgcgttgcatcgcaactttgtgtccctgagctaccgtgccgacggccagccgcacgtggcatacatgaccaagagcgcggctgccgccgacttcctggccggacggccgtggcggtttacggaactgctgccgcctgccctggaggacgactgggacatggtcgccgccgatcgcgaaggcttcaccggcgatcatggcgaaatcttgtggaccgaagatgaggcccccacggatcacacgtcatcttccgatggtgccagcgacgaccacctgcccggtgagacccggcgcttgtacaccatcggcgtcggcggcaacccatcgtatgaggcgccgcgcatgcgctactcgttcgccagctacacccgcccgggcgagctgcacgaaatcgatcccgccaccggtgaagatgcgctgctgaagcgagccaccgtgttgggcgacttcaatccacgcgattacatggaacgccgtgtgtggattaccgcgcgcgacggcgaacgcattcctgtttccctcgtctggcaccgcgattgcccggcgcaggattcgccgatgttcattaccggatatggtgcatacgagatttcctccgatccggggttctcggtctctcgtctgagcatgttggatcgcggtgtgctgtacgccgtgccgcatattcgcggtggcggcgaaatgggacgcgcctggtatgaacaggggcgcagactgaacaagaagcattcctttgaggacttcgtggacgccacacgcgcgctgcagaaggcgcatttggctgatgcttggcgcaccgtggccaacggcggatccgctggcggcctgctgatgggcgcgattgccaatatggcacccgaatgctacgccggtgttgaggcggatgtgccgttcgtggacgcgttgacctccattcttgacccggacttgccgttgaccgtcaccgaatgggacgaatggggagacccgttgcatgaccctgaggtgtatcagtacatgaagtcgtacacgccatacgagaatgtgccggtggccgtgctcgagggcggcgacgacgaggctgccggtgacggcagtgctgatggggctgccgccggcgcgctcgccgccgcgcaattcccgagaatcttcatcaccacctcgatgaacgacacccgcgtgctgtacgtcgagccgctcaaatggctggctcgtctgcagtccgccggcgtggacgcggtggccaagatcgaggtcgaggccggtcacggcggtctatccgggcgttacaaacaatgggaagaggtttcctatgagaacgcttggtgcatggatgtgatggggctcgctcattaggtcatttcgtcgttcattaggtcggtgtcctcttctgtgtgagactgaaatgccgccatttcagtccctgaaatgaacccacaccgacctaatgaacactaaaatgacctaatgaatgtctcgacacgatacgcatgttggttgtgtccactagctgagcgggttcgggccggcaggtggtcgcgcgagtaggctccttgaactatggcaaagacatataaaatcgccgttattcccggcgacggtattggcaaggaagtcactccgtgggctcagaaggctttggaaaaggccgctgaaggcgtagctgacttcgagtacgagaacttcgatctgggtgccgagcgttatctgcgcgatggtgcgatcctgcccgaggacgaagaggagcgcatcaaggccaacgacgcgattctgctcggcgccgtgggcgatccgcgcatcaaggccggcattctggaacgcggcctgctgctcaagctgcgcttcgacctcgaccagtacgtgaacctgcgtccctccaagctgtacaagggcgtcacctcgccgctcgccaaccccggcgacatcgacttcgtggtggtgcgtgaaggcaccgaaggtctgtactgcggcgccggcggcgcggtgcgccgcaacaccccgcaggaggtggccaccgaggtgtccatcaacaccgcatacggtgtggagcgtgtggtgcgttacgccttcaagctcgctatgaagcgcaagaagcacgtcaccctggtgcacaagaagaacgtgctcgtcaacgccggtgatatgtggcaacgcatcgtcgacaaggtcggcgaggaataccctgaggtcacccacgactaccagcacatcgatgcggccaccatcttcctggtctccgacccgagccgtttcgatgtgattctcacagacaacctcttcggcgacattctgaccgatgaggccggctccgtggtgggcggcgtgggctactccgcctccggctgcatcaacgcctccgacgagttcccgtccatgttcgagccgattcacggttccgctccggacatcgccggtcagaacaaggccaacccgaccgccgccatcctctccgccgccatgctgctcgagcatctcggctttgatgatgcggccaagaagattcacaccgccgtcgaagcggacatcgaggagctcggctccaccgtgcgctccaccgaccaggtcggcaaggacattctggcccgcatgtgatgtcccacttggctcccctccagaggggagccaagtttatactgagttgcatgcaaatgcgacatggggaatgcaaaaccgttggcggcaaactagtcgccgtgaccgtatccgtcgatgatgacggcaccgcacagtcatgccatatcagcggtgatttctttattgaatcagtttcggatgccgaatctcatgctttgttgcgtgacttggaacaggctctaattagtgatgattcattgcggtccgtattggacgctcaccctagttgccaaattatcggcacagatgaaattgccatcaaaaccgcatacagccgagccgtaagcagcaacttgcccccgctggcgggggctcctgcgcagcgggtgggggtggtcagccccgatgcatcgaacaccccggcatccatcaatacacaaaccaagcagcccgacaaaagctctgaataccgggagcgctggaacgccctcagacctcaactcaccgtgatccacgaccatccgcgtactccggacgagcaaatggccattgacgagacctgggcgcgtgaagtcgcagcaggaacacgacagccgaccatacggttctgggagtgggcgggcccggctgtggtcatcggccgtttccaatcggcccaggacgaggtgaatctggacattgccgagcagctcggtttcgacgtggtgcgccgttgcacgggtggtggcgcgatgtttatcgaaccgggcaacaccattacctattctctgtatgcaccgctcgatttcgttcagggcgtaagcatcgaagaatcctaccggctctgtgactggtggctggtcgaagcgctgcgcgaacttggcttggatgtgcggttcgcgggcctcaatgatatcgcctcgcagtacggcaagatcgggggagcggcgcaacggcgcttccccgtaggctcaggcggcgcggtgctgcaccatgtgaccatggcatatgacatcgatgcggccaagatgagccgtgtgctcaacaccagtcgcgagaagatgtcagacaaagcggtgaaatcagcagtcaaacgcgtggacccgatgaaaagccagacgggtctcagccgcgaacacatcgtcgaacaccttattgactggtttgcggcgtgatttcaccgatggccgtatacgattttgccggtggccgtgcgtggttttgtcatgggcgagcgcggtaaccgcgacagtgccgtttttcgcggtaacacattcgtcagcatgtcgtacggctatcggatcgcgccacacatgaagtgacgaatgatggcatgcttctgacgaaacctgtggggcgcgttacaatatgacggatggccgacgacggtcgtaggacaataaggatggtgcgatgagcttggaaacgccaaacgcttttgctgacgaggagaacatcctgctgcatacggcattgttcaagcaggtatcgccagccgaagccgaggagctgctgccgcatttgaagcgtgcgaccttcgataagggcgactatatcttctccgaaggcgataccgatcagcgcatgtatctactggagcaggggcgcgtcaagctgattcgcacttcttccgatgaccgcgtgcagctgctgtccatccacgcgccgggcgaagtgcttggcgagattccggtattcgaccctcatggtggcccgcgcaccgcgtccgcggtgtccatgagccatggcacgcgcgtggtctggctggagcatgatgccctgttcgcatggcttgatgagcatccgcgtgtggccatcgacatgttgcaggtcatggccaaccgccagcgcggcaacaacgaacgcatctccgacttggtattcatggatgtgccggcgcgtctggccaagacattgctcaacttgggctcacgtttcggcgagccggtggaacagggcctcaaagtgccgcatgacctgactcaggaagagctggcccaactggtgggctccagtcgtgagaccgtgaacaaggcgttgatggacttttccaaccgcggatggatcgcacgtgacggtcgatcgatcatcatcttccagccaggcatgctgattcgacgctcgcggcgctgaccgttcggctgacttccagccaatgttacgctagtgcggttcttgtgatgatatgttcacgggagctgaccgcgagcccggttggtagggcaccccatttagaatggggcccatgcccaaaaagaagtccctcactctccaacgtgtgcttgttctcctcttggcctatatcatgcttgccgtctgcggtggcgtggcggccagcgtgttgtttgtaccgggtgtggtcggtgccaataaagccgccaaagcggtgattccgtcgctcaaggtagaaaacgtggacttcgacgtgaccggtctgccccagaagtcgacgatgtacgcgcgagacggttccaccgttatcgcgacgttctacaaccaaaaccgtatcgtcgtgccgctgaagaagatttccaaaaccatgcagcaggcagtggtggcgcgcgaggaccgtcgattctggactcacgccggcgtcgacgtgcaaggcgtgatgcgtgcgttcgtgcagacctacctcgtcaaaggctcccagcagggtggttcgtcgctgacccagcagtacgtcaagaacgtgctgctcatgcaggcgatcgaggacgacgacccgatcgcccagtaccatgccaccgaagacaccgtcgcccgtaagattcgcgagatgctgatctccgtgcagatggagaagaagtattccaaggccgagattctgcagggctatctgaacatcgcccagttcggcaacaacctgtatggcgtggaaaccgcagcccagcgctacttcagcgtgtccgccgccgatttgaacgtggtgcagtccgccaccatcgcggctatcaccaagaacccgagccagtacgatccgctggtcgaggagaaccagaaggaaagcgagaaccagcgcaatatcgtgctcaagctgatgctgcaggaggggtacatcacccagaagcagtacaccgaagccgtgaacacgccgctgaaggacacgctgaaggtgcaggccgtgaacgtcggctgccaggacaccggcgactacgcatacttctgtgatttcgtggtgcatcgcatccagaactccgaagaattcggcaagactcgtgcggagcgtaacaagctgctgcaggagggtggcctgaagatcgtcaccacgttggatgtggaagcgaattccacgatgatggagaccgcgcgtaataccattccaccggacgatcccagcggcatggaaatagccatggccgcagtcaaaccgggaaccggcgaggtgctgagctttggcctgaatcgttactatgacgccactccggcagccgcgaacgatccgaccaagtcgggccagaactatgccgtcgatctggtggacggcggcggctccggttggaccattggttcgtcttggaagccgatcaacctgattgcgtggatggaggcgggtcattcgatcaacgacaacctacagaccaccacgacgtaccccacgaccgacttcgcctgcaacaactacaagggcggtgccgattcgtggaacgtgtcgaacgccatgggcgccggcacggtgaacccggaaagcccgttcctcggtctggtgcgatcgcacaacaccacccaggcctccatgggcgccatcctcaaactgtgcaaggtggcggacaccgcgaccaaactgggataccatgacgccgccacgggtgagaccatcgacaaaacccaggtgtatacaccatccatgatgatcggctcggtgaatgtgtccccgctgaccatggcgagcatcttcgccgtatacgcctcgaatggtgtgcaatgcaacccgattgccatcagcaaggtgaccgataaggacggcaacgatctcaaggttccatccgcgaactgccatcaggcggtggataaggacatcatccaaacactcgcttataccctgaaccaaggtacggtgcggccggatggtgccggttggtcattcagattggctgacgggcgtaagtcgtttggtaagaccggtaccagtgaggatcttgcggtgtccggtggatcgttcattcctaatcagattgcggcgttcgctgtggtcggcgatgcacagaacccgtacaccaaccgtatttccaacattgccatcaacggccggtacaacagctattgggatggttcgacaatcgcagctccggccgttaccaacttcttcaatagctacatttccaagaagaaaataccgattgacaacgattacggccagcccgtctcgaagtacaccacgactggcaagtacctgggcattggcggacgaacgttcagcgtgccgcagaccactacgaatggcaacagccaatcgcagacgaccaccaatggtcaatcccagtcgcagtctcagtcgcagaacactgggcaaaacaacacccaaacccagggcaccaattcagagcggtcgaatgatggccagtgattggtgattggcgtttgacatttggtgattgcaggccggctgagtctacgtaacatagtcgactgcgatacccaaattacgtagtttgcgggcgttacctgtttcaggtgacgcccgttttacaatacttaatgacaacgccagcgcgttcatcgaatattcgccatgaacgcgcattggaaaggggaacgatgagcgacgacgatctgacgcatgagaattttgattttcgtggattcgacgtgccggatctcaaagcggtgacgctggcttcgtcttcggacggcgaacagtccaagcagccgaagaccaagcacgaggatgcatcgaggaaccgtaggcacggtaagaagaagtcaaaatccgacgcacggtccaagaagcgggccggcgcgggcaagacgagcgaatcgttcgatgattatgaggattatgaggaaagggaagctgtgagcaaggcagataagaaagccagcaaggaccgtccgggactgtttgcgccaatgacgctgcgcgaagtgaccgtgcgtaatcgtatttggttgccgccgatgtgcacgtgttcgtcgttcgcctgcgatggtaggcccacgccgttccactaccagcattacgtgtctcgtgcgttcggcggattcggcatggtgatcgtcgaatccaccgccgtggctcctgaagggcgtatcacgccgtgcgatctgggcctgtgggaagacgggcagattgatgcttggcgctggatcgtggacggtattcgcgaggcgggtgcggtgcctgccatccagctcaaccatgcggggcgtaaggcttcgaccggttgcttcgccgttggttacgacggtcagagtgtgccggaggaggcgggcggctggcccaccatggcaccgtctgaaatcgcgttcggcgggctgcgtacgccgcgcgcgctgtccgtggatgagattcatggtctggtcggtgcgttcgccgcggcggcgggccgtgcggtggccgccggattccaggctattcagattcatgctgcgcatggctatctgatttctcagttccttgacccgctgagcaatgagcgtgatgacgaatatggtggcgatttgaccggtcgctctcgtttcctggtcgaggttgtggatgccgtgcgcggggccgtccccgagggcgtgccggttctggtgcgcatttcggccacggattgggccgctggcggttgggatttggatcagaccattgcactatccaaggtgctgaaggagcatggcgtcgatgtgatggacgtgtccactggcggcatcatgtcgggagtgtcgattccggtcaagccgaactatcaggtgccgttcgccgagcaggtcaagtccaaggccgatattccggtgaccgcggtgggtcttatcaccaagccgaagcaggcggccaagattttggcccgtggcgaagccgatgccgtggaaattggccgcgccgcattgcgcgatccgtactggccgttgcgtgcggccaacaagctgggcataccgtccacagaggtcccctacgccccgcaatacgtggccggtgcgtactgaatcctcatggggcggtgactttcccatggggcggtaaaaccctcatggggcggtaacccaaaacggcggtattctgcggaatgtgaaatttggctaaccgccccatgggacaatcaccgccccatgagggttttaccgccccatgggtaatagggcaatatgtgagttcactccacgtccacgccgacggcgtcggagacgtgctcgaatccgtcgcggcgcagcagctgggccagaccgcgcttcaacacggtgatctgctgcgggcctcggtacatcagcgagctgatgaacatgaccaggctggagccggaacgaatcttcgcataggcttgctcgggggtaaagacgccaccgatgccggcgatggcgaaccggtcgccatactccttatacaccttgcgaatcagctcggtgctggcgttggtgcacgggccgccggacaggccgccctcccaatcgcgcggaatctcgaggccggtgcggtccttctgcagattggcgatggacagcccctgcacattgtgctcggccagcacatcgagcagctccttgtactcgccccacggcttgttcaacggcatcttgaccagcgtgggctgcgggcggtcgatcttgtcgagcgccgtaaacagacggtcgagcgcttccggagtcgcggtgaacggttcgccgacgtgcgtgttcgggcaggagacgttgacctccaccatcgcggtgcggccggcggcgcggcgcatcgaaatgcagtaatcctcaatgccttcgtccaaatcgccgcactggtcgtcgttggtgcgggcgatcgacacagacagctgcatctggcgggcctgagtccaagccttctcggcgcgctcgatgaccttgtccgaaccgatgttggcgaggccgacgtgcaccatcatcgaatcgtattcaggcagacggtggaaccacggcttggcgttgcccgggcagggacgcgaggtggtggagcctacggtttcaaaaccgaagccggcatggtccagcaccacgggcatgtcgcagttcttgtcgaggccggcggacaggccgaacgggttggtgaaatcgacgcccatcacattcgtttccagaatggggtcggtgtagtcgagcatcagctgctcggcgagcagcagcggcgggacgttcttgacgacgtggcagaactcgatcatctgatcgtgtgcctcatcggggcggtggttgaacacgaagttcggtttgatgatgtgcttgtagccgaaggtgaacagatcggtggtggctttgttgacggcgtcgtgccagaagctttcagaaacgtaagtcataccgcctattgtctcacgcttgggctggtgcggctaggcgattcctgcctaggcgaattggggaaggggctaccgcgtgtcgaggcgcacgcaggcgtcggctcggcagaagatacatgaatcgggatgcaccaggtatcaggcgtgactcgccgctgagcaacgcgctcgggagagtcgtcggtcgtgagtcatcgcgctagtggtcgctgcgagaatatcggttcgcacaatgtgcgattttgcgcggttttgtggaaatgaacacctgaattgcccggaattttcgagagattgtccccaaaacgctcaagccggtttggtttgtgagcttttgtgtgcgataatgttcacatgatttcgtcacaacgtcagcacctcatcttgagcaggttgcgcacgcgcggggcagtgcgcattacggcgctatcgaaggaactgggtgtgtcagcgatgaccatccgccgcgatatcgccgaacttgccgacaagggactgctgaagcgcgtccatggcggcgcggtgactaccagtaccttgctcagcgaacccctgttctctgtcaagtcccagatggatctcggcctgaaggacgccatcgcccaggaagccatcaaatatgtggctcccggcgatgtgatcgccatcggcggcggcaccacggcctatgtcttcgcccagcatctgctcgaatcgcagcagtccagcggcatcaccatcctcaccaattcgattcccgtggccgaactggtccaggccctcgaatccaaggacgtggaggtgatcgtcaccggcggcgtgatcacccgatcgaactcgcttgtcggtccgatcgcggacaaggtcgtcgcctcgctgcgtgtcaacaccgtattcctcggcacccactcggtgtcgattccccgtggcttcctgatgccgaattcgctggaagccgcaaccgatatggcgatgatggacatcgccgatcgtaccatagttttgaccgatcacaccaagtggagctgcacatcgctgtcgctgtttgcgcgcttcgaccaggtggacacggtcattactgacgacgggctcgatcccgactccgccgccaaaaccaaggatttggtaaaggaactcgtgctggcccaccagagcgagatcattgaggaaagtgagtaaacccatggctgatttcgccaactacacccccggggagtatgcgaaggagcacatccgcatcacgccgacgacgcttgccgacggtcgtgacttcttctacctggacgacgaccccgagttcgtctccggtgccaagacccgcgagctcaaggacccgcgcccgctggactaccgtttcgccccgcacctggacgccgacggcaacgaagtgccgtacgccgccccgcagatgcgccgcgacccgctgaccggcgactggatcccgatggccaccgcccgtatgaaccgcccgatcaccgccggccccggcgctaccgccaagggcaacccgctggccgcccgcaagcccggtgacccgtaccaggacggcgaagtgccggacaccgactacaacgtcgtcgtgttcgagaaccgcttcccctccatggtgcgcgtgcccggcgtctccgaggacgtgacctacgttgacggcaacccgctgtgggagaagaagctcgccgccggccgctgcgaggtcatctgcttcgacccgaacgaggacggcctgccggccgatctgccggtctcccgcctgcgcaccgtggttgaggcttgggccttccgtaccgccgaaatctccaagatggaaggcatcgagcagatcttcccgttcgagaaccacggccaggaaatcggcgtctccctcgctcacccgcacggccaggtctactgctacccgttcatcgccccgaagatggagaaggaactccagcacaccgaggcctaccacgagaagaccggcggcaacctgcttaaggacatcatgaacgccgagctcgaagccggcgaacgcatcgtgatgcgcaaccacagctgggtcgcctacgtgccggccgccgcccgttggcccctcgaggtccacgtggctccggtgcgcgacgtgctcaccctcgaccagctcaacgacgaagaacgctgggaccttgcctccatgtactcgcacctcctgaagcgcggcaacgccttcttcgacaagggcgacggcaagggcatggatctgccgtacatcgccgcctggcaccaggccccgatccacgacgcccgccgcgagaactaccgcctgaacctgcagttcttctccttccgtcgtgccgccaacaagatcaagtacctcgctggctccgaatccggcatggccgcctggatctccgacaccacgccggaactcatcgccaagcgcttccacgagctcggctccatcgacatcgccgactgatagaaagaaaacatcaatgactgctgttgaattcattgagccgctgacccatgaggaaggcgtctcgcaagccaccaagctgttcgtcgatacctacggcgctgcgcccgagggcgtgtgggctgctccgggccgtgtgaacctgatcggtgagcacaccgattacaacgccggcctgtgcctgccgatcgctctgccgcaccgcactttcatcgccctgaagccgcgcgaagacaccaaggttcgcgtcgtctccgacgtggctcccgacaaggtcgccgaagctgatctcgatggcctcaaggcccgtggcgtggacggctggtccgcctacccgaccggtgtggcctgggcgctgcgtcaggctggtttcgacaaggtcaagggctttgacgccgccttcgtctcctgcgtgccgctgggctccggcctgagctcctccgccgccatgacctgctccaccgctctggctctggacgacgtgtacggccttggctacggcgattccgacgccggccgtgtgaccctcatcaacgccgccatcaagtccgagaacgagatggccggtgcctccaccggcggtcttgaccagaacgcttccatgcgttgcaccgaaggccacgcgctgctgcttgactgccgctcggagctgaccccgctggagaacgtctcccagcaggagttcgacctcgacaagtacaacctcgagctgcttgtggtcgatacccaggctccgcaccagctcaacgatggccagtacgctcagcgtcgcgccacctgcgaggaagccgccaagattcttggtgtagccaacctgcgtgtgaccgccgacggcatctccaaggccgatgaccagttccaggccctcaaggaaacgcttgacgccctgcctgacgagaccatgaagaagcgcgtgcgccacgtcgtcaccgaaatcgagcgcgtgcgttccttcgtgcgtgccttcgctcagggcgacatcaaggctgcgggccgtctgttcaacgcttcccacgattcgctggccgccgactacgaggtcaccgtccccgagctggacatcgccgtggacgtggcccgcaagaacggcgcctacggtgcgcgtatgaccggcggcggcttcggcggctccatcatcgctctggttgataagggccgttctcaggaagtcgctcagaagatcgccgacgaattcgaaaatcaaggcttccacgcaccgcgcgccctggccgcgtacgcagcgccgagcgcttcgcgcgaggcctaggacaacccggtgggttgtccggcggatgcggtcgaggtcgagccaataggcgaggccgaggtaatgctgggtcggccgtaggtcgtccgtaattgcaggaccgcgtgcgcagcgccgagcgctttgcgcgaggcctgagccattgcaagctccctctgacgagggagcttcgttttatcccgcaccaccaccatgcccgccggcgcatccggcaccacttattcccataacccccataacgctcctgaaaccaggcatttcgaccatccgcataaggtgatgctcggcctgtacatcggcgcattcctcggcatactgtccgagacatccatgaacatcgccctgcccgatttgatggacgagttctccgtatcctccggtaccgcccagtggatggtcgtcggctgcatactggccattggcgtggtgatgaccgcgatcggcggcgcactgttctttaccatcggcgtcaactcgggcgttgtgctggtgttctccttcatgttcaagggcggcaaacgatacatgaatcggtaatgaacataatggcgggtgtcttccctataattgggtagtcacccgctttttgtatacgaccagggagagccatgaacaaggcaatcatcaccgtcgtcggtcaggacaccgtcggcatcatcgcgcgagtctgcacctacctgtcccagcacaacgtcaacgtgcttgacatttcccagaccatcatcgacggttacttcaacatgatgatgattgtcgactacgccaacgcggacaaggacttcggcgcgatggtcggcaaccttgaggacctcggcgacgacatcggcgtgcgcatccgctgccagcgtgaggaaatcttcaccaagatgcaccgtatttgaggcggcccgctcagcaggccgccgcacgcgaggaggcggaaagcccggtgggctttccgctgacggagccatccttatccctctgatgagggtgaccgccaaactagtctttaaatatcctgtaaggaacaaaccatgctgaacatcatggaggtccacgagaccaatcagatgatcgagcaggagaagctcgacgtccgcaccatcaccatgggcatctcgttgctcgactgcgcctcggacgacgtcgacaagacctgcgacaacatctaccgcaagatcactacctatgccaaggacctcgtttccaccggcaaggccatcgaacgcgactacggcatcccgatcgtcaacaagcgcatcaccgtcaccccgatctcgctggtcggtgccagctcctgcaagacgagcgaggacttcgtcaagatcgcccacgcgcttgacaaggcggccaaggaggtcggcgtcgacctgatcggcggctactccgcactcgtctccaagtccatgaccccggccgaggagttgctcatccgctccctgccgcaagccctttccgagaccgacatcgtctgctcgtccgtgaacgtcggttccaccaagaccggcatcgacatgaacgcggtcgaactgctcggccacatcatcaaggacgttgccgagcgcaccgccgacaacgactcctacggctgcgtcaagttcgtggccttctgcaacgtgcctgacgacaacccgttcatggcaggcggcttccatggcgtgaccgaaggcgacgcggtgattaatgtcggcgtttccggcccgggtgtggtctcccgtgcattggacgaggccaagggcaaggatttcgagttcctgtgcgagaccatcaagcgcaccgcgttcaagatcacgcgcgtgggtcagcttgtggctcaggaggcttcccgccgcctcggcatcccgttcggcatcatcgacctgtcgctcgccccgaccccggccgtgggcgactccgtgggtgaagtgcttgagaagatcggcctcgaacaggttggcgcaccgggcactaccgcggcgctcgccatgctcaacgaccaggtgaagaagggcggcattatggcgtcctcctacgtgggcggcctgtctggtgcgttcatcccggtctccgaagacaagaacatgatcgacgcggcaaccaatggctgcctgaagatcgaaaagcttgaggccatgacctgcgtgtgctccgtcggcctcgacatgattgccattccgggagacaccaccgcagccaccatttccggcatcatcgccgacgaggccgcgatcggcatggtcaaccagaagaccaccgccgtgcgcgtgattccggtggaaggcaaaggcgtaggggagatggccaacttcggcggcctgatgggctatgcgccgatcattccggtgaaccagaccagctgcgaggccttcgtgacccgtggcggccgaatccctgcgccgattcacagcttcaagaattgattcggtagggtatctgctttcagagaggtacatttggcccctcgcggagagctatctgctttcaaagaggtacctatatgcggaaaccccgggtatgagcgttggaatatcaacactcatacccggggtttctcgattgcggtacctctttgaaggcagatagcattctgcaaacgctcgaatgtacctctttaaaggcagataccagctcgaattacctttctggaggtctattcccgtttcgaggggctgattccgacctttctggaggtctacttccgtttcgaggggctggtatatatgaagaccccgagtacaagcattgatatttcaacggccatactcggggtctcgtcctttgacagccccttgaagcggcagtagacctccggcggatgccaaatccgcccctcgaaacgcaggtagccttatattcagcgttcatcactgcgcgaagctcagtgtttccgctctcgcgcctgtcggcgttcgttcggcgtcgctactcgaaggcccaccgggccttctcctcacgctccgcccgcaaaattgagctggcgccaggcttcgtagatggcgatggatgcgcagttggtgaggttcagggaacgcagggatgggcgcatgggcagccgcacttgttcggccacatgagggccctccatgatgtccatcgggtcggggatgtcgccgggctcggggccgaacagcaggatgtcagtcggcttgtattccacctcggtgtagagcttggtggcgtgtgcggtgaacgcgatgatgcgcgaattgggcatcgactccaccagattgtcgaaattcgggtgcaacaccacgtgggccatgtcatggtagtcgaggcccgcacggcgcagcttggtgtcgcgcaggttgaagcccagcggctccaccagatgcagaatcgtgccggtcactgcgcacaggcggatggccgaaccggtgttgccgggaatacgcggcgagtaatagcacaggtgcggcgtcacggtttcggtggcggcggccttctcggcggaaagcatcgcgtccaccacggagatggggttgccgtgtgcgtcggtcaccagctcgtccggcccgtaattcgacttgcgatagccgtattcgaacattttctcgactttggtttcgggattggctggattcggtgtgctctgggggttgtgttttgcctcgttcgtcatagctgctaagaataagaacgatgaacgacacagcaatttctttgcgattgggagcatggtgggaggccaatgcgcgtgacttgccatggcgcttcggacgggccacgccgtggggcgtgctggtcagtgaggtgatgagccagcagacgcagatgagtcgtgtggtgccgtattggaacgattggatggcacgctggcccgacgcccgctcactcgccgaggcccccaaggccgaggtgatcaccgcatggggccggcttggctatcctcgccgtgcattgcgcttgcaggaatgtgcccgcgtggtggccgagcagtacgccgacaaactgccgcgtacgtatgacgaactcactgcattgcccggcatcggcgattacaccgcctccgcggtgctgagctttgcgttcggcgaacgaatcgccgtgatcgataccaacatccgccgcgtgctgagccgtgtgttccttggcgtcgaatcgcgcgggggagcggccagcccggccgaacgcgcgctggcgaaccgcatgctgcccaaagacgagattctcgggcgcgatgctgacgtcgccgataatgccggtagcgccgaacataccgtgaacggcactatccgtggcggcaaacgctcccgactgcatcgtggcgaacgcccatcggtcacatggaaccagtcggtaatggaactgggggcggtgatctgcacggccaagacgccgttatgcgagatttgcccgattgccgacgattgcgcgttcctcaaggccggccgccccggactgggggagcgtcgcacccgcccacgccaacgattccaaggcacggatcgacaggtgcgcggtctggtgctcgccgcgctgcgcgagcttcccgctggagtcacgttgcccagggaagatgccgacaagctttggaaggaccagattcagcttgccgcctgcatcgccagccttgacgatgacggcctgatcgagattctggacggcggcctgcgattacccagctgacattgtgaaaaatggtgggctccccaagcgtgtatgggtgtggtgaccgtagactggaagggttatggcagtgcagaggaacacatcaggcgcgagaacggcacgcggagccggcaccggggacaatgggccatccggcgggcccgcccgaaacgaccgttccggcaagccgcgcaagcgcaggatcagcaaaaagcagcaggccatctatcgtcgtcggcgtatcgtggccggcacggtgttgctgctgataatcgcgctgattgtattctgcgtgtacagccttggccggggtatcggtgccgtgaacacgatgattcaccatgacgaggtgtatgcgatttcccgcgacgccacgccggctccgaagaaagtcagcaacgtcaaggattgctcggccagtgatgtgacattgcagctttccgcggcctcccaatccgtgccggtaggaggatcgcttgatttcaccgcgaccatcgtgcacgaggggtcaggcaactgtttggtggacgggtccgattccggccgtgtgctcaccattacttccggtcaggaaacgatttacaagtccgatgtgtgtccggcggattcacgtctgctgctgatgtccaagggtgataaggacgttcagaaggtcacgtggaataccaatgcgaacgccacgctcaccgaatgcacggatgagtcgggttgggccaaggtcaatgcgggaacgtacgtggcgcagctgagtttgaaggatcatccgaaggtgaagagcgatccggtgacgtttacggtggggtaggacctgcggttggtgtttggacgctgggtctctccctcagtctcgctccgctcgacagctccctcgtcagcgggagctaaaaatgtcctcgcatatcagtattctgttgactttgcatgaggtgtgtcatattgcgggcatgccgtcgacaatgaagcgtccgcataggcatatggtggccatgccggcgctcccaggggaattaccacatattagcgagcgataaggaacgtccattggctactgagtctacgacgaacaccaccaccatcatcgcacgcgccgaccagcatgacattgatctgcacaaggcgtcggatcgcgtgaacttcggttccatcaaggaacccatcgatgtgccctacctgctgggcgtacagaccgacagcttcgattggctgatcggttccgaccgctggaagaagcgtgtcgaagaggatgaggctaacggcaccaacaccgtggcccacacctccggtctcgacgaggtcttcaacgagatctccccgatcgagaactttgcacagaccatgtccctgaccttctcggacccgtacttcgaggagccgcgccacaccgtgcaggagtgcaaggagaaggattacacctactccgctccgctgtacgtgaacgccgaattcgagaacggcgacaccggcgagatcaagtcccagaccgtgttcatgggcgacttcccgctgcagaccccgcacggcaccttcatcatcggcggtaccgagcgagtcatcgtctcccagctcgtgcgttccccgggcgtctacttcgaccgccagcaggaccgcacctccgacaaggaggtcttcggcgcgaagatcatcccgagccgcggtgcatggctcgagttcgagatcgacaagaaggaccagccgcaggtgcgcgtggaccgcaagcgcaagcagtccgccatcgtgttcctcatggccatcggcatgaccaagtccgagatcgcccaggccttcaaggactacccgctggtgctcgacgccctggagaaggaaaccctcgagacccaggacgaggccctcgtcgacctctaccgcaagattcgtccggccgacaccccgacccccgaggccggcaagaacctgctggactccttctacttcaacaccaagcgctacgatctggcccgcgtcggccgctacaagatcaaccgcaagctgggtgtcgaggccgatttcaacgatcgttccctccaccaggaagacatcatcgccacgatcaagtacctggtggccctgcacgacggtgcggcgaccttcccgggcaagcgcaacggcgaagacgttgacctgcgcgtggacgtcgacgatatcgatcacttcggcaaccgtcgtatccgccaagtcggcgagctgatccagaaccagctgcgtaccggtctgagccgtatggagcgcgtggtgcgcgagcgcatgaccactcaggacgccgaggccatcaccccgcagtccctgatcaacatccgcccggtgaacgccaccatcaaggagttcttcggcacttcccagctctcccagttcatggatcagaacaacccactgtccggtgtgacgaacaagcgtcgtctttccgcactgggccccggcggtctgtcccgcgaccgcgcctccatggaagtgcgcgacgtgcacccgtcccacttcggccgtatgtgcccgatcgagtctcctgaaggcccgaacatcggtctgatcggctccctggcgaccttcggccgcgtcaacccgttcggcttcatcgagaccccgtaccgcaaggtcgtcaacggccacgtgaccgacgaggtcgagtacatgaccgctgaccgtgatctcgaccacgtcatcgcccaggccaaccaggaacttgacgagaacggcaacttcgtctccaagtccgcccttgcccgagtcggcgaggaagaggcagtcgatgtgccggtgagctccgtggattacatggatgtctccccgcgtcagatggtctccctcggtgcctccctgattccgttcctggagcatgatgagggccaccgtgcactgatgggtaccaacatgcagcgtcaggcagtgccgctgatcgaatccgagcgcccactggtgggcaccggctccgaatggcgcgccgccaacgattccggcgacgtcatcaagtccgagaaggacggtgtggtcacctacgtgtccgccgacctgattcgcgtgatgaacgacgacggcaccaccagctcctacaagctggccaagttccagcgttccaaccagaccacctgctacaaccagcgcccgatcatccatgatggcgagcgtgtggaggccggctcggtgctggccgatggtcctgccatccagaagggcgacctggccctgggcaagaacctgctcatcgccttcatgccgtggaacggctacaactacgaggacgccgtgatcatctcccagcgcctcgtgcaggacgacaccctctcctccatccacatcgaggagtacgagatcgacgcccgcgaaaccaagctgggcgccgaagagatcacccgcgacctgccgaacgtcggcgaggacgccgtggccaacctcgacgagcgcggcatcatccgcatcggcgccgaggtcgaggccggcgacatcctggtcggtaaggtcaccccgaagggcgagaccgagctgaccccggaggagcgcctgctgcgcgccatcttcggcgagaagtcccgcgaggtgcgcgacacctccctgcgcgtgccccacggcgagaccggtaccgtcatcggcgtcaaggagatcacccgcgaggatgccgaggaggacggcgacgagctgcccaacggcgtcaaccagatgatccgcgtctacatcgcccagcaccgcaagatcacggtgggcgacaagctctccggccgccacggcaacaagggctgcatctcccgcatcctgccggaagaggacatgccgttcctggccgacggtactccggtcgacatcatgttgaacccgctgggtgtgccttcccgaatgaacctcggtcaggtgctcgaactgcacctcggctggatcgctcactccggttgggatatctcccttgacccgaacatggaagccgagtggaagaagctgattccgtccggtgccgagaaggccgagccgaacaccccggtcgccaccccggtgttcgacggtgtcaagcccgaggtcctgaagggcctgctgtccaccacgctgccgaaccgcgacggcgaccgtctggtcggccccgacggcaaggccaccctgttcgatggccgtaccggtgagccgtacaccaagccgatttccgttggctacatgtacatgctgaagctgcaccacctggtcgacgacaagatccacgcccgctccaccggcccgtactccatgatcacccagcagccgctcggtggtaaggcccagttcggtggccagcgcttcggcgagatggaggtgtgggcccttgaggcctacggtgccgcctacacgctgcacgagatgatgaccaccaaatccgatgacgttgacggccgcgtgcgcgtctacggtgccatcgtcaagggcgataacctgccgccggcaggtatccctgagtcgttcaaggtgctcctgaaggaaatgcagtccctgtccctgaacgtcgaagtgctcaacgccgaaggcgtggccatcgacatgaaggacgaggacgacgatccggccagctccgctgacgacctcggcttcaacattggcgcccgccccgatgcggccgccaaggaagaccagaaggccgaagagcccgaataccagtgatccctcgggctgcatgcggtcaatacgccgcgtgtagctccgccaacgtgaaataaataacgtacagagacctttccggtttgcactacccctcagtcagccttggctgacagctcccctgacaaggggagcttgggaaggtctcaagaacagaaacggattaacaagtgctggacgtcaacgcatttgacaagattcgcatcggccttgccaccgccgatgacatccgtggttggagccacggtgaggtcaagaagcctgaaaccatcaactaccgtacgctgaagcctgagaaggacggtctgttcggcgaacagatcttcggcccgacccgtgactgggagtgcgcctgcggcaagtacaagcgcgtgcgtttcaagggcatcgtctgcgagcgatgcggcgtcgaagtgacccgcagccgcgtgcgccgtgagcgcatgggccacatcgagctcgccgccccggtgacgcacatctggttcttcaaaggtgtgccttcccgcctcggctacctgctgaacgtcaccccgaaggatctggagcgcgtgatctacttcgcctcctacatggtcaccgaggtgaacgaggacgagcgccacaacgatctgcccggcctgcaggacgagttcgattccgagatcaagcgccttgagcagcgccgtgactccgacatcgaagctcgcgccaagaaggtcgaagaggatctcgccgcccttgaggagaccggcgaggccaagggcccggcccgcaccaagctgcgtaacggtgccgagcgcgatatggccgccatccgcacccgctacaacgaccagatcgcccgtgtggacgccgtcttcgacaagttcaagaagctcaagcccggcgacatggtcgacgacgtggacctgtggcgcgagatgcaggaccgctacggcgattacttcgacggctgcatgggcgccgaagccatcaagaagcgcctgcagtccctcgacctggagaccatctccaaggaactgcgcgaggagatcaaggacgcttccgagcagcgtaagaccaaggctctgaagcgcctcaaggtcgtcaacgccttcctgaccaccggcaacaagccggaggccatggtgctcgacgtgatcccggtcatcccgccggacctgcgcccgatggtccagctcgacggtggccgtttcgccacctccgacctcaacgacctgtaccgccgtgtgatcaaccgtaacaaccgtctgaagcgactgatcgagctcggcgcccctgaaatcatgctcaacaacgagaagcgcatgctccaggaagccgtcgactccctgttcgacaacggccgtcgtggtcgcccggtcaccggtgcctccaaccgtccgctgaagtccctgtccgacatgctcaagggtaagcagggtcgtttccgtcagaacctgctcggtaagcgagtcgactactccggccgttccgtgatcgtggtcggcccgtccctgcgcatgcaccagtgcggtctgccgaagccgatggccctcgagctgttcaagccgttcgtcatcaagcgcctcgtggacctgaactacgcgcagaacatgaagtccgccaagcgtctcgtggaccgcggcgacgccgaagtgtggggcgtgctcgaggaggtcatctccgagcaccccgtgctgctcaaccgtgcacctacgctgcaccgtctgggtattcaggcattcgagccgatcctggtggaaggcaaggccatccatctgccgccgctggcctgcgccgccttcaacgccgacttcgatggtgaccagatggcagtccacctgccgctgtccgccgaagcccaggccgaggcccgctcgctgatgatggcttccgacaacatcctgaagccggctgacggtcacaccgtgaccatgccgtcccaggacatgatcctcggtctgtactacctgtccaccgtgctggaaggcgccaagggccagggccgcgtgttctcctcgctggaagaggccgaaatggccctcgaccgccacgagatcgacatgcaggccaaggtgctcatccgcctgcccgagagcttcgtactgccgaagaactgggagcccggcgaggtcaaggtgctcgacccgcgcgaaggtgaggacgaggtcgtcaaggaagagcgcttccacgacggcaccgtgctgttcgccacctcctacggccgcatcctgttcaacgagaccctgccgaccgactacccgttcgtcaacgagcaggtggccaagggccgtctgtccaagatcgtcgacgacatcgccatgcgttactccacccagcaggtggccgccacgctggatgccctgaaggatcttggcttcacccgtgcaccgtggtccggtgtgtccttcgcgttctccgacgtgaacgagccgcccgagcgcgacgagaagatcgccgagtacgaggccaaggccgacaaggtcaacgccaactacgagatgggtctgttgaccgaggaagctcgtcgtcaggaactcatcgacctgtggaccgagtgcaccgccgaggtgtccaaggaagtcgaggagaagttcgacccgacctccaacctggccatcatcgtgcagtccggtgcacgaggcaacatgatgcagatcaaccagatcgcaggtatgcgaggcctcgtggctaacccgaagggtgagatcattcctcgtcctgtgaagtccaactaccgcgacggcctgtccgtgctggagtacttcatctcccagcacggtgcacgtaagggtctggccgataccgcactgcgtaccgcagaatccggttacctgacccgtcgtctggtcgacgtctcccaggatgtcatcgtgcgcgaagaggactgcggcaccaaggccggtctgcccatccgcgtcgccgagcgcgacaacgacggcaacctggtgctcgtcaaggccgccgacggtggcccgtactcccgtctgctcgccgccgacgtcatcgacccggccgacggacagaccgtgctgtacaagcgcgacgacgccctgtccatggacgtgctcaacgacctcgtggcccacggtgtcgaggaagtcaagtgccgttccgtgctgacctgcgagtccaagcgcggtgtgtgcgccaagtgctatggctggtccctggccaccaacaagctggtcgatgtcggcgagaccgtcggtatcgtcgccgcccagtccatcggtgagcctggtacccagctgacgctgcgttccttccactccggtggtgtggccgcggcctccgatatcacccagggtcttccccgtgtcaccgagcttttcgaggcccgcaccccgaagggtgaggccccgatcaccgagttcgccggcagcatcaagatcgtggagaacgatcgcggtcgccagatcatcctgaccccggacgccgattccggcgcgccgaaggaagacggcgtgatcaagccgatcacctaccaggtctccaagcgcgtgccgctcaaggttgccgacggcgaccacatcaaggtcggcacccagctggtcgaaggttccgtggaccccaagaagatcctcaccatcctcggcaagcgcgccgcccaggtcaacatcgtggaggaagtgcacaccgtgtaccgatcccagggtgtggatatccacgacaagcacatcgaggtcatcgtgcaccagatgacccgccgcgtgaccatcatcgactccggcgacaccgacctgctgccgggtgagctggtggacaatgcccgcttccgcgagatcaaccgcaacatcgtcaagaacggtggccgtccggccgtcggtcgtccggcgcttatgggcatcaccaaggcgtcgctggccaccgactcctggctgtccgccgcatccttccaggagaccacccgcgtgctcaccgaagccgccctctccgagaaggtcgacgacctcaagggcctcaaggagaacgtcatcatcggtaagctcatcccggccggtacgggcctcgcccgctaccgcaacgccgtggtcgagcccgacaaggccatccgcgacaccatctacccgaacttcggtctgggcggcgatggcgatctcggcgacgcgagcttctccgatgccgacctgtccgacctgaacttctcgaatctcgagttcggtgatctgaagctcggcgacgacttcaacccggatgatttctactccgatcagggcggtcagcctgacatcgaggagtaagcgagagggtcctagaaaggatgtcctttctaggacccagatcttgcgttaatcgcaataagatggcccggaactatatcagttccgggccatccgtatatttgccattgtgattttcctgttgaacaagagcaggcagccgctcgttgcttgattactcaggcctgtttttcggtgaactggaagaactgatcaccaatacgcaccgttgaaggtgcactgagcttgagcgttgtgcccttggtgacttgggtctcctggccattggtgatgatgtaggtgccgttcaacgagccatagtcctcgatccacagcgcgccatcggtgtcgacgctgatggcggcatggttgcgggacgtggtgcgggtcgggtcttcgatacgctccgccttggcaccttgcggcacatccatggaaggcttgcggcccagcaacgtgctcttatcgatcacaatggtctggccggtgacatcgttatgcatcaggtacgtcttcttcggtgccttggacgtgaacgaggaggagagcacggtgccgtcccaatcctcgatgtcgttttcggcggcgtgcggtgtggtgtctgccgaagcggtggcagcgggctcagcggcggcggtagcggcagtggcggcaggctctgccgcaaaagcggtattggccgcggtttccgcagagctgggctgcccatagtcgttctgaggttcggctgtgccaactgcggaatccggggtgccttccaccggatcgtcggaataccaacccagttcaggtgctggagggtagggaagtttggccatgatgatgccgtcctttcactgacgaaaagccagagcggcgttgattgccgggtcgccgagctggcccagccattcgatcagtgccggataggtgttgggattacgtgcgatgcaggcgcgtagttcaggcgcgtactgggcaatctgggcgattagcatctggtcggtggtggtcagggcctgttcggcggtgaagccataaggattggtggccacaggctcctcgaatgccgcctgagctgcgggctgctgggccgcgtactggtcggcggcagtctggacggcggcagtctggacggcggcagtctggacggcggcagtctggacggcggcagtctggacggcggcagtctggtcggcggcagtctgctgagccgcggcgtactggtcggcggcgtaagcgtctgcaggctgctgctcggcagcctgctgggccgcctgttccggagcctcctgatcctgaaccgggccgccgaatgcgtcggcggtgaacccgtactgtgccagggtttcgcgggcacgctcatcgccgaattcggcgatccaacgcttcaagccggggtagcaacgcggatttacggcgacgtttgcgccgaattccggattctcgtaggcgatttttgccaacagaatcgggtccgcgttcggatcctgtacggcagcgaccgcagcatcataatcaaccatgggattacctccttatgttcgctcggttatgccgaacgtatggtccgtagtgtttgcaatgttgcgtcttcaatggcgtcaatgtcctcgccctcgtccagtctaaaagcgctgaacgcgtgatgttcgggttcggtcagtggcatatcggccacaatcacagtgatattgtcggttccgcccgcatcgagcgcggcagccaccaaggcgtccacggcttcctgcggactggaatgcgctgcggcgatggccgcaatctgttcgtctgacacttcaccgtgcaatccatccgaacagatgatgaaacggccggtcagatcggcaacatatacgtcgggcactatgccgtccggatcgcccaggcattgggtgatgatgttgcgtggaatggtcgcctccgcctcttccggcagcatctgaccggaatcgatagcctcctggcgttgggaatgatcccgcgtgatgcgggtcagcgaggaggcgtcccacacggggatgatatccgtggcgggggcatcggcatccggcagcgggctgagatggtaggttcgggaatcgccgacattgaccacataggtctggtccgagaaatccggggagtcggcgtcgccaaacggagctacgctgtgggcattgatggcatctgcgtaaggctggggcaaaaccaggccggagcaggtcgtaccggccacgccgccgagacggtcacccaaatcgagaatgtcgtgctgagcctgtgccagggtgtcgtcgatgtcatggcgggtgcgcgagggcatggaagccagctgcgcgaaatgctgggcagccaactggcttgcctgctcgccgcctttgccgccgcccatgccgtcgcagaccatgaacacgccctgttgggcgaatccggtgtcttggttgttcttgcgcctaagacccgcgtcactggtcatcgcgatacggatggagcctgtggtcatgacgtcttccccttcttacgcttgtgcttgactcgcgctgtatacggctttgctgcgtgtctatttgccaatatagacacgcttttcagcgaaagccgtgtacatatcctcctgaaacgcggcaaagaagcgagcattgccttgcgcaaccggtcgactccattccaatatgtggtggcttggcccgatgcaatgtcttgccccgagaacgtggcgtagtcggcttcccgaccgagttgaatcagtgcctgatcgtccgtgccgagctgactggcgattgcgccggcctgatcgcgacgagtgcccttggctgtgatgccgctttgctcggcaagtatgtgtatggcattccaccccgctgccacacgggctttcggactgccgtgccgtcgtgcacgtgccagcaatgcagctttaaatatcaggattagtccgcaaacgatgagcagagtccacagggggcttccatagatggctaccgcacgagtaactcgccagaaccgcacccagaacaggttggtcggcgaatcatcggcgtcggcgccggccaatgagctttggcccctggcttgcgtctgatcgcgcagcggatcggtcaacggcaccggtggttgccggaccagcgtctgcggattcggcggcgtcaggttctggttttcatcaggcaccttggtctccttgggcgtcggatagaacgccacccatcccaggccctgcaatttgatttccacccaagcggtgacatcgttgccggtgaattcgattttggtgccattgcccgaggtcttctccgtgcgggcatcggtgatttcgccatcctcgtttttcggcaggaagcccagaaccacacgggagggcagtcccagctcacgagccatcagtgccatggcggaggcatattgctcggagtcgcccaccatggccgtgcctgccagcagcttgttgatacggtagttgccatggccggcatcggagggataatcgccttcgagtccatgagagaaccatccggagtctttcaatgtgtcggccaacgccgtggctgcggcaccgcccgaggactgtccgccggcaatggacgtggccagtttgctggccgaatcgggaacatcctgggcttccggttgggtgatgcgggccgcggccgcactgctgatctgcttatcggtgggcttgcgggcgataatgccggattcggtataggtgaggcttttacgcgtgccggcgggaataatggcggaatcggtatccgtgttgtagtagaacgtgtcattgccgttgtcggcatcgttggcgaagctcacgccagtggccgctcccgccagcggcagccaggtgtcggtcaatccctgatcgacggtgaaggtcgcagtgaaggattcgccctgctcatccgccttgatcgtggtgcccacgcgatgataattcgaggagtccgtggcttcggaagaatcggacaggttccatactgtgccgtcgaatcgatccatcaccgcaagtttgactggtgttccggccggcagattatggacggtcagcaacacgtcttttttgtggtccttgatataggatcgcatgccgctgagcgggctggtgtaatcgtaggggcttaacggcggatcgtagcggtcacgcagcacgaaacggtcctgcggcaccagcaacgtgcctccgaaagcaaggccggcagcgagcacgacgatgatcagcgcggatatccagcgcccccattccagcagttcaagacgccaagacagccagataatcagcagcaaggcaaaggcaatgccgcagatggcacgttgccagccgctgtccgtacccagcagagcacatacggccacggccgccgcaaggggcaggactcccaccagagacaaccatgcgttggcattaatggcaaacacgccggtgaggaacgtaagccacaggccgatggtccataccgccatcagcacgccgtcttgcgtgcccagaggcggatcgacggaaataatgtacttgaacgagccaaacgtcatttcccaacctgaactcaaggtcttcaaggtgggaatcacgtaatgggacgtggtggaactcagcgttaccaccggaccgatgatgaattgggcaaacgccagaaacacgatttgccaccacagtcgcaacgccggcaacatgcccgccagagcgatgatcgcgcccagcaaggtggccggtacggcggcaatcgcccaagtggccacgccgccgtacacgtcgatgagattggcttgcgccagcaacatcatcgccgctatgagtacgaggctggtgattcgtttgccccacggctggcgactgaggcccataccgcgaagcacattgcctctggtcatccagataaccgaatgtgtggagtcggcccaggagccggtggtggtggcggttccggtgtacgtgccggaggaagtgccggtgtatgtgccgctcgatccggcgtacgcagcggtattggtattggtgatactggactggtcgaaggtcatgcgagcacccccatgatcagtgggagatcatcgagttcgccgatggtggccaatgtgaagttggcgaatcttctgatgccgcgattggcgccggcgctggcctgcaataccacgcagctggccgatcggggcaaggccaaggtcatgcgcttgatttgctcgatgtctttcagcgatccaacagtgaaaaaatagaacgaagcatcaggactgtgcttcagcgtgccctcggcgagattcggattatcctcacgatcaggctctatggcactggcgttgtcgaggaactccatggcgttgcgcggctggccgtgcgcgttgcccgcgtgacagaacagcgggcgatcctgcagcaggcatttgacgccgatggaggagtggatggacaccgccatctcgaattcctcgccgttgacgtactcatccgggttcacgctgatggtcaccgaggtgtcggtgcggcgcgtggcttcatattggcgaatcatcaacgtgccggttttcgcggagctcagccagtggacgttacgcacgtcgtcgcccggctcgtattcgcgcaatccgtagaagtcgagatcatcatccacgatctggccggatggttggccttccagatcgcggggcacgccggcattcaaggtatcgagacgcacggtacgagggtggatgaatacgatgatgcggtcggccagctccttttcgtgacgcaccaggccgaacgggtctcccttgcggatgcgcaatggtccgatgggcagtattgcgcgcgataccgtacggaactccacatcggtttgcttggattgcccgggagccagcatggggatgttgaatcgttcatgcgcatcgccgattggcagatatccgcgtgccgtggttgtcggcgttttgccggtgttgtcgatgccgacgataacggatatggtgtctcccacggtcacgcgatgatcggatacggcgatggacgcgtggaagcgtgtgttgccgagggaaagcgcgattgccgcgagcatcatcaccatcgccacgatgccgaatacgagcagctcataccagcccagaggcaggaacgcaataagacatgcgatgcctgcgcccgttaccgcccagcccaagggcgagacgtaggatgcgaagaaccgtctgatgcgtcttaccgcgcgcttgaacatgcgttcagcgcgccggcgacggcgtaatgcggcggatgtagatgccatggtcggatacctttccaggccctatcaggaaccgatggtgggggagggaacgtcttcgagcacctgtgcgatcaggctttccggagtcgcgccatcgaaggtggcttccggagtcagcgtgatacggtgtgcgagcacggccactgcaaggtccttgacgtcatccggcaccacgtaggcacggccatcggccgcggcccagatacgggcgcatcgggtcagcgccaaagcgccacgcatggaggaaccgactgtgatcttctcgttgtggcgggtcgcctcgacgagcctgacgatgtattcacgaatcgcatcatccacatagatttcagaggccacctgacgcagccgcatgacatcgtcaccgctcagcaccggggaaacggtctgcgcacggtcggtgatatcgacctgcttgaggatatcgacggacacatcatggcccgggtagccaatcgacgtcttgataaggaagcggtccatctgcgcctcaggcagcttataggtaccgagctgctcgatggggttctgggttgcgatcacgatgaacggctgcggtacatcatgggtgacgccgtcaacggtgactttctgctcttccataacctccagaagtgcggactgcgtcttcggcgatgcacggttgatttcatcggccagcacgatggaggcgaaaatcgggccctcgcggaactcgaattctccgcgcttctgatcgtagaaagtcacacccaccacatccgaaggcagcagatcgggcgtgaactgaatacgcttgaaaccggtggaaatggagttggccaagcctcgggccaactgggtcttaccggtgccggggttgtcttcaagcagaatatggccaccgaccatcagtgcggtgacgcattgcttgatgggaatggtcttgccgataaccaccttggagacattctcgaccagcgcattgaaggactgctggaaatcccggacctgagccgtgggctggggcagtagtccggaattgatgctggcgggcagtgccgatgcggctgcttgcgcggctttgctcgactgacgctgcggctgggattgcggctgggattgcgcggcggcctgctgattggctaccggcccgcgaccagccacggtttcggcgttggatgctgcggtcttgccggcggttgtggtcgtccattgacgggaggtctgggtggcgggggcagcattcgcagtagcggcctgcttgccggatttacgtccgaagtgcggaagcgcgactttgggcgtgctggtctttgccggcatgccgacctgctgcgggatggctggcgtcgcgtccttgcgcggcttgagcacggtgctgtcatcgcccgcaggaatggaggcggcatcagtagtaggagacggcttttctgacgacgcttgtgacggccgctgcggcaggttaggcaacgcaacgggttgctgtgccgtctcggtgttcggggtggtgccagtgtgcggttccgatgccagatgtgtggcatcggacaagtgcgtggcgtcggatagctgcgtgctgtcagacagctgcgtcgcgtcgtcgatgttctcgctcatggatgttctcctactgcttgtgaatggtggttgacgatattggggtattaccgaaaccaagaatccaagggttcttggccaaagtggtgacatcggtaccggatttgagcgactcggtcccctccgaggaatcagaggggcgtgtgcccgcgacgctgctgccgtccgccgtattgtcgagaccggagtatcccggcccgccggtgactttgacgctccacgtgtagttgccatcggcggccacggccaagtcggtgacgtccaatggctggccggggttccacgtgaacggttggccattgatgatgatttgtacggtggcctgcttgccatagacctcaaccgaaccgccggtgacgttaatgacgtgagcgttgtctgaccagcgcagctcctgcggtttgttgattacagccttcttctcataggtgtaaggagcgccattgtacgggcctccggtggcggcatcgctggtagcgccgttgaacacctgttgcaccgatgcggtattgcatttggcccaaggactcattcggaagtcgagtgagttccggttagtagctgtaccggaatcgatgccatcggcagtcacgttgtaggactgcgcatgcccctgcttggtccaatgcacggtgcatgtactgccggatccggtggtgtagacgtcagtgggcggctggaccttgtactgcgggacaaacctgctcttgcctgtgccggcggaagcatcgcgctgcggcaccacggtggccgttacggtgatttcccgggtgttcaaatcgttctcattgatatcgaacgtagcgccactgtcactgcaatcgatggtgtccttgatgtctcctcccaaggaaattcgccggcagccggcattgcggttgttgccgagagtgactttcgccgttactgtggtgtcgttgttcgacaacgcaatgttcggcgcatccgggtctccccagatcttctctgacggcgatgcggcggactcggcactccaattgattttgttatgggctttgacggtcgccgtgatggcggtgccatcggaaatgtcgttgttgttgaacgtaaacgacagctcggtggccgtattgccggtttccttggtctgcggagcacctgcaccggtgacggtcaccgaatagttgtcgacggcgctgaaatcaccgctcggcgctttccatgtcaccttggcggttttattgccacccgtgaccgtaacatcggtgggagcggacggcaccttgtccggtgtggcttcgacggcggtggacggcttggaccagccgacgtcatttcgcgcggcgacggtgaaggaataggttttgccgttcttcagaccagtgacctggcatgaggtgacggcaccgcaatccttctctccggtggcggcaccggtccaactgaccttgtagttggtgatcgggctgccattggcggcaccgggcgtccatgtgaggctgaccgcgctgtcctgcggttccccggctacgggggagagcagtggcggctcgggcttgtcgatcacggacacggtaatcgatgcggtgacttcacgatccttggacttggtgccgtcttgcacggtgacgagcacggtattcgtggaagcacccacatcggatgcgacggcgatggtgacgtttccggaggcatcgcatccggcgatggtgagtttggcggcgtcatccgccttgcagctgatgacggtcagcgaggaatcggggaacggattgtacgcgccggtaagcgcgttcacgacatcgctggcaccggccatgatcttcaacgtcttgtcgccgacgtgtgccagcggacgggtcgaagacactacgcgcacggtcacaccggcattcacggtgcccgcgccgtatgcgatttgcacgggaatggacgcggtggtgccaggagcggcatccttggtggcggaaacctgcaagctaccggaacgggacaggtttgcggtgatttgcctggacgatgagcttccgccggaatacgtgtattgcttttcgtcgtcatacacgccggacggtgcatgggtgagcgccgccagatcaacggtcttggggtccgcgcccgcctcgacatcaatagtggaggacgagaacgtgggtggcggcacatcgcggcctatcaccgtgatctggagagtgatcactgcggaattgatgatcttggtcttatccgatccctgcttgccatccacagcggtaaaggtaatggaggcggggcctgcgtagtcttttgcagcagtgaacttcagggtcttgtcgttcacgtagaaatcggagttggaagccttggtggcgctgatggaatcagcgctttcgatatacggttccttgccggcgccgacgcgaacatagtcattgatgttgatttcaatggtttcgcgcgaattgaccttcaattccggtgccttgggacgcaacgtgggcggaaagacaccataggccggtacctggatgaacgcggtggaggtgatgttgtatttcgcattggtcaccgtgtaaggcacggctcgcgcctgtgacgtcaggtcgacggtgatggtggtcgaatgctcgccgcccttgacgtgagcgtgagcgctggcggagggatgcacgccgaccttgagctcattggctgtgccggaaggattggcgatccactgggaaacatccacatccacggacttcttatcgatggtggcggcggacggcacacgatagtcgtaggcggtaggcggctcgatggcggcattcggatccacgtttaccgtgagggtggccgtatcggacaagccggccttgtctttgaccgtgtaggcgatataggcggtggtggcgctgccgggcgtggtgaaggagatcatattgtctttcacgctcaccccgtcgagaccttgggcctcgacatgcttgtcgacggtcagattggtgttgttgccggagatgtcgttctgcgcgaccggcacggttgcggctgtattgggcctcaacgtgatttcgtcatccctggcgtatacgccggagtcggacgatccttggaatacgcccacgcggatctgcgcctgtgcgcgctgaccggtccaatcctccacggcataggaaaaggtgtcggtgccggacgaatccggatacgcttcatagaccaagtagtcggaaccgacttcggatatgcggcccagcgtgggtgccttgttgcccagacccaacagctgatcgtcgtcgccatccgtgtctatgccggtcagcatgatggggatgcggaccttctgcccggcggcaacctgcgcttcggcgtcatgcggggttggcacggccttgctcgctgcgtcgctcttatgtacggtaatggtgatattggcggaagccacattgcctagattgtcttcaaccgtataggtgatggggaagttgccggtctcgctggatgcttggtagcggaccgtgtctccagagacgaaagccaggcccttgaacgtctccttgtcgtattgcaggttgttcttgagtttgaccgtggtgccatccgagtaggacacatggtcaagcacatccacggacacgatgccgccggtgcgcacctgggcattgatattgctggccttgggcactgaattcgaggtggtcagagccggtggctgcaacacgatggtgcccttggcggttccggaggcgttggccacggtgtaggtaagggcgacgggtttcgtgggcacctgacgcgcagtgatatacacgcgcttatggctgacgagaccaaccttgatgccggagtcggccggtgcgctcaccgtggtgacggacagcacgccgcccatcggatcgacgtcattggtgagcggctccacaatggcggtattatccgcgccaagcagggcgacatcgttggcggcaaccggtttggcggcctcgccggtggcgggctgtacctcgacgcgagccaatccggtggccggaatcgagccttgagtaatggtgtagggcacataataggtgccgggattggtggccttgaacgtcaacgacatatccgccgcattggtggtcgtcgaagcgccgttgggcgtatccacctgagtcagctgtgccggctgcaaggaagtgccatgcacgtaagaggacagcttgacgacggtatccgtgttgggaacggtggttttcgctaccgggtcgatgaccgcggccaaggtgttcgcgggcttgaccgagaaatacaccatgccggtgccggtcgccgtgccatcggagacggtgacctcgacgcccacgcgtcccgacgccagcgcaccggtgttgaacgtaagctggccgtcggctcgggtggacacctgcacctggtcggtgttctgggccacagcggagaccagagtgagcgggtctccatccggatcgttgaagctgctcagcgcattggcggtataactggctccctgctccacatcgatctcgggaggagtgtcgaactgtacgggagcgtggttgcctccatcattcagggttacggtcaccgtggcggaagaggtctggccgcggccatcggaaatatcgtaagtaaaggtaacggtgcctgcggatgtggcggaggcatcgagttgcagataccggccgtcgtaaatcggcgaaatggtgacgtctttgttgtttggtgcgccaaccttggtgattttaagcacggaacaatcggtctgctcgtcattgcgcagcacgtcgagaatctgttccgaaccggctcgtgcgccgatttcatcatcctcggctttgatttggccggattgtgcggaacaggtcttggagaagtcgtggtggttgttggccgagtcgttgttctgctgttctttctcggtctgctcggtctgtattttgttccactgtattttgatgactttggtggaatcctcagggttccacacattgccgttaaccgtgtcgttgagcactacaaggcgatggttggtgcggaacaccaattcggaagtagtattgacggattcgagggtttgcggcttgacgctggtatccgcgggggagcaggcgcgaatgtagttgctggccttctgactccaagccgagtacacgcagcccttggacgataccggtcgtgccggattcgccttgcccccgttggctatgaaattcgccttggcattggacttcaacgggataagtgcaaggcctctcggtgatgccgcggccacccaatcggactgtacgtcatcggtgggaggctcctgaagggtgagggtgccggtcgtgtcgacatcgacgcggccgcccttgaatatgacggttttgccggttgcgattaccggcgtgctcccgatgacggtaaagctttcaacggtctgctgcttgccgtcggtcagcgattcgagggttttggccttggcgctgctgggattgtcaagacgcagcaccataccgtcggatggacggtatccgtagaccttgccatcgtgggttactgcgatgcgcccgccctcgcccagcttcattttcggatcggaagtggtgggggccacggaatcaaggttttccgacaagccggtccacacattgccggtcttctcgttgatcagggctacggtatccccgccgaccacagtggtggtgttggctttgatgtcggtcttgacaccggtgctgaccgtggatgccttgatggtggaggctttggtcgtttcggtcaggatggtgtcgccattatgctgcgcgatgtcgaatcgtggggcggaggaggagacgccggcgtcggcctccttgttctttacgttgaatcgtgcggccttctggttcttcagcgaagtgacccatacggtaccatcgtccagttgcacatggcggcgcgtgacggtgctcatgatcaccgcgccggcaacaagtcccagaagcagcaggagcgtgattacgggaaccgtccacgtatgccctccggagggcataaggcggcgcaaagccgcgctgatgcgtcggcgacgatcgtatgactgggacgatgtggccatctgaactccctgaaccctggtttctctggttgctagtgtaatgacaacgctttacggttccaatacctgccgttcctgttgtccatttggtgaattcgccactgccgggcgcatgcctgatgcgatacgcaatgccaaggtggtatgcccggcagtggcgagcggatcactcttgcggcttggccgcacaggcgatggcggggctgacggacatctggcggttcttgcgcacaatggacacctgaatgcaggtctgcgagccttcctgcgcgttgacggtcaccgtgggatctgacgttgtgacggtttgcgcgctctggtcggtattgctgccctgcactatggcccacgtataggtatcaccgctttgcgggtctggattcgtccaggtgaacgtcacggatgacccatccgccgcataggtgccgttcagattctccggggaaggaatctgggcgttcgcggtatcggtgatcacgtcatcctgattattgcggttgttgtcatcatccttggtgccgggcgtcgccacctgtttggtatctgatccggtggcgctgtccatgcggggaacgaccacgaaggcgaatatcagtgccgctgcggtgatcgccgcaagtataccgacggtaatacccaccggtttgacccatcgccgtgacgaacgggtggtctgatctcgctggtccgtggcccggcgccgacgctcgatgtctttggggtaggccggcatcccttccacggtaacgggagtggcatgcccgaaatatgcgaattgcacacgctgcatggcgcgtgcgaactccaacgcggagtagtaccgctggtcggggtccttgttcagggcccggcgcagcaccgcttccacatcggccggtacgtcggggcggttgaggcgaggcaatggctgattgacgatcagcgaaatcagttccgattgcgaacgtggatgatattcgtgctggaatggcgagcagccgacgaacatggcgtacagggtggccgccagtgaatagatgtcggcggcttccgaaccattggtcagatgctgaagcacttcaggcggtgcccacggcggcgagaatccggtttcggtacggtcatacacatcggtggagataccgaaatcacccagaacaggcaaaccctgcgaggtgatgagaatgttgctgggcttgatgtcgtgatggatgatattgctgcgatgcgcggtgaacagcgcgcttgacagcttgatgccgaggtcgagtacctgctcgcaggtcatggaccgggccttcatgatgctgttgtaggtgccgcccggcgcatattcgatgacaatgtagccatggccatcggaggtgacgccggcaccatataccggcagaatgtacgggtgggatgacagcttggccatgaagttggcctcgcggttgaacagggcagcggcccgtgggtcaagggttttggcgctgacctttaccgccaccgggcgtgcgggcatacgctggttatataggtacaccgtggcggtggcaccgcttcccaacatctggacgaaatcatatccgggcagcttcggcggcctcatcggaatattggccatctgttccctccctccttggaaaatgcgctctccctgcattcgttctacaggataccgtcaagggtacgattcttcgtcgggttcggtaaaatttttccctctgtgacggtcgggtttaggctggagccatgatgacgagacttgaacctggaacagtgctggacggcatcgaccgtgatggagcggcgaggctgattgtcggcacgcctggaagcggcaaaaccgaattcgccttatcggtgttgatggcggggctgcgccgctacggtggcacgcaggcggtgatggccgtatccggccgtgtggccgccgacgcattgggcaatcgggtgattcgtgagctcgggttttccgtgcaggccaggccggtcaccacgctgggtgccgtggcattccgggccatatcagcttcgcgcgagggaactggattgccgtcgcctcgattgttgaacggtgcggaacaggatgctttgctgcgtcaagtcatggccgtgcatctgcgccatgccgtagcgggagatgattgcggcacctgtgatttgctacgcgtctactttgcccaggatgactgggcgaaactcatacgcgatgccggtgccggcgagatgcccggctcggccgcttccgcacaatcaagcctctcgcaacaagggtcggattcgccgtctccgacgtcggcaggcggctcgaccagcgcggataggttcactcgaggtatttcagatgcgtttatcagccagttgcgcgatatgctggcccgattggatgagctcggtgtaggcgttcacgaagagccacgtctcttggacgccgtgacggaggacgcgcgattgtcggtgcaatggcgtttggctttcgcattgcgccgtgaatatattgcagcccaaagcgcggcatatccggggcaataccgtttggatgcctcgtatttgctggtggcaggagctcgtgtggtgcatgaggcattcgccgccgatcacgcggatgattccgaccggcctatgcgtatggaggcgttgggcttgccccggctgctggttgtggatgatgttcaagacaccacgctggccggcatgcgcttcttggaggagttggggaatgccggcgtcaagttggtgctggtcggcaacccggatgaatcggtgcagaccttccgtggatcgtatccggaatatctgatgcgccgtgccgtggaagggtggctgaaagccaaggaagaacagctggttggcggcagtaccggcgctgatcagtcgcacatgacgatggctgatgtgatcgcgtctcgtatttcgctgtcgattccctcgccggaagacgagccgctgcctccggccgagcgtcccggcaagctgaccgccatgctgggcggagtcgatgcagcgaattatcagtcggacggcacggtgaccgccggcctgtaccgatcctcacgtgaggagctggatgatgtggtctggcgcatcaagcgggcgcatctcgaccggcatattcggtggaacgacatggcggtcatcacccacgacaatgccgccgtgcggctgttcggcgaacgactgcgccgagatggcgtgccggtgcggtattcgtcggtcacccgtcctttgaaggacgagactttcgtgcagggattgttcgcgcttgtggagcttgcccgattgcgtgccgagggaatggcggaatgccagatgacgttggcttcctgcgcggcatatataaggactagagtggccacgttgatgaacggcccgttggtgagtgccgggggcagacccggtcaagggcgtcctgcaaggctcgctccgattgaattggccatgagcgcgctggagtcgctggcgcatctcgccacggatgatgccatgctgacctctctgacgacggcatgggagacattgcgtgaaacataccatgaaacacggcgtgaaacaggtcgtgaaacatcctcatcagtggttccatcgccagtgtctgtcgaaatactcggtgaaccgtccgacgatgacttggcctttggcgttgacgcgctgtacgtgatgcttgccgttgatgatgccgccgcgccggcgcaggctgcgctcgcatccatccatgcggtgcttggcaacgaccctcaggcccgcgcttttgcgaacctgtggcatctggtgggcagcgttgcttccggcttggagcggctgccggcaagccagcgcgtacagccgcgttatgcactgtctgttgcctggaacgccaccggtctggcaccggtctggcagcgtgcggcattattcaacacggcagaggggcgcacggccaatgaccggctggacgcggcaatgcgcctgttccagttcgccgatgattccaccgccagccgagacatcacgtcattcatggcacaggttcggggcatggaagtgcaggccgattccttggcccacatagggccggtggaagacgctgtgacattgaccacgccggcaggcgcggccggacgccactggggatatgcgtggataccggtggtccagcaagacgtgtggccgaacctcgccgggcgcaacaccatgttcggtggtgaagaccttgccgagctcgtgctgaggggagcgcttgaagaaagtgacaaaaccgggcatgatccgcagttcgcggctgtgctgtcgggcgagaagaagggtttcctggtcgcgctgacccgtgcacggcgaatcatgatcagcgcggtatggaacgacagcatgagcccctcggactttcttttcgggtatctgccggaatactatccgcgcaaccggcaacaggcgcctttcaccacagtgggggcgcatacaggatccgccgaatatgatctggccggattggacgccgacccacgtgggttggtcagcgtcgcccgcgcggttctggccactgctcaaccgcagcaggctgccgcaaaggacgccgcggttgcgttgacactcctgtcggagcatggtgtgcgcgccgcaaatccgcagagctgggcgttcgtggaatcgccggcccaatcggatagcgcgtcatctggcggtgcgtcatctggcgatgcctcatctgacagtgcctcatccgacagtgcctcatccgacagcgcgtcatctggcggtgtacagtctgacggtatccaaacggggaaaggcaagacggatgcgcaggccgcacccatggtcaccctgtctccatcggcggtcgacagcctatgggcatgtccggtgtgctggatgctggagaaccggttcgccggtcctcgccccagctccgtggccaccagcttcggaaccctcatccatgcggttgcacagcaaggcagcgaggaagggctggaccatctttcccacaatgcccagacgttggccacactgggcttggactccacggccggcacggaacgccgcatcgaggctgtcacggcacggcttaatgccatctatcagagcaaacgccccgatccgaatgccatagccgacacccggaaccgctatgaggccacccgtaaggacgagtccgcggcagatgccctgcgcaacatcgccgattactttgtgcgcagcgacgccgatccggaaacgtatcttggcaagaactccagcaacttcagcattggcgcattggccggtgccgaatgcgaacgggagtttgccgcacgattcgatgtgcgtgacatactcgacgcatacaatgccgtgcccggcatgcacccgatcgatcggaacatgctggtccgtctgatgggagcactggtcggagggtggccggaaggcatggacgagcatctgaccgtgagactgtccgggcgcatcgaccgtatggaaacccgcgtactcgcagacggcggcgaatgcattcgcctcattgactacaaaacaggcagaacgcccacggtcaaacagattttcaatgatctgcagctcgtgtgctatcagcttggcctcgtgttccccgaagacgggccgcgcggtgccaaggcacttgccgcaatgccgcatatcagccaaagcgcgctgttccatgtcgggcagaatgcggcaccagccagaagctacgccccggaaggtgccttccagccgccgctgttcactgatggttcgttgaatgccgaaccgttcacgccacgatactggtataaagaccccaaccgtttcttcgacatacccgccatagatccggctactcctcccgaaggtgtgagtgccgaagcgtgggcgcaattcgccgcgctcgccggtacgcagacgttatggtcgctgaccatgatcgcccgcgtattctatgccgcggcggccagcaggtcggccatcatcgaggcccatccgcaagacacccatatcggattctgccgtatgaagaacgtctgccctgcctgtgcgggccagatcgacacgattttcgaaacgaggcaagcatgagcacgttcactcccagtgcggaacaggccgccatcatcgatgcgccagtcgatgctgacgtactggtggttgccggtgccggttccggcaaaacctttacgatgacccaacgcatcatcgcgcttatcaatcgaggtgtggcacctgaacgcatccttggcctgaccttcacacgcaaggccgcaggcgaactgctggaacgcgtctccgccgcagtggccggtgatatggcgggctctacgaccgccacggtgtctgatcgggcattcctcaagccggccattttcacgtatgacgccttcttccagaccatcgtgcgccaatatggactgcttgtcggattcgatcagaacacgcaaccattgagcgcagccggagcgcttcaactggccaccgaagtcatcgacagtcacatggatctggcgttcagtgaggattttggcgccttctccagtttggcgaaccgtgttctggcgttgtcggatgccattggcagtgccatgatcggtgccggctgcaccagcttcgatgatgcgatcaatcaagtacggcaatgggattcggcattcatcaatcgattgcagcaagccgtcgcagacgaacccatgcccgaggacgagccgaaaatccccaagatcaaacgactgaagaaagataccgacgccagctggcaagccaagctcgatgaccgtgccgaacatttgcacgcccgctgcgcctatcattgcggtgcgctgctggagaccacacgcaaacgcgatattctgctccagctggtggaggcctatgcccaagccaagcgggaacgcaatatggccgaattctccgacttcaccattgccgcgtatcagcttatcgagcgcttcccctccatcggagagcgcacgcgccgcaggtacagccatgtgctgctcgacgaatatcaggacacctccaccacgcaggccgctctgctggcagcactgttccatgtggatgcgtcacggaggtccgccgtcaacgcggtgggtgatccgttccagtcgatttacgcatggcgtggtgccagccctggtgcattccgtatgttccagcaagatttccacctgcctgccggatacaagccattcccgttgtccgtcaccaggcgcaacagccgtatagtgctcgaagccgccaataatctcacgctgccgttgcgctccaatccgtcgcgtccctccagctcattgatgcgtgaggtcgatgtctcatcgctcgaccccatgcctgatgcccccgaaggaacattgggagtgctgggcttcgccacggccgggcaggagatcgacgccgtagtgcgtttctgcaagacggccatcgcacggcaccgttccgcagccgaacaacaggaacagatgccgggcgaacagaaagcgccggtctccgtgctgtttcggtccaaatcacatatgcccgaataccaggcggcattggaacaggccggattgaccacattcgtggtcggctattccgcgctgctggaacgtccggaaatccgcgatctgatggcgttgctgcacgtggccgccgaccacaccgatacgggatcgctgatgcgcttgctggccacgccacgattcaccatgtccgcagcggatttgaccatgttggcccgttttgctgaagaacagaacacggaacaacgcttccaagcattggtgcaggccggccttgcccaaccggatacaccagcgaatgaatgggcggctgtggtgcgtgagtaccgcgatcaggtggccaatgcggtattcctgccagacgtattgctacgcggcgacctggtaaaactgcttgaacggttgagcgcacacgggcgcaacgccataacccgggccgcggtgatgctccgtcaggtgcatgatgccgtcgggcggccactgggcgacgtgattcgcgccggcatagaagcgttggatcttgacatcgacaccgtattggccggtgtgctgcataatccgcagcaccgcgccaatcccgctttggcgcatatgcctatggatgcgattgtggatttggtggatacgtacacgcaagagattgccgctgagcaaactccctcgttgcatgggttcatcacatgggtggatcatctggcttcggtggaggatgaagccgccagtctccccgacgctccggtggatgtggaactgatgaccgtacaccagtccaaagggttggaatgggatgccgttgcggtagtggggcttaccgccggcggattccccagcaatcagggcgaccatctcaagatcgtgctggacgaacaccatacgggaggcaccgagcaaggtcactggaccgcacccgaatatcatgagaccgccgactcctggctcaccaaccccaccgccgtgcccgtgcctatgcgcgccgatgccggcattttgccgcgattcccccatgatgccgatgtggaagccgaccccatcgcatcgttggcggctttggatgatgtggagcttatcgatgatgaagtgttcggctccatgcgcgaattcggcgatggcgtggaagaagtggatgcatccggctggtatttgacgcaggcggaggaatatgggcgccggctgcatgccgacgaacgtcgattgatgtatgtggcgcttacccgtgcgcgggaagatgccctgatgacctattgcgcctatacgggcgaatccgggcgggacccgtcagtggtgcccaaaggctctcgcgccgctcagccatccaatttctggcttgaagtgcatgacgcgctccaagcccgtgaacatgcgatatcggctcaggactgtgtggaacggctgcaagccgccaatgccgggaagcccatgctgatctcggcgcaaggcgaagcgattgcccctcccgaagggttctttatcggagagcatgccgcggcatacggtgatgccgtggtgggggagtcatggcaaacgccgattacgcagacggatgccgctgtcgaattgccgtggccggctaccctcagcgacgcggtgcatgaacagctgtcacgcggcatcgatgtcatcgccgcagattcctcgtcacttgagcagcaccaagacgccggcccactgctgcaacgggcgcaattgctggtggacgacgccgatttgatggccgatgccgccagcggccagtcgcttgatgaggcagtcaaagccaaggcgcaacgcgttctggctgcaggacgccagaacgtgacaagcctgcaagcccgcgtaggtggcatgaacgaacgggaggagcgcctctactggcgtagcattatccgcccgattccgcgcatatcgtctccggcggccgaggccggcacgcagttccatgcgtgggctgagcaattcatcaatgccggtaagccggatgaagcggtactggcatatgaagccgaaccaagcatgccgtatacaggtcaggatgcgggattcgtttcccgggaagccatgttggccgatttggccgaacgggagcggcaatgccgcaagccatccacacggcagcccgctgtcccacagcccacggctcaacaatccgtatccgccgtatccgccgtatccgccacttccataagcagcgacaatgccaccgagtccaagctggtggcgtggcagcgcagactggccgaatcatcgtgggccaagcgcatcccggcgtggacggagcgtgccatcgtcgtggacgtgccgggcgtgggcctggtcaatggcaaactcgatgcggtattcatcggtggacttgacccgtccagcaccaccgcacgctttaccgtggtcgactggaaaaccggtcgtcggcccaccaagccagacgacatcacccgcaaacttgcccagctcgacatgtaccgactgctgctggcagcggtcgaaggtgtggaattggacagtatcgacgccactctctactatgtcagtgagcccgacgagggcttgcgcgagcttcacgcccgcgcgaaaaccaaacaggaaatccttaccgagttgagctccggcattcccgaacaatctgacaacgactgagcccaaaggctcatgacctgtacagcatcggacggccttcaccggtggagagaccttatgcatcgcaaggcatctccgacgatgaagacgactggccacgtaccggtccgcggttgaaacgcaccgcgtgacgttgctcgggaaccgctaccctcggatggcacgtgtgggcgggcgcacgtgccggacaacgcaccagtaaggagttattgtgtccacgactcgcgcggtttcgaagtcgtccgctgcccactcgccctaccagcgcctgttcatgctgcccggagccaaggcgttctgcctgtccggcgcggtggcacgattgccgatctccatgatgagtctcggcatcgttctggcgctcaaccatctctacgacaattggaccatcgccggcaccatgagcgccgcctatgtgctggccatgagctgcgtcaccccgttctacgcccgcgccttcgaccgtttcggccaagcccgcgtgggccggcttgcgctcgccgtgcagatcgtggccatgctcgccttcgccttcgcggcgttggtgcgcgtgccgattccgctgctgttcgtcctggccatcatcatgggtctgacgcagttctcattcggcgcattggtccgaacacgctggtcctatgcgttgcgcggtgtggaagatggtgaacagctgctcaacacggcctacgccatggaagccgccattgacgagatcgtctttattctggggccgattctggcggcttggctggccacctccgtgcatccggtatcccaactgttcgtgcccaccgtggcatgcggtatcggcggcaccatattcttctcgctgaaatccacccagccgccggtcatcgtggaacaggtcaccgtggccgcgcacgatgacggcagccctgctgcaagcgaagatgccgaccagctgaccctgcgccagctcaaacgcagcggcgccaagcccaagagcgtattgctctatgccggcgtactgccgttgctcgctgtgttcatcgtgttcaatatgagcttcacgtccttcgacgtgtccattaccgccaccatgaaatccatgggacttgagcccttcctcggtctgcaattggcgatgttcgcggtcggctcgtgcatcggcgcgctggtgttcggctcttgccgactcaaaggctcccattgggcgcatatggtgatgttcctatcgctgctgaccgtcggctacgtgttcttccggctgtcaatggacaatctcatcctgctgggcgtcttcgaaatcctcgccggcctgaccgtctcgccgacgttcgccaccggcaacctcatcgtcaaggatctggtgccggcggaatccctgaccgaaggactgagctgggtaaccaccgcaggcacggtcggcacatcgattggctcgtccgtggccggcattgtgcttgacgcctccaaccctcatgtgggcatgatgctgccattcatcttcacgctggcgtccgtgccattggcgttggccggatgggccttggccaagcggcgtgggtgaaacggaatcgggctacgcctgatggatggttggcggcttcgccgggggtctctccctcagtccgcttcgcggccagctcgaacgcaattaaatgatggctttcagccaactgaattattgctcactgtcgttcgccctcacctaaaaacgcctccggcgttttcttcacggttcggctcatcagagggagctcgacttcacggttcggcttgtcagagggagctcgattctgtggacgggatattggcgtgagggcttggcggtgataggctgattgccgattggaaaacgttccgggtacattgccgggcaggtacgggtagacagggaagaagacatgatcaaggtttcggtggtcggagcaaagggccgcatgggctcgcacgtggtcgaagcggtgaacaacgccgaggatacgcagctggcgctcgcattggatgccggcgacgacctgacccaggtcaccaccgacaacaccgatgtggtcgtcgaattcaccgtgccgtccgtcagcctgaacaacgtgctgaccctgatcggccaaggcgtggacgtggtggtcggcaccaccggttggaccgacgagaaactcgcccaggtcaaatccgccatcgccaacggcccgaagcccgaaacccagaaggtcttcatcgcacctaatttcgcgatctccgccgtactggccgactactttgcaaccaaggccgcgaaatacttcgaatccgccgaagtcatcgaactgcaccaccccaccaaggtggacgccccctccggcaccgccattcacaccgcccacggcatcgccgaagcgcgcaaggccgcaggactcgcccccgtgccggacgccaccgaaaccgatggcggctcacgcggccaggtggtcgacggcatccacgtgcacgccgtgcgtctgcgcggcctcaacgcccacgaggaagtgctcttcggcaacgccggcgagcagctgaccattcgggccgacagcttcgaccgcaccagcttcatgcccggcgtcctgcttgccgtgcgcaagctcgccggcgacgctccggctggcctgaccatcggcctcgaccacttcctcgacctgtaatcgacccgcagtcgaccagtagtcgcccccgcatttcaggcagggaagcgcgccgggacgcgcatcacggcattgccaccggctccggccataatgccacgcattcagcaacaatcaaggtacgtagtataagagtccacaatgggaagtacggtgaacactatgagcgagcatgacatgcaccttcttgagccagcacctttcggccgcattctgccggctatggtcaccccgatgaaatccgacggcagcgtcgatttcgccgccgcgcagaagctcgccaaatacctcgtcgccgatggcgcggatggtctggtggtcaatggcaccacaggtgaatcgcccgtcacccatatggatgagaaggtcgagctggtcagggccgtcaaggaggtcgtcgacgttccggtgatttccggcgccggctccaacgacaccgcacacaccgtgcgtatggtcgaacagactcaggaagcgggcgccgacgcggtgctcgtcgtcatgccttactattcccgcccctcgcaggacggtatcgtcggccactacaaggccgtcgacgaatccgccgaaaagccgatcatcgtctacgatgttcccggccgtaccggcttgaaggtcaaggtcgaaacctacgaccgactggccgaacttgaacacgtcaaggctgtcaaggacgccaccggcgatcttgcagccgcagtggagaagcagcagcgcaccggcctcgcctggtattccggcgatgacggcctgttcctgccgttcctctccatcggcgccgtcggcatcatttcggtgattgcccacgtcgcctccaaccccatgcagcagcttgtccaggcattcgatcgcggcgatatcaccaccgcccgtcgcctcgccaaccagctcgccccccttgtccacgcgttgaatggcgacggctatcaggccgtcatggccaaggctgcgctcaaggtcaagggcgttatcccctccaccaccatgcgtctgccgaacatcggtcccgacgccactcagcttgacaaggctgaagagggcatgcgcgctgccggactgctgtaagcccgaaacgctgcatacgggttgccagcccgccgcccctgcatgacagagcagaggcaccacaacagaaatcccaaaaaggttatggcacaagaacaaaagaaaacaagcaagaacacgaattctcgccgtcgcggttccgcgcgcggccgcaacgccaacggatccaacagccgtacgccgtcccgtaagatcaacgccacccggcaggccaccgcaccccagcaggatgccgtgctgatcgccccgccgaagtaccgcaagggctccatgcgcatcacgccgctcggcggcttgggcgaaatcggccgcaacatgaacgtgatcgaatacaacggtcacctgctgctcatcgactgcggcgtgctcttccccgaggaggagcagccgggcgtggatctcatcctgcccgatttcagctacatcaagaaccgtctcgacaaggtcgacgccctggtgctcacccacggccacgaggaccacatcggcggcgtgccctacctgctcaagctgcgtccggacatcccgctgatcggctccaagctgaccctcgccttcgtggacgccaagtgcaaggaacaccaccagaaccccaccaaggttgaggttgccggccgtgagaagctcaaggtgggccccttcgacctcgaattcgtcaacgtcacccactccatcccggacgccctggccgtctacgtcaagaccccggccggctccctgatcgacacgggcgatatcaagctcgaccagctgccgctcgaccaccgcatcaccgacctcgtcgaattcggcaagatcggcgaaaagggcgtggacctgctgatgatggactccaccaacgccgaggtgcccggctttgtcaagcccgagacctccatcggcccggcccttgaccaagcgttcgcccaggccacccgcaagatcatcgtcgccagcttctcctcccacgtgcaccgtgtgcagcaggtggtggacgccgcccacaagtacggccgcaaggtcgtgttcgtcggccgttcgatggtgcgcaacatgtccatcgccgccgacctcggctacctgcacatccccgaaggcaccgtcgtggacctgaagcaggccaacgacattcaggacgacaagctcgtcttcatgtgcaccggttcccagggcgaaccgatggccgcactcggccgcatcgccgacggcaaccaccgcgacatccacatcaacgagttcgacaccgtgattctcgccagctccctgattccaggcaatgagcacggcgtctacaaggtgatcaacaagctcgtgcagctcggcgccaaggtcgtcaaccgcgacaacgccgccgtgcatgtgtccggccactgcaacgagggcgagctgctgtacatgtacaacatcgtcaagcccaagtgcgccatgccgatccacggcgagaaccgtcacctggtggccaacggcctgatcgccgtcaagaccggcgtggacccgcagaacgtggtcttggccgaagacggcgacgtggtcgacctgtatcacggcaaggccgcggtcgtcggctccgtgccgtgcggttacgtgtacgtcgatggcgattccgtcggcgagctgaccgatgacgagctggaaaagcgccgcattctcggcaccgagggcttcgtatccgcgttcgtggtggtcgacaccgacaatcacgaggtcgtcaccggcccgaagatctacctgaacgccgtggccgaggacgaaagcgagttcgacaaggtgcgtcaccagatcgtcgaacagctcaacgaccagatgatgcagggcgcgcgtgacacctacaagctgcagcagaccatgcgccgcacgctcggcagctgggttgcgcgccagctgcaccgcaagccgatgatcgtgcccgtcgtggccgacatcgcccaggacgtcgaaaccgtagaaaccaagtagtccggattatccagggacgaccgtaaggagtaattgaagtcatgcccggttctaatctcactcgtattgaagccgaagaacgtaaggccgttatcgaagcgccgattcactatcacgtcgaccttgacctgacggtcggcgcgaagaacttcggttccaagtcgctcatctgcttcaacgcgaagcctggttcgtcgaccttcctcgacctgatcgccgacgaagtgacatccatcgacctcaacggcaagtccctggacccagccgtggccttccaggacaaccgcatcgaactgaccgacctcaaggagaagaacgaggtcaccgtcgaagccaagtgccgttactccaacaccggcgagggcctgcaccgctcggtcgacccgtccgatggcaacatctacctgtactcccagttcgaggtgccggacgcgcgccgcgtctacgccgtgttcgaccagcctgacctgaaggccaccttcgatttcaaggtgctcgctcccgccagctggatcgtcacctccaacatgccggttgccaccatcgaggacgatccgcgcgaaaccctcgacggcaccctcggcgacaagccgaacgaaagcacccgtctgtgggacttcgagccgaccccggtgatgagctcctacctgaccgccatctgcgccggcccgtacgccgaatggcacaccgaatacctgaacgaagacggtcgcaccgtgccgatggcccagtactgccgacagtcgttggccaaggccttcgcgaaggacgtcgactacctgttcgacatcaccaagaagggcttcgcgttctacgccaagacctggggcgtgccctacccgtacgccaagttcgaccagatctacgttcccgaatacaacgcgggcgctatggagaacatcggcatggtcaccatccgtgactcctacgtgttcgagtccaaggtgaccgacgcgctggccgagcgccgcgtggtgaccgtgctgcacgagctggcccacatgtggttcggcgactatgtgaccatgaggtggtggaacgacctgtggctcaacgagtccttcgccgaattcacctccacgctggccactgccgaagccactgaatggcatgacgcctgggccaccttctgctccggtgagaagagctgggcgttgcgccaggatcagctgcccaccacgcacccgatcgtcgccccgatcaacgacctcaacgacacctacgtcaacttcgacggcatcacctacgccaagggcgcctccgtgctgaagcagctggcattctacgtgggccgcacgcagttcttcgaaggtatccacaactacctgaaccgccacgcctactccaacgccaccctggccgacctgctgagcgaactggagaagacctccggccgcgatctcaaggcctggagcgccaagtggctggaggaatccggcatcaacacgatcgccaccggcctgaccgtaaacgcggacggcaccatcgccgaattgaagctcacccagagcgcgccggccgaacacccggtgctgcgtccgcatcgcctggccgtcggcttctacaacgaagacgccgaaaccggcaaggtcgtgcgcaccgagcagttcgaactcgacgtggatggcgaaaccaccatcgtcgaggccgcggcaggcaagccgcgcccggcattcgtgctggtcaacgacgatgacctgacctacaccaagattcgtttcgacgccgaatcccaggcattcgccgaagccaacctgcatcgtttcgacgatgccctggcccgcgccgtgacctggctcgccttctgggatatgacccgtgacggcgaattcccggccgaacgcttcgtggacatgaccctgcgtcttctggccacggaaaccgaatccaccaccttccgttacgcgctggcctgcatgagcaccaccgcccaccactacgtggcgccagcccgccgcgacgatgtgctgcgccacgtggccgccgagctgtggaccctggccaacgccgccgaagccggctcggacacccagttccagctcgccaccgcctacctgggctatggcgaggagggcgatgccgcattcgccgccaacgcacacggtctgctggacggcaccgtgcgtcttgaaggcctcgaaatcgacaacaacttcacgtggaccatcgtccaagcgctcacctccgtcaacgagatgaccaacgacgacgtggacgcgcagctcgccaagaaggagaccacggaaaaccgcgagttcgcctacggcgcccgcgcctccatggccacgacgcaagccaaggaatgggcttgggatcaggcactccacaacgacgagctgaccaactcccagctcgaggccgtggcccgtggcttctccgccaccccgcgccccgacctggccgagccgttcgccgccaagtacttcgagactgtggactgggtctgggccaacaagacctatcacatggccgaggctttgctcaacggcctgtacccgggttacgccgatcccgccacgctggtcaagctcggtgacgcctggctggacgagcacattgccgccgacaacgccctgaagcgtctgatcgtcgaaaacgtggcatcctcccaccgcaccctcaaggttcgcgaatacaacgaagcgctctgatttccttctggctcccctcgggtgcgaggggagttgtcgcctcaggcgactgagggaatcgcttccgcgaggagctacgtccacattccaacataaaacccgcaaccaatcctcaacagcgtattctcgctcaaggccggcaatgtgccggttgatgagcgacaaggatacggggaatgattgcgggcttttccataacttcattactactgattctgttggccggaatcggcgcaggattcgtgggctatgcggtaggcgcatcgtcactggtctcatacccggccttgctcgcgttcggcattccgcctgtattggcaaacgcttctaacaccgttggcgtggtcggcacgggcatcggtggcgtgatgggcgcgcgcaaagaactcaaaggccaagcggtacgctccattacgtatgtggtcattggcgcgttcggcggggtggccggtgcgtttctgttgctcaaactcgacccgagtgtctttgaattcgccgaccagtgctgattttgctgagctcgctgatcatcgccatcaatccgcgcggccgcatgcaggccaagcaggccgccgcggatgccaccgcgcaactcaagcacatcgaagccactgaagccaccgatgccactgatgccgccaagcgcgcaaccacccctaccgcacctcaccgcccgccggaacaactcgtgcagcccatgagccaggattcctggtgggtatggctgggcgtggtggcagtcgccatctactccggctacttcggcgcgggcgccggcaccctggctctcgccatgcttgatgccgccaaaatcggcccattccacaagatcaatgcattgaaaaccctgatcggcacaggcgcgaacatcagcgcctcagtggtattcatcatccaaggcgcggtcgattggccggccgccatcatgctgtgcatcggctgcttcatcggcgggtacatcgccccgcccatcacccgcaagattcccgcaaacatcatgcgcgccgccgccgtaatcgccggcatcattctcaccatcgatctggggctcaaaacctattgattcgtgccttacactgatgcagtgaagcatacagcatggccgccaaccgcagcgtggccgcagaccccgataaggtggccaatgtctggcatttggcgactgcggaacctgagcgcctagaaaccaacgcggtaggcaaagaggtgagtgacttcctcgatccgccagacacgtcgcagattcacggcgttgcgtgccatgctgattggtggttcgcggcgcgagcaggtgctgttcgccggcgttatgaaggagctactcgcgcccatcaacaatccgcgatatgtcatcatcggcaaggaatggggcgtgcgcacgtacggtgtaagcttcccatgcccgtccatatttgcccgccgccagcaggacgccgaaatactgcgccggcagttggaccgctgcctgacgcattgcaccatggtatacacccgcactgaggaaggccggcgtacgctacttcgttgccaaacgcgttctttcctcaaccgtgacgaacaactgccgcgcatactgaccacaacatcggagtgatagatcgttgcatgcatagccgagaccactccggtagaggagatgccgttgggcatgttcaccgcatggctcagcgtgttcctcgccgtcgtgttgtatacgatcacgtttgccggcccattcgtgctggtacgccgtcttcgttcccgcgccagagcccatcgacctgcccggcatgcccgttaaccgatacttctcattgttcgtctatcgagcaaggtggcacgtacgatacttggtataggggagagtttctcgctgtctgtggtggaaaatccgagttttattatctgagtcagtgctttgggtttgcgttttgggctcgatttactattggacggcgatatccggggcgggcggctagctgttggggttcttgtcgcggctgtagatgtgtgttcggtctatcggtgatgcttgtcctgttcgtggaccgggcgaagtgcgggacgacgcgcggatttcgcggtttttcgtctgccgtcccgcagagagcccgggggatgattatggtccgtaacggggattggcgtgattgcgcggttctggcggttgatagtgtggaacgccacgaacgtcaaacgattgatttctctaccatcccacgttcctgcgggacgccgcgcggaaaccggccaaatccgcgtgccgtcccacaggcatgaggctgtattcggccggccactgtccatggcggacggacgaacagaccccactggctatcgtctgcgcttctgcagcgctcaccccggccttccacggaaatcatgacagcatgaaggtgacgaatggcctggcttgcctgtggacgccgatcaatgtgtgcgacaatgattcgcggtacatggcccctggcgctggagtcgcagatgctgcttgtgtggcacaggagctgtgctggtacgtgtgatagccggcttgttgtccgtactgctgactgtatggttgccttacgaagcggtttttgatgagagaaggttgatgatgtgggatcgtgtggatgctgttgccggtgcggttgttcgtcggcagttggattggccgtggtacatgctggaggccgtggtgttcgtcggcgtgctgtagctgctgaatgctgataaatctggttttcctttctgggtgggtagggttttccggtacggcattgttgtctggtgcgtgttcgtggtggctggttcgttgctcggctggcgtatggtccgtgtcaggcagcgcatgtggccgacgtggcggtattggtatcgcaacggcgtcatcgcgtcgttcgtggtggcgtgcgtttgcattgcgatgatgtgttgggctttttccgtggtttcggggttcctgtgctggttgagatccgttatgagccggctcccggagtttcttcggtcacgtattcggtccatgcgcgtgattggcaggccaaacggaccgtcgatgctggaagcacggtggtgcttcgtggcgaagccgtgcgtaatatgcgggtgaacaggttctacagcaagggaccgtggctgacgttcacgctgaatgtgtatgacaataatggctttttgagtaattacgccatgcggtatatgcaggtggtggtgttgcctgtgccggctcgttcgcagggggtatgcgtggtgctcggtaagcgatttgttggggcatgcggttcggccacagttggtggggccgccgcagaatgtgttgcaggtattgtccgctcatccgttgcgccccaatgtgattgttgcttcggggcgggcgtatctgtgggtgtccctgtgcgataggtggaatatctacgaccgtttcatgaaccccggtttggagtcgcagatgctaccggtggcgcaggagttgtgcggttttcttgccagccgcgtgtgatgtgtattatgtacgcggcgatgctggtcgtatggtggtgtcatgccgttctttgagaggtcgtcagggcccacgcgtcatattttcaagtatggtccgtctcgtatttattgttacgatcggccggattcgctgttgatgccgg

SEQ ID NO: 17 - DNA, 54500 bp, Unknown
  R30_18m  MAG No. k141_5071
aaaaagggcaggaaggcgaaagggccgcgcatcccgatgcgcgtgcccatcgcggaccggcccgaggcggtcggatccaggaaggggttcggccatttcgagtcggacacggtggtcggcgccgcgccgtcgaggcgctgcatgaacacgcaggtggagcgcaggagccgcaggttgttcgcccggctcgtcgacgacaagagcgcgcccgccacggccagggccgagtacgagatattcaagggcatgccgcctgccgcgaggatcgaccgcacgtgggacaacggcacggaggcgtccctgcacgtgctggtggacgaggcgctgggcatgctcacgtacttcgccgacccgtacagctcctggcagcgcggcagcaacgagaacaggaacggcaggatccgccgctatctgcccaagggaaccagtttcgaggatctcacgcaggacgagctcgacgcgatcgtcggggagatcaacgacacccccatgaagctcctcggctacaaaacgcccaacgaggtatgggacgaggagatggccaagctacaatcaaaacaagccgacccgaaaccagccgttgcacttacaagttgaatccggggcgttcacttcctgtatacccggtgtggcataatagccaaggcaatttttgggctttgcctaagctagtttgaatttgaaataggtgaataacgtggcacagactactaacgacatcaagaacggatccgtcctgaacctcgacggacagctgtggaccgtcatgaagttccagcacgtcaagccgggcaagggccccgccttcgtacgcaccaccatcaagaacgtgctctccggcaagatcgtcgacaagaccttcaacgcaggcatgaagatggaattcgagaccgtcgacaaccgcaccctccagtactcctacgaggacggcgacaacttcgtgttcatggacatgaccacctacgaccagatcatggttccgaagaccctcgtgggcgacaaggccaagttcatgctcgaaggcaccgactgcctggtctccttccacgacggcaccccgctgagcgttgacctgccgggctccgtggtcctgaccatcacccacaccgagccgggcctgcagggcaaccgctccaacgccggcaccaagccggccaccgttgagaccggagccgagattcaggtcccgctgttcatcaatgagggcgaccgcgtcaagatcaacaccgaggatggttcctacaccggccgcgagaacaactgatctccgcatcctcaacagacgaccgaccgtataaaggactaggacagcagcagtatggcacgttccaccgcgcgcaaaagggctctgaacaccctgtacgaagccgacgaaaaaagtcaggatattctcgccctgcttgacgagcgcatcgcacatcccggtgcccagaccccgcttcccgactatgccattgaaatcgtcaagggcgtggccgagcaccgtcgtcagatcgacatgaccctggacgaacactccacgggttggaaggtccgccgtatgggcgtggtcgatcgcaacattctgcgtatcgccgcttgggagattctgttcaacgatgatgtgccggacaaggtcgccatcgacgaggctctggcattggccaagaccctgtgcgatgacgattcgcccgctttcatccatggcctgctgtctgcagtgtgcaccgccaagaacgcagcaccggcaccggagtccgcggcagaagaggccgatgaggaatcgtccgattccgatgccgccgcatccgagccgaccgatgagggcgatgtttccgattcgcccgattcgtccggtgcatccgacgagcccgctgccccgtccgctgagattcagccgacggtcgattagtcatttgtcgttcagcctccccattcgggaggctttttcatgggcggacacttgtgccgccgtacattctcaagtcggcaccttgccgacagccccgccagcggggtgagactttgcgcccaacggcgtgtgagtctgcgctggccgttaaccttggtacgaatacccgaaaaacataagggggttttggtgagccagaacgagtccgggaccatcgcaattccgatgtatgacaaggacgatgcagtcctcgttttggaagatggacaggtatatgtgggggcgccatacggcgccctcggcgagacgaccggtgagatcgtcttcgccaccggtatgaccggataccaggagacgctcaccgatccgagctacgatcgccagatcgttgtgcagacgttcccgcacatcggcgataccggcgtcaacagcgaagaccctgagtcctcccgcatctgggttgccggatacatcgtgcgtgatccctctccgaacgtgagcaactggcgtgccgagggcagcctggacgacgacctcgccaagaacggcatcgtcggcctgagccacatcgacacccgtaagctggtgcgtcacctgcgttccgcaggcgtgatgcgcgccggcatcttctccggcgacgccctgaccgaccaggccaccggcgcgctcaagaccattgagcagctgctcgaagacgtcaagaacacaccgcagatgcagggcctgagcctgtacgacgaggtgtccaccaaggagacctacaccatcgagccgtgcggcgagtacgaaggcaaggagccgctgtacaccgtggccgccgtggacctcggcatcaagggcatgaccccgcaccgcatggccgagcgcggctgccgcgtgcacgtggtgccctccaccatcaccttcgccgaaatcgagaacctgaacccggacggcgtcttcttctccaacggtcctggcgacccggaacaggccggccccgaaatcgagctgctgcgccaggtgcttgacgccggctacccgttcttcggcatctgctttggcaaccagctgctcggccgcgcgctcggcttcggcacctacaagctcaagttcggccaccgcggcatcaaccagccggtcaaggatctgaccaccggcaaggtcgaggtcaccgcccacaaccacggcttcgcggtcgacgctccgatcggcaagcaggtcgacgcgccgtttgaaaacggcaagtacggcaaggtgttcgtctcccacatcgatctgaacgacgacgtggtcgaaggcctgcagtgcgtggacatccccgcattctccgtgcagtaccacccggaggccgcagcaggcccgcacgatgcggcctacctgttcgaccgtttctgcgaacttatgaagaacaactccaaggaaggtaagtgatatgccgaagcgcaccgacatcaaatccgtgatggtcatcggctccggcccgatcgtgatcggtcaggctgcggagttcgattactcgggcacccaggcatgccgcgtccttcgtgaggaaggcatccgcgtcatcctcgtcaactccaaccctgccaccatcatgaccgacccggagatggccgacgccacctacatcgagccgatcgccactccgatcctcgagcagatcatcgccaaggaacgccccgacgcgctcctgcccaccctgggcggccagaccgcactcaacgccgccatggcgctgggcgaggccggcgtcctgaagaagtacgacgtcgaactgatcggtgcttccctggaagccatcgaccgtggcgaggaccgtgaactgttcaagaaggtcgttgacgaggccggcgccgaatccgcccgctccgacatcgcccacagcatcgaggaagtcgacaagatcgccgagaagttcggctacccgctggtcgtgcgcccgagcttcaccatgggcggcctgggctccggcatcgcccacaacgaggaggagctgcaccgcatcgccggcgccggcatccattactcgcccaccgacgaagtcctgatcgaagagggcatcgagggctggaaggaattcgagctcgagctcatgcgcgaccgcaacgacaacgtcgtggtcgtctgcccgatcgagaacgtcgacccggtcggcgtgcacaccggtgactccatcaccgtggccccctgcttcaccctgaccgaccgcgaataccagaagctgcgtgacatcggcatcgccatcatccgcggcgtgggcgtggacaccggcggctgcaacatccagttcgccgtccacccggccaccggccgcatcatcgtcatcgagatgaacccgcgcgtctcccgttcctccgcactggcctccaaggccaccggcttcccgatcgccaagatcgccaccaagctggccctcggctacacgctcgacgagattcgcaacgacatcacccagtccacgccggcctcattcgagccgaccatcgactatgtggtcaccaaggtgccgcgcttcgccttcgagaagttcccgggcgccgaccccaccctgaccacctccatgaagtccgtgggcgaagccatggccctggccggcaacttccaggagtccctcggcaaggccatgcgttccatcgacaagcgccacatgggcttcaactgggatggcgagaagccgtccgccgaggaagtggccgaactgcttgaggccatccacaccccgaccgaacaccgttacctgcagctcatgcgcgccatctggggaggcgccacgctggagcaggtgttcgcggccaccaagatcgacccgtggttcctgaagcagatcttcctcatcaacgagaccgccatgacggtgcgcgaggccgagaccctgaccccgaagctgctcaagaaggccaagctcgccggtctgtccgacgtgcaggtggcccacctgcgtggcttgggcgatgaaggcgagaacaccatccgcgaactgcgctggacctacggcctgcgcccggtctacaagaccgtcgacacatgcgccgccgagttcgacgccgccacgccgtactactacagctgctacgccgacgagaccgagctgcgcccgcgcgaacgcgaggccgtgatcatcctcggctccggcccgaaccgcatcggccagggcatcgagttcgactacacgtgcgtgcacgccgtgcaggagcttggcaaggactatgacaccatcatggtcaactgcaacccggagaccgtctccaccgattacgacatgtccgaccgcctctacttcgagccgctcaccttcgaggatgtgctcgaaatctacgaggccgagaagaggatgggcccggtcaagggcgtcatcgtccagctcggcggccagaccccgctgtccttggccgcgcgcctgaaggccgccggcgtgccgattctcggcaccaccccggaatccatcgatctggccgagaaccgtgagctgttcggcgaggtgctcaagaaggcggagatgaacgccccgcgttacggcaccgccctgagcctcgaagaggccatggacgctgcccaccgcatcggatacccggtgctcgtgcgcccgagctacgtgctcggcggccgcggcatggaaatcgtctacgatgacaagcagctcaccaagtacgtggaccgcgcgcttgccgaggccaaggccgataccgtggtctccggccgcctgccctccccgctgctcatcgacaagttcctgcaggacgccatcgaaatcgacgtcgacgccctgttcgacggcgaggaactgtacatcggcggcattatggagcacgtcgaggaggccggcgtccactccggtgacgccgcctgcaccctgcccccatccaccctgtccgacgaccagatccgccgcctgcgcgaaggcacctacgccatcgccaagggctgccacgtgcagggcctgatcaacgtgcagtacgccttcatggccaacacgctgtatgtgatcgaagccaacccgcgtgcctcccgtaccgtgccgttcgcctccaaggccaccggcgtggcgctggccaaggccgccgcccgcatcatggccggcgagaccatcgccgaccagcgcgccaacggtctgctgctgcccaagggcgacggcggcgacatccaccccggccagcaggtcgcggtcaaggaatccgtgctgccgttcaagcgcttccgcaccccggtgggcaagaccgtcgacatcctgctcggacctgagatgcgctccaccggcgaggtcatgggcttcgaccgcgacttcccgcacgccttcgccaagagccagctcgccgcctacgatggtggcctgccgacccacggcaacgtgttcatttccgtgaacgacaccgacaagcgtcagctgccgctgctcgccgtgcgcctcgaagagcttggatttaagctctgggccaccgagggcaccgcctccgtgcttcgccgttacggcatcgagtcgaacatcgtggacaagatcagcacccgcgtggacaccgatccggaagccccggtcgaggtgcatcacgccgccggctccgtgggcaagaacgtggttcagctcattgaggaaggcaagatcgacatgatcctcaacacgccgaactcgcgcggctcccgttccgacggctactccatccgtgctgccgctattgcagccgatctgccgcagtttaccaccatcaccgagttccaagccgcactgctggctatcgaggccgtgaagcataatgattatcagatcatgagcattcaggagcattcgaagcagctgttcgaattggagcgacgggagttctgatgactacacccagcagtgaggaattgcaggcacaacgttcggatttcggtctgcgactgagcaattcaatggccaaatacggaccgctgtgtgtgggcattgacccacatcgcaagctcctcaccgactggggatacaacgtcgacgccgaaggcgccgaactcttctccatgcgtatgctgcaggccgccaacgggcgcgccgcagcagtcaaattccagacgtcgatgttcgagcgttacggagccaaaggtttcgaagcgctcgagcgcgtgctctacgcggcacgacaaatgggcgtcatcaccatcgtggactgcctgcacggcggcctgtccaccacgatttccgccatcgcagacgcctatttcaagcccggtgcaccgttgctggccgacgccatcacgctgctgccgtactatggcgcgcgctcgttgaacggcttgattaccgaagcgttggaaaacggacgcggcgtgttcatcgcctccctgacttccaatccggaaggcatgagtctgcagaccgcgttgcgccagagcggcgattacaagggacgtaccgtggcctacggcatcgcctccaccgcgcagaagcataacgtggatatcgaaggcatgggctcggtgggtctgatcatcggtgccaccatcggccaatggatgcaggattccggcgtggacccctccaagttcaccggtccgattctttcccccggttacggttggcagggtgccgaggccaaggatctgaaaaccgtgttccgcggtacgcgcggcaacgtgctggttaccgtgtcccgctttatcgcctcgcatgggccggatatcgccgcactgagccaagctaccgagtcgattgcgcttgacgtacgtcagtcgctgatggaagccactgccgaaggcgcagaaaaccagtaatcagaacggaatcagatgtcgcggcatgcgtacgtatctatctcattgcatacgtcgcatcacgattcatattcttccctgttcgtcggggctgtaacagttaccggtcatctcgccggtgagccgttaccacattggattcataatcgctgcacaccacatcatctccggaggaacccatgactgaaaacacccatgccggccgtctaatcgtcctgactggccctaccgcagtaggtaagggcaccgtggaagccaagctgcgcgccgaccaccccgaagtgtgggtgtccgtctccgccaccacgcgtgccccgcgccccggcgaggttgatggcgtcaactactggttcctcaccgaagacgagttcctgacccgcgaagcggcgggggagttcctggaaaccgccgtggtgcacggcatggcccactacggtacattgctcaagcctgttgaggagcatctggctgccggcatgccaacgattctggaaatcgatttgcagggtgctcgccgcgtcaagcagcgcgccgccgaactcgacttggaagtggtgtacgtgttcatcgcgccgccgagcttcgaagagctcaagcgccgtctgatcggccgcggcaccgaaaccgccgaacagcaggcccgacgcttggaaaccgccaaagtggagctcgccgccgaaagcgaattcgacgtcaccatcgtcaacgaaaccgtcgatcaggccgccgccgacctctggtccgtcatcgccaaagaatacgggctgtaacgtgtgcgaataggttctgttcgtactgagatgtccatgcttggcatggcgtgctcatgtgattatgcgtgttcagtccctgccagtcggccctcacaatagggggagagcctgacggcagggactgattcataccgatacaaaggggcatgagcccccatttgtgcgtcaatcgtttgatatgcaaatgggggcacatgcatgtgtgcgccatcttccaaaaacgtcgaattatgcaaatggggggcacgaataggtgtcggcgtgatgtggtgtggtgcgatgctgcaggtgcggtgtgacatggtgtgggatgccagcggatttcgggtgtttttcctctggcgtcccacagaacctgatgtacggtgccgtcgccggtttgtgggattggcagaattccaatggttctgtggaatggggtgcgggatgccagccgtgtgcatcgtttgacgtgcgtggcgtcccgcacggttgcgggacgccggccccaaattggccgctaaccgtgtggtatcccgcatttctccgatatgcgagaggaatccgtccactataaggactctagcccagcgactaatagtttttcctctatgtgcgaataatacgggctgtaaactaccgctttaccaccaactgctggtggaggatttcggtgctgtttttggccggggattgcttccagcggatcgcttcggattcgtgatgctcggtgacataatgccgcatccattcgaagcactgctgggtctggatggcatcgcttaatgcgcggtgttcctcattgtccgcgatgccgaagcgcacgatcaggtcagccagacggtgatgccgctgcgcggggaacagggcgcggctgatctgcatcgtgtcataatccgcgcaggcaaagccgcagccggcgatatgccgggtgttgtaatccaggaatcgcagatcgaagctgacgttatgaccgacaatcggctcaacggtgggaccggcagccggggtagcgagccatgcgatgaatcggggaagcacctcgtcaatcggatcgaggtcggccaccatcgcatcggtgatgccggtcagcgtggtgatctgacgcggaatcggccgcaagggattcaccagctgctggaattgatcgacgatatgcccctcccgcacgcgcacggcaccgatttccgtgatggcgcaactgttcgggtaaaagccggtggtctccagatccagcgccacataatcggtgggaaagagggcatcgtccatggcgattcgcccgccggcaccatgattgggctgggatggttggccgaaaacggtaatgccggaagtggtcacggaggctcctcatatcagtcggtgttcggtgacttattgtaccggcagcccggtctgacggtaaaatttttccctcccggattttctcggatatattggttaggcggccggcaacatgcggcgcatcgggaagggagcacagctgatgaaacagatagtggcaggcatcgtggcgcatgtggacgcgggcaagaccacgctgtccgaggcgctgctctaccgtaccggtgagatccgcaaattggggcgagtggatcacggcgatgcgtttctggacaccaattccttggagaaggcgcgaggcatcacgattttcgcgcaccaggcattggtggaacacggcgacctgcgcctgaccttgctggatacgccggggcacgtggacttcgcagccgaaaccgaacgtgtgctgcgtgtgcttgactacgcgattcttgtggtctccggcacggatggcgtgcaaggccataccgagacactatggcgtctgctggccagatacggtgtgccgacgttcatcttcgtcaacaagtgcgacgccgccggatttgcccgcgaggccgtgttggctcagttgcgcaggcgtctgagcgatgcgatatatccgttgccggcaatggaacagtccactgagggcagcgcgctaccgttggacgcgttcgccgaagacatcgccaccctggacgaggaggcgatgaacgactatttggaacatggcgcgctgtccgtgggcagattgcgatcgatgatcgccgtacgcgagctgttccccgtatatttcggctcggcattgaaactcgaaggggtcaaggaattcctggacgggctggagacgttcacccgcgaacgtgaatggccggccgccttcgccgcacgcgtgttcaaaatcgcccacgacggtcagcacaaccgtatgacgtggctgcgcgtcaccggcggtgcgctcaaagccaaggagatcgtctcctcatcctcgtgcgccgcggcgtcgacaccgtcgccagcgcaggaggatgatgacatggcgtggtccgagaaagtcgatcaggtgcgcatctacaatggcgccaaattcgagacggtcaccgaagtgccggccggcttggtatgcgcggtgaccgggctgacgcagaccttccccggcgaagggctgggaacggaaccggacgccgaatcgccgtcgttgcaacccgtgttgacctacacggtgttgcccgtcggagcggaatccgatacggccggcacctcgggagcggccaaacgtgggggagccggccatgacagcgcgaatcaggacgatgccgagcatgatgccgccaagtcgggaaccggccgcaatgaggagaacgacaccgccggccagaccgcggcggacaatagctcgccggcccgtccccagttcgatgatctgaccttgcataaggtcatcaccgcattgcgtgagctggaagacgaagacccgttgttgcatgtggtgtgggtggaacggctggccgagattcatgtgcaattgatgggcgctgtccagctggaaatcatccagcagaccctgcacgaccggttcggtctggatgtgtcctttggccccggctccatcctgtaccgtgagaccatcactgcgccgatcgaaggcgcaggtcatttcgagccgctccgtcattatgccgaagcacatatcctgctggaaccaggggagccgggcagcggagtcgctgtggcctcggccctgtccgaaaatgatttggaccgcaattggcaacggctgattctgacccacctgaccgagcgtgagcatctcggtgtgctcgttggcgcaccgctcaccgatatcaagatgactttggtggccggccgcgcgcatctgaagcacaccgaaggcggcgacttccgtcaagccacgtaccgggcgattcgccaagggctgatggaagccagggcaggagtcagtggccggcccgagacgccggtcgagagccggccggacaccacaggggagggcaactgccgactgctggaaccgtggtaccggttccggctcgaagtgcccgcagacatgatcggccgtgctatgagcgacatccagcgcatggccggcagcttcgaatccccggtcaccgatgacgaatacgccgtgatcgaaggcgaggcgccggtgtccgaaatgcgcgactatgcgatggacgtgaaccagtacacgcacggccatggccgtttctccgccaccttcggcggctacaagccatgccatgacgccgaacaggtcatcgcagccgccgcctacgatcccgaagccgatctggacaacacccccgactcggtcttctgcgcccacggtgccggctaccccgtcaaatggtacaaagtccccgaattcgcccacgtagactacgccatgtgaggtggtgactaccaaatctgcggccgaatgaatccgttggcctccaagaaccgttgaatatcgcgcatttccggcatattgatcgaatgggccatgcccggatacacctgttcggtcaacgtgccgtgctcgcgccagaactcacccatcgccgccacatcggctttcgggaagatgtcgtccgcagcaccatgcccgtagaacacgggcggcttcaacgaagccaattcggcatcgcccgcaacggaccccggtgccagccatccagagcaggagacggctgcggcatatcgcttcggattgaaacgcagcagatgcgcggccaagaggccgccctgcgagaatcccatggcaaccaccggccgagtggcgggaatatgctccgtgacccatgcatcaatggcttgggcggcctcagccgcctgcttgtccaatgattcgccctccggcacaccttcatgcgcccacgcaccgaaccatgtatatcccatgccataggcgatgggtgcctgcaaactggcataatcagccgaaccggcaccgcaatagttcagcagatcgggcagatcgtattcattggatccccagccgtgcagcagcacgaacaccggggcggtttcaggaccggtcaaacgggtcaaggccttggcaatcttcatggctcccagtgtagccacgtgaccgccgcgaccgcatttgaacggtccataagcaacccatatagcaacgccgttccattcaagtgtccgatacgttatcgtcgtagacgtgccgcacggggaacggcctcgtgcacagcagccatagagaacaccataaagggggtgcgcaatgaccaggttcaatactcagctcgtccacggactgccggttggagacaacaacaccggagccgtgaacccgccgatctacaactcaacgacatatgccttcgagaaggtcgacgcgatgccccgctacgactatgcgcgcagcggcaatcccacacgtgacttcctggaacagcagatcgcccagcttgagcagggaacgcgcggttttgcgttcgcctccggcttggcggcgattcatgccgtgctcagcattttcaagcccggcgaccgtattattgtaggggacaacatttacggtgggtcgtattcgcagctcaatgagttctttacccgttggggcgtcgtggtcgagtcagtcaatacccaggacattgcagcgttggaggccgccgtcaagggcgaccgcgcgaacggcatcgcgcctgcgcaagccgtctactttgaaaccctgaccaatccgctgctcaaggtcaacgacgtacgcgccatctccgcaacagcccgccgttacggtgcgctgtccatcgtggacaacacgttcgtgaccccgtacctgcagcagccgctttcccttggcgcggatgtggtaatccactccgccaccaagtacctggccggtcactccgacgtcaacgccggtctcgtggtcgtctccggtgaggatttggccaatcgcgtgtacttcgcccagaaccgtcttggaggggtactggcgcccactgaatgcgattcggtgcgccgcggcatccagacattggccctgcgcatggaccggcagcaggagaatgcgaatgccatcgcgcggtacctgctcgcgcatccgctggtcaagtccgttcattacccgggcctgccgggggccggtgaccagcgacttgccgccaagggactgaagggtgccggtggtgtgctgagctttgaagtagtgcctggtgtggacccggcggatgtgctcaacaatctgcacatcttccgattggctgtgtcccttggtgccgtggaatcgcttgcggaactgccttgccgcatgacgcatttcgaactgccccgggaggagcgtctgaaggtcggcatcaccgatgagctggtgcgtctcgccgtcggcatcgaggatgcgaacgatctgatcgaagacctcggacaggctttcgatatcgcctatgcccgatacagggaacgccacatcggctccgatgtacttggcgcattgactccgaaggtgttcgcttgacgtgatatggccgtatgtgccgttacgatggatgcgatgggaagccgcggacgaagcgcggcgcgcagaaaggacatggcatggccattgatgtgtacggcgccacatggtgtggagattgccgtcaggcgaagaacacgttggatgagctgggtgcggcgtatatctggcataacatcgaagaggaggacggtgccgccgatcgtgccgtggccatcagcggccagcagcatattccggtggtgctgtacgatgatggctccttccaggtggagccctccgccaaggacatcaggaacaagctgcgggagttgaatctgctgactgactgactgactgattggcagggctctcttacggcatgaggcgtgtgccaccgttggattggtggcacacgcctcatgcgttgttgcggttgtgtgtggaccgtacttacaggcttctgaatcgcgcctggccgatggtcacatcgaaggatttgccggcgggggcgtcgtactgcaattcggtgatggcgttgcattgaccctggacgaagcgccagacacgatgccctcccacatcgagatcgaaatagtgctcatcgggccggtcggcgtccccgccttccgtgagacccaaaccaaacacgtcggaccagtgcgcggccaccgccgcggggtcgggcaccgcgaaaatcgcgcgacgggtgtccacttcgccgatggcatgccggtgcagcagtccgccgctctcgtagcgggccagttgctcggattcgctcgcaccccagtcgatgacgaacggatagcgcaggccctgatcatcgcccttgatccatagcaaccgccagcgtatctcctcaccggcggccgtcgtgcgattgcccggaacgatatggccaagatcaaggcctttggccgtgagccgttcggccgcctgttcgatgccatgcacgtgcaatgccggacgatagaatcccacatactcgggcagcagctccccggcttcatggaatatcagcccatggtccggcgtctccgacaaggcttcctcgcggtcgtacaatgccaggaactccaaatagttatcggcgaagtaggccagggagttctccgtgccatgccccacatgcttgccgccgtattgggaagtcagccctgcgtcggcgaacgtccgttcggcggacttgaggtcattcacgaattcgaccgtatggtcccaggtgaattgttgcgtcatgatcggctcccgcctttactttgcatcgccgccgagcgccgtggtgcgctcgaccgccgccagcaccgcggattgtatggatgccgcgaatccggttttgttcagggtatatgcctcggtgattcccactccgccgggggagttgttgatattgagcagcacttgaggcagcacgtctttctgtttgaggaattcggtgccgccgatgatggtgtcgagcgcgatggctctggccgcgtcccggggcagaccggccagcacaccggcatccacgtaggcgtcgatgaaatggtagacgatgttcggcgggtaaaaaccggtgattacgtcgataagtcgttcctcgacatacagcactttgccgaaagtgttgaggaacgcatccacgtcctcgcgtgccgcggccccattcagcgccacgccgctgtaaccgtaatccacggtggtgagtgtgttcgggatgatgcgggccacacgccacccatggccgagcccttgctcaagcttggcgatggtatagccggctacgatggagatcaccgtggtcttcgccgggtcgaaacgtcgcgccactgaagcggccacgccggcgacatcgtcttgcggacgcaccgcgattaccacgatgtcggcatccggggcgtccgtcggtgacgccgtctcggtgttgtacgtggatgccagatattcggcgcgttcccgtgagatttcctcaacccagatgtggtcgaccggatatgcggcggccttacgtcgcaccgcttctatgatggcgctcggcatattgcctccgccgatgaaatacagattcgctcccatcggttcacctcttctgatgatggatacggatgtatgtcagttcccgtaataccgcatggattcccgaaccgtcgtcgtttcttccgaaatggcatataggtgttcttgataggcgcttcaaggatgcaatgatttcgcggatggataaggcgctataagaaatgcctgtaatacgtgggcggcattccgcttgacatcggcatcgccgatgcgcttcgatgacggataacgttgcgaatcaggagaagggaccccaatatggtcaatcgtcgcgccgacttccacgccatcgtcaatcatcagtcccggacgccgtatctggttagcgcctggcagcatcttgtcggtcatgaatacggtgccgaggaattcgccaaggccaccatcgatttcgtcaatcgctgggattgggaatgggtgaagatcaatccgcgcgccatatactatgccgaggcttggggctctcggtacgatcgcaacgattatgccggattcgtgctgccgaagaagatcagcgccgcaatcaccgaaccggatgatgtgcgtggagtcaaggaactcgacgttcgtgacaatgagtatttcgccgaggctctggccgccgccgcccttatccggcatggccttgaggatcgtgccgtgctgcagaccgtcttttcgccattgtccgtcctgctgcagatcgccgatctgccgctgtacccgggtgacgattacgccaccgcgacgctccgcgtcgaagatctgatcttcgatcagcctggtgtcgccaagctggcgctcgccaacatcgcccgcacactcgcctcctatgcgcgtgcgttggttcgtcccgagtccgaaggcggagcgggactcgacggcgtgttctacgcgctcaccggcacggtgagcgagggttatttcgacgcgcaacgctatcttgaattctccgaaccatacgatcgcatcgtgattgacgcggtgcatcgcgccaacccggacgccgtggtgctgctgcacacctgtcgtgctgaatcccacccgaattggttcgacgtgaagggtgtggacctgctgcagtgggatcagtatcaaccgggaaacccgcaggtggatgccgacctgacggctgtgccggtcgccggtgccccgtacgacctgttcgcgccggacggtgacgtcgaacaggtgcgccgcgaattggccaagaccatcgcgcttcgtacgggcaaaccgtttttgttggcaccaagctgcacggttccgaccccggcgggcgacgaggcgctgcaggcattgagcgacatccgcgtgggctgagccggtccccatttacgcttcatgattattcgaatagagaagggaacatcatgaccatcaagacaatcatccgtacggcgatcgcatccgtggtcactgcgggaacactgattggcgtctccgcatgcggccttggcggggatgccgccagcggttccagcgacgacaccgtgaacatcggagtcatctatccgaagaccgggcaatatgcgcaatacggcaaactgttccagcaaggcttcgatctggcggttgccaaggtgaacaaggatggcggcgtcaagggtaagaagcttggtcttcgatactatgacacgcagtccgatgccaagcaagacgccgcggtggctcccaagatcgtgtcggacaagtcgatcatcgccgtggtgggtgactatgcctcgcccgcatcctcggccgcgtcgcctatcttccagcaggccggcctcgtgcattacggtttcaataattcggcacccacctttaccgataccggggaccacgtatggactccccaaatcggtcaggacaagtatcagaagaccaacgcggatatagtggccaaaaaagccaagaagatcgcggtggtctacatcgagaacgactggggcaaacaggcctatcggtacttcaagcaggaggccgaaaaaaacggtacccagattgtgtacgagtccagctatctgcccgactccaccgacttgtcgccgattctgattccggcgcgcgatgccaagcctgacgcggtggtcgacatcggctacgggccggacggtgctctggtgatcaataccctgcgcgacaagctggggtacgacggcctgtacttcggtggtcaggaaaccaaggagttcctcgatctcgccggcaaaaacgccgagggttcgatcatcaccggatccttctccgccactggcaccaaggacgccaaggcccagcagttcgtcaaggacttcaaggccaagtacggcaacaacccgggcaatttcgaagtgaccgcctacgaggcgatcatcgatctggcctatgccgccaacaagaccgaaccgacccgtgaaggcatacagaaggcgctgcagaccgtgacggatttcccgctctaccagggcaatggcggcacgttcaaattcaatcggcagagtcgtcgcgccgataacatcgatccgattctgctcatcgtcaaagatggcaagttcgaacaatacgaaggttgattccccgggctttcccatacaccacgaacgaggtaacgcacacaatgtttgatgttcttttcgccggactgatacacggcagcgcctatgcgctggtcgcagtcggcatgtcgctgattttcggcgtcaccaacgtggccaacttcgcccaaggttccatcgtggccgtgggcatgatgatcgcctggtggctcggttcgtcatggggatggggaatcgtgcccacattcgtggcggtgctcgtggttaccgcactgctggggctgatcatgaacgtggcgatcatcgctccgcttgaaggccgtaaaccgattgcggcgctgctcgccaccattggcgtcggccaggtgctcgacaatggtctgcagatcgtcttcgggccacagacccgaccgttcccgaaactgctgcagacctataacctgcaagtcgccggcgtgcgcttcggcacttcggacatcgtgatggtgacgcttgccgtcctctcgatgcttggcttatgggcattcctcaagttcggcaaagcgggacaggccattcgcgccacttcccaggatcccgaagccgccatgcagatgggcatcccggtgaaggccatccgtaacctctcctttgtgatcggtgccgtactcgccggcgtttccggcatcttcgtgggcttgttcaacggcaacatcaatccgatgaacggcggcaccattggtatgacggcgttcgtggcggccacgatcggcggtctaggctccatcccgggagctgtggtcggcggtcttgtgctcggtgtggtggaagcgttcggcatctctctgttcggagacggtgcacatgacctcatcaccttcggcgcgttgatcatcatcctcatcgtgaagccgcagggtctgcttgggccgaagaccgatgtcaaatccgagccgcttaccggcacgttcctgggaggcggcagggcgatcgcgctgccttggtggggtaatctcatcggtgccgtggcactcgtatccaccccgttcttcttcaatgactacctgtccggcgtgggcactcaggtcgccatctatgccatcgccgccgtggggctgacgttgatttccggctccgcaggccaaacgattctgggcatggcaggaccgttcgccgtgggtgcctatgcctccgcgattctggccacgcaggcgcattggcccttcctggtggcgttgcccgccgcaggtgtgatcgcggcgcttgccgcctcggtgctcaccttccccgtatggaggttttccggccattatgtcgccatcgccaccatcggcgtaggtgcggtgatggtggcgatcattcgcctcgccgagccgttgaccaaggggtctcttggcattcagggcattccgttcccgaaggtgttcggcgtcacgctgtacacgcagcagatgatgtatctgcttgacgtgatcgtgctgcttgtcacgttggtcatcgtcatgcgtatccgaaccgctcatctggggcgcgtgttcgaggccgtgggatcggatcgcgaggcttcggaggcgctgtccatccgcactggcgcctataaggcgctcgcgtatgcgcttgccgcgtttttcgcaggtctcgccggttcgttgctcgcgcaccagtacacgtacattgatccgacgatcttcaactcgaacatgtcgattctcatcctgaccatcatcgtgcttggtggtatgaactctccgctcggcgcggtgcttggctccatagtgctgatcggagcgcccgagttgctgcgtttcgcctccgacgcgcgcatcctgctgtatggcgtgctgctggtgcttgtcatcttgttccgtccccagggcctgttcgcccggaaaggctgagtcgccatgaccgattccgagaccgtattttccaccgtagacgccgtgaccggcatcgatatcgacaacgaacgcctcgataacgcggatgatctggctgaatattccgaaagacaccgccaggccgtccttgacgcgccggtgatgctgcgcgtgcgcgagctcgacaagtccttcgaggggctgcatgccgtcaacaaggtctctttcgacctgcatcaaggtgaggtcatttccatcatcggcccgaacggttcgggaaaatcaaccacaatcaacctgatctccggttttctgcagcctgattccgggctcatcgatcttgccgacgagccggttgccggtctgagccctgcggacatgtctgaacggggactgctgcgcaccttccagaacggtcgtgtgttcggcggtcttaccgtcgaagagaacatcaatctcggatatcaccggcgactcgtcgcggcacgcccgttcaaaagcctgcaaaggtatccgatcgcgcgttggctgtcgttgctcgccgagaccggcgtggcgctggttcctggaccgcggactcggcgcgaagccgatgaggtgaacatccgcgtggatcgggaaatcgaccgtttccgtgaacgactgagcgcgcgtcgacgggattgcacctacacgttgtcgtacgcgaatcgtcgtcgtaccgaaatcgcccgtgcccacatcagcgaaccgaagatcctgctgctcgatgagccgaccgccggcatgaaccagtcggagaccgccgaagtgcttcgtcaactgcaatatctgaaagcgcagggacataccatcctattggtcgagcacaagatcgatctggtcactgcattgtccgaccgtgtgcttgcgatggatggcggccgcgtcatcgcgcaaggcgccccggatgatgtgcgcaatgacccgcaggtggtcgaggcgtatctcggcaagcggcgtgaaatgaaccatacccgggtcgccgggcagtcgcatgtgcttgcgatgcagaactccattggcgccgtcgtcgaagtcgagggcaccggtgccggtaccggacgagatgaaaccgggacgttggatgatggcggggatgccctgcttgcgctcgatggagtgaatgtgtattacgggcaggtccacgcgttgcagaacgtgtcgatctgcgtacccaaaggggccatcgtctctctgctgggaggcaacgcttccggcaagtcgaccacgatgaagacgattttgggcatcaatcatccgaagaccggttcgctgtggttccaaggcgaggatgtgaccggactgtccacgcgcagacgggtccaagccggtatcgccgccgtgcccgaggcgaggcgcgtgtttccacagatgacggtggaggagaatctgttgtctggtgcctatacgcgacacgacagggagggtgtggccggcgatctggaagccatgtacgatcgtttcccgcgtttgaaggaacgtcgtatgcagcaggccggcacgatgtccggcggcgagcagcagatgctggcgttcgcgcgagccctgatgagtcgcccgaaaatcatctgcatggacgagccgacgatgggcttgtctcccaaactcgtcgaagacgtactcgaacagatagcgcgactgcgtgacgaattgggcgtttccgtgctcatggtcgaacagcaggccgagctggctctctcgattgccgactatggttatgtgctgcagaacggacgtatccggctgcatggcaaagccggcgacctgctcggcaacgagcgggtgcaggaggcgtatttgggaggagtgaaacaatgagcgaagccgaagggattgagacgtcctcgcatccgtccgtcatcgccgtcacgcaaaggaggttccggtgaccgcagcaacaacccgatcgggcgcatccccgacggcgttcgtggcacttcccgatgctctgaacgctgatgtgcaggaatggtaccgctggttccatcgtcatcctgaactctcctatgaagagttcggcaccacggcgcgcatccgtgagattctggaatcgcatggcgttgaaatcctcgaatcgggactcaggaccggcgtggtggccatcgtgcgcggcgcaagcgccaagcccgtcatcgccctgcgcggtgacatcgatgggctgcccatcaccgagaataccggacttgactacgcttcggataatgccggagtgatgcacggctgcggtcatgacttcaacctcaccgtggcgttgggtgcggcgattctgctcaatgaacggcgtgcctcattgcctggtaccgtcaagatcatcttccagccggcagaggaaggtcgtgccaccgcggagcgccccacgggttccgtgcaggtgctgaacacgggtgtgctggacgatgtcgaggcgtttttcggcacgcacgatgcagccggaccggttggatccatactcatacgtgagggtggcatcaccggcgcggtcgacaaattccaggttgccattcacggcaagggcgcgcatgcagccgaaccggaggatggcatcgacccgatcaccgtgctgacgaacgtggtgcaggggttgcaggcggtcattgggcgcaatctcgaccctcgccatccgcgggtgttgtccgtcacccatatagaagccggcaattcgtggaatgtgattccgcaggatgccttcttcgaaggcacggtgcgcactaccgagccgcaggaccgggttctcgccaagaagcgcgccatcgccatcatcaacaacacggccgccgcctacggtgccactgccgatgtctcgtggttcttcggatcgccttccgtgttcaacgacgccggatggacccgcatcggacgagaagtcatcgccgagcaggggcttcacgcggatgatgatcatcctcaactgggaggagaggatttctcatattaccttgatcgcaagcccggcctgttcgtgtacatcggtgccggtgagaccggtgccgcgcatgggccgacgttccggccgaatccggccgccatcggctacggcatacgctttctcacggccatcgcgcagaaagcgctcaacgagttacgatgaacgcaccccacctatcattccggctgataccgaacgataagaaatgcctgtacccgcaagcacgtgttacggtgcttcgcttcctacactggtgccgtatcagtatgggcgtccgtcggtgtttcctaagggacggcggcatgacattgaggggataatccatggcgagggatttcgttaccgcggctattcacggcggctatgaccgggcggctcacggtgaggcggcgaacccgccgatttacgccagtgcggcgtttgacatggtcagcgccgcacatggtgacgcactgggtgccggcgaagccgagggcttctcgtactcgcgtgtggcgaatcccactgtggatgtgttcgagcgtcgtttggcggaactcgaaggtggcgtgagcgcggtggccgtcgcctccggcatggccgcggtgtcgtatgcgctgttgtgtgccgccgaaggtggtggtcgcatcatttctccgaccaacctgtacggcgcttccgtcgatgccatggagaccttcttcccgcagttcggagtccatgccgatttcgtgcgcgacatcaacgacctcgatgaggtcgcttcgaaaatcgggccggacacccgcgccatctacaccgaatccgttgcaaatccatccactgaaatcaccgatattgaaccattggcggaactcgcgcatcgcaacggtattccgcttatcgtcgacaataccgtgcccaccccgtacctcttccggcccatcgagttcggagccgatatcgtggtgcattccaccacgaaaggcatcaccgggcacggcaacgccatcggcggagtggttatcgacggcggaaacttcgattgggccaacggcagattcccacagttcaccactcccgaactggtcgtcagcgatgaacgcaaaggaatagcgcgcagcttcgccagcagattcggccgcgaggcgttcattcgccgtgtacgcatcaaatatctgcgcactttcggcgcggtgcccagcccgttcaatacatacctgtcgatggtgggattggaaacactggctgtgcgagaacggcaggaagtcgaatcggccacgcgtattgccgagcatctcacgcatgcgccgcatgtgctcaaggtcaattattccggtttgggcaacacgggtcagtatgatctggtcgccaaatacttccccaaaggaatcggcacgatactgtcgttcctcgtcgacggcgatgagaacaacgtgagacgaatcatcgacggaaccgaggtattctcctatgtgccgaacatcggagacgcgcgttcgctgattgtcgatcctgcgcgcatcacgcatcgcgaggttcctttggatgcgcgcatcgccgccggagtcagcgataatctcatcagactttccatcggattggaaaacgtcgatgatttgattgcggaccttgaccaagccattgccaacgcatactgacgtgtatcgcttacgtatgcggataattgttcgttctgagaaaaacctgcgctgttattcttggggcgttgtgaatttgggttgttgtattacgaaagaaggaacaggacatggctattgacgtctatggcgcaacatggtgcggtgattgcaagcaggcgaagaacacgcttgaggagcttggcaccgaatatacgtggcatgacatcgaaaccgaggatggggcggccgatcgtgcggtggccatcagcggccagcagcacattcccgtggtgctctatcctgatggcactttccaggtcgaaccgtcggctgtggatatcaagaacaagctcaacgagctgaatatcaagtaaagacaagagttgtacgagtttgacgatctgctgcatctgtgagcgaacaatacgtcggcgtccgatgtgttattcattggtgtgaatagcactccataggcactggatataaccacgccgaaacacaggtgagcaagcgcgtctacggtaagggattgtgcttcgcgaacgagcgttgacgtgcataacagcagcgaaaagggagtatcgggatgattcggatcaggggagtgagcaagagctttgccgacaccaccgtgctggatgggcttgatcttgacattcctcgacaaaatgtggttactgtcatcggcccctcaggctccggtaaatccacactgttgcgcattctggatttccttgagcacgcggattccggtaccgtcgatttcggtgatggtcttgtggatttgaccactaccaaatctgccgacattcacaaggtgcgttcgaaaatcgggttcgtgtttcagaactacaacctgtttttgaacaagacggcattgcagaatgtgaccgaaccgttggtgtattccaagggaatcaagcctgatgaagcccgcaagatcgctattgagcaactcgatcgtgtgggacttgccgattttcatgatcggtatccgagcacactgtccggcgggcaacagcagcgtgtgagcatcgcccgcgccgtggctatgaatcctgagctgttggtgcttgacgagcccacttcggcattggatccggaaatggtcaacggggtgctgggggtcatcaagcaactcggtagcgaaggcatgaccatgctgatggtcacccatgagatgcggttcgcctatgaggcatcgaatcatgtggtgttcatcgaaggaggccatgtggtcgagcagggtgatccgaagcggatcttcgaacatccgcaggaggagcgtaccgtcgagttcctgtcttcaaccaacaatgtgctgatgattccggtgactcggtagaggcgtttcacggctgttgtaattaattgtgacaatatcaagagaggggtttgtcatgttcaataatcaagtgattcgcaaggctgcggctttgctgtccggtgtcgccgtgctggtttcggttgccgcatgcggttcggcttccgcttccaactccagtgcattggagcaggtcaagcaggccggcaaaatcgtgttcgccactgagggcacctatgctccgttcagttaccatgactccaaaaccaatgagctgaccggttacgatgtcgaggtggccaaggccattgccaaggaggtcggtatcaaggccgagtttgccgagggcagcttcgactccctgcttgccggtgtggatgccaagaagtacgatacggttgccgatcagatttccgccaccgacgagcgcaaggccaagtatgatttctccgaaccatacacctactcctacggtgtcgtcattacctccaaggagaacccgaagaacgtcacttcgttcgatgacgtcaaggggcttcgcgccgctgaaaccggtacctccaactggaacaagaccgctcaggagaagggcgctactatcgttcaggttaacgatttcggtcagcaggtcgatgccatcacgtccggtcgtgcagatgtgtcattaaacgatggccttgctgcgctcgactacctgaagcagaagccggatgcggacatcaagattgccgccaagtccgagaagactccggccgcctacctgccgttccgcaagggcagcgatgacttggtcaaggaagtcaacaaagccattgtcaagctgcagaaggatggcacattgaccaagatctccgaaaagtactttggcgaggacttctctcaggagtgacatgtttcccggctctcctgtaattaggggagccggaaaatatgagctggcctcgtgaagattacgagcagacgcaacatataccacacaacaaaggatgaccaatggacgcacgagtatggggaatagtcgtagattcctttgctaagctactgattcccggtatcactgtgaccattccgctgacgctgatttccttcgctctcggtttgatactggcgattgtggtggcgctggtgcgtgtggctaaagtacctgtggcctcccaaatcgcgtggttctacatttgggtgtttcgtggtacgccgttgctggtgcagttgttcgttatcttctttggattgccgtccgttggcattacgattccggcattgccttccgcggtaatcgcgttctcgctgaatgtgggcgcctatgccgccgaaacattgcgtggtgcgattcttgccgtgcctaagggacagcttgaagctggcttggcggcgaacatgccgtatgtgacgattatgcgccgcattattctgccgcaagcattccgctccgccttccctgcattgttcaactccttcatcgcattggtcaaggacacgtctctcgcggcgaacatcaccgtggtggaaatgttcatgacggcccagcgcattgtggcgatttactacgagccgctggtcctatacattgaagtgggcttgatctacttgctcttctgcacgttgcttggatggcttcaggattactgcgagaagaagctcaacgaacacttctgatgtgtttatatggcggcagtgcttgattcaagtcgggtgtttccttggttgaaatgcccgactttgttgtttctgacgtgcgacttggctgattcaaacattagtgcacaagatgtggctgccggagtgaacggaacatgaaatctgacgttcgctttcttggacttgcctgtgagagctatcagttcccgggcgtgcgatggtagcatggatggtgttggggcgcggcacaacgatatgccgtgcttgacccttgtgagaggagttttatatgaccatcgcaagtatgttgggcggaaccatgctgttggtgctaattctattagtcgttcttatcgtgctgctgggcgccgcattgttcatcgttccgcagcagcaggcgtacatcatcgaacgcttcggcaagttcctgaaggttcagttcgccggcattcacatccgtatcccgttcgtcgaccgcatcgccatgaagaccaacatgcgcgtcaaccagctcaacgtgcagctggaaaccaagactcttgacaacgtgttcgtgaccgtcgtggcctccacccagttccgcgtgaacccgaacgacgtggccaccgcctactacgagctgcgcgatccggctggccagctcaggagctacatggaggatgcgttgcgctccgccatccccgctctgaccttggacgacgccttcgcccgaaaggacgatgtggcgttcgacgtgcagaaaaccgtcggcgccgagatgagccgtttcggcttcaccgtggtcaagacgctgatcaccgccatcgatccgagcccgcaggtcaagaacgcgatggactccatcaacgccgcccagcgcgagaaggaagccacccgccagcgtgccgaagcccagcgcatccagatcgagacgcaggccgccgccgaagccgagaagacccgtctgcagggcgagggccaggccaactaccgccgtgaaatcgccaatggcatcgtcgatcagatcaagagtctgcaggccgtgggcatggacatcaacgatgtgaacaacgtggtgctgttcaaccagtatcttgacgtgatgcgttcgttgagtgaatcgaacaacaccaagaccgtggtgctgcccgcctccacgcccggcggttaccaggacctctacgagcaggtcaccaaggccatgctcaccgcggccgagacgaacgacgccgcacctgccgccggcaaatagcggtgcttgtggccgctagaccgcataatggcgtatgtatcagtgaagcccctcccagtgaggggcttcaccgcgtttgatgggcttatgacacggaaaaacaacgattgtgccatcgccggacggggtctgacgtcattgcgccattgtgtaatgggctatggcagaatcgttgttttttgggcttgtgctatgcctgaaggaatgccggaatggcttcggccgccgcatatcccttgcgatacatcatttccaggccctcgaaattcttcttcagggtgttgagaccatacaggtcttcgggtgcgaggatcagcactttgccttccgcctcgtaatgcttggcgagttcgagttcgtcgttgtaggtcttgtagcgcatacgcagcttctcggctgcggcagggtgggagcgttcgaggatgcgggccggagccagatccttctgctgcttgcgcacttcgtcgcgcaggcgggagagaatcaggatcacgcgatcatagccgtcatccagcgccttctgtaccgggatcggatcggcgatgccgccatcgaaatacggcacgccatccaccacatacggctcgcaggccaccggcacggcggacgaagccttgatgatgtcgaaatcatcgaagcgtacgcgcgacttgtcgaaatacttggtcgagccgtcttcggcattgcaggccaccacggtgaatccggtcggattggcctcgaacgccgcgaaatccaacggattctcgccatcgtgattgctcagcgtgccgtagatgtagtcgaggttggcaaagttgtggttcttgaagaagctttccgcgctcgcgtactccttacggaaggcgtatctggtgtagaaggtgtggttgcggccgtgctggcgggcgatgaacgaggtcatattggccgcgccggcggaaacgccgtagcacatgtccacgtcgatgccgtcctccagcatgcggtccataacgccgcagccgaaaatcgcgcggaacccgccgcccacatcaatcatcgcggtcttcagtgccatatcagcctcctattcatcatcatgcatccgatcacgcattcagcaggtcgcgtgaaagccgtgtaacacgttcggacagatcggaattggcgagttccacgccgccggtcgcgtcttcgggtgccagtttgcccagggactccagcacaacgcccagatggcgcacggtgccctcattgccgtcgatgacagcagcccgttcgggcagcagctcgcggaagtagtcgcggtaaaacacgaaatgcgtgcagcccagcaccaccgagtcgatgtgctccatgtcgtactggtcgaagtagccatgcagcgtgcgcatcaccaggtcatggtcgccgagccgcccggattccacaatctccaccaagtcggggcaaggctccttgaaaatcgtgttgttggaatcgaatcgatccatcagcttggcgaacttccgctcacgcaaggtcaggggagtggccgccacaatcaccctctggggaatatgatgcgggtcggaaggcacgtcaccccggtcgcacgccactttcagggccggctccatgccgatgatcggaatatcgtagtgttcgcgcagatcgttcaccgcggcggaagtggcggtgttgcatgcgatgaccacggccttgatgccttgacgcacgaaccgttcgacaatatcgaaactcagggccctcacctgctcaggcgtcttgacgccgtacggggcgttggccgaatcgccaaaatacagcacacgctcggccggcatatccttggcgatttggcgagccacggaaataccgccaagacccgaatcgaatacgccgattggagccgaagagctcatgcctgaatcctccctatagccatgcctgcaaccgtatgttgccgcgaccgatcacaaagccgattgttttgcggtgttgtttcgctccctagagtactctgaaagccatgagtcttccgcaacgagtaaccaagacacacgcaaccggcaatgatttcgtggtgtacctcgacaagtccggcaaattcgagcccaccgccgatgaggtccgattcctgtgcgaccgtcacttcggcattggcggtgacggcctgattcgcctgacacggcctgatttcgtgtctgatttaagcgatgatcagctttcggacgtactggccgggggcgcgaaatggttcatggactatcgcaatgcggatggatcgttggcggagatgtgcggcaacggtacgcgcgccatcaccttgttcgctcagcgcgagggcgtggccgactccaccgagccgttccgcctcggcacccgtgccggcgtcaagattctgacgccacacggcaatatgaggccgtacggagccaacgtgttccaggtcgaaatgggggagtggaagatcggcgaaaccgacgcctacgaggtcaccatccccggcgctgagggctcggcgcgcggcacgttcgtggatatgggcaacccgcacgtggtcgcggtgatcgaggatgccttcgcgtccctgccggtggtcgaggcgctggatctggtcatcaagcccgtggtgagcccgaccatcgaatccgaccagaatgtggaattcgtgcgggtcgacgacatcgatcagaacaccggcgtgggtgaagccacgatgcgcgtcaacgaacgtggctgcggcgaaaccctgtcctgcggcaccggcctgtgcgccacaggcgttgtgctgcgggccaagaccggcatcagccactgggacatcaccgtacgtggcggtaccctgcgcgtggacgtcaccgacagcgacgtgaaactgaccggagcagccacgctggtcgccgatatcgatttgttgtaaaggaatcaggcagcgaacagggccgcgccttcggtgacgatgatgagtaccacgatcgccacgatccacagtatgtcgaccatgaggtcgatgttgaggcggtaatacttattgagtccggccggcaccgccgcgacatcggcctcgctgtcgccatcatcagccgccacagccttacgtgacggcaatccctgcacggccacggtcgcatggctcaacgccatgaactggatggtggtggagaacatcagggtcaggcaccacgggcacagcgcgtgaatcacgaacagcgactgtgtgctcagccagtacgagtaggccaaagcggccagtccgcccagccacgtgcaggtcgcgaaccaacgcggcaccttcacacgagccaaacagatcaccgcgatggtaatgaacaccgattcggcggcgatgccgaagaacgcgttcggatagctcagcccgccgaacttcacgatttccgcctgccaggactgggccaccgccgaacaggacaccaccgagttcagatcgcagccgagcgcggactccggatgcctagccaactgcaaagtctcggcggacagaatgagcgaggcccccaatgccactgccgaggcgatcagcatgatgagatatgtccaagtggcactgtggcgccatccaatcaacggtcgcgcctccgccaagccaagcggcgtggtgttcgtggtgctggatgatgtgtcggttgcggtgttacgagtcatcatgcccctttcgatagcgctgcgctccagattagcctctgcggttgtcagctgagtgccggatgtctggtcttggccgttggcagaaggtgacgacctgtctgcgccttgcgtgggaatgctgagatgaggttacgatggaaggtatgactggatatgtgatgcctttggagccgcccgccgtcgggtgggacatccattgccataccgtcttctcggatggcacggaaacgccggccacattggccgaacaatccaaggcattgggactcaagggcgtggccatttccgatcatgacaccaccgccggctggccggaggccgaagccgcatcccatagggtcggtttgccgttgctccgcggcaccgaaatcaccgccacggatgagaacgtctccgtacacatgctcggctaccagtatgatcccacgaatcagcacatcacggacttgttcgccgatactcgagccgcacggttgcaacgcacgcagcgcatggtcgaattgttgtctcgtgattatccgattacctggcaatccgtgctcgcccaagtcaaggagggtgacaaaaccaccattgggcggcctcacatcgctgatgctttggtgagtgccggcgtatatcggactcgttcggaagcgtttgcgaatgcggtcagcgcctcatccaaatactatattcccacgccctcgccgacctctcatgaagtggtggccgccgtcaaaggggcaggtggtgtgattctgatcgcccatgccggtgatgtgagccgtaaccgcagactgctgtccgatgaccagatcgaagcgttgatcagcgagggattggacgggctggaggtatggcaccgaggcaattcaccggagcaacgagaacggttgctcaccatctgccgccggcaccagctactggtcaccggcggatctgactggcatggcaaaggcaaaccgaacaaactgggggagaacctcaccgacgaggccactgtcgaagagatcgttcatcgcggcgtgctcccgttatatcggtgattcgcggcaatacaaagcggccttgagatgatgcccaaggccgcttatgcgcgattcacggtcacagcgtgccgaaaccgacggcgtgcttggtttcggagccgatgatcgcgtaaccgagtgccttggcgggcacgatgatgcgacggcccttgtcatcggtcatatcgatcgtcgcgttgtcggccacggcctgcgcgatggcctggctcacattatcggctgattcgtcggtgctgaagttcaccggtcgtgccacgttctgaatgcccagttcgatatccatataaggctccttgttctgccgtctttgtgacgaacatcatggtaagtggccgtcaccggccgaggttctgtactctattgtgccgcgtgtctgcgtcgtcatgtgcggtgttacgcgctcggcgtggcgcggaacaccgcacacgacattatttggatgatgtggatgattcggccagcggattgccctcgctgtcatacccgtccaacccggcacgggcatcgcgcagagcgcgttcttcccgctccaacagcggaatcaccgtggtttgggcactcgaggctccgtgctgaacgaaactgtccggagtatcgtcattcaccgcatcgtcggtcggggcggcggattgagatgcaggggaagcgtcggttgacgtcgtgccgctatgcccgttcatactgaggagctccttcagcgtgatcgtcaccgaagaatgggaagcgccatgtgagggctgcggtttggtcgatcccgtaccggttgcggtgccggagacactcgcttgcgggtgattggcggtccggtcagcatcgggttcgacttccggggtaagatccacgtcgccagcggccacgatgtcagcggaaccggtgcgatctggatcgggcgtgtcgtccgagacctcggccgccgcggtaccggtttcggactgctgcggttgtgcgggtacctgcgtggcgggtgcctgatgacggtcgtcctgcaacaatgtgccgacggtgattgtggagggggaaccgggctccgtcgacgcggcggcggccgaccctgcggctggggccgatgccggagtgtgcttgatcacgcccaactggtgtgcgagtcgttcgacctgtgccttgaactgcatgatgcgattgttgtccgcacggttcaacgcctgaatgaattcgcccacctgttccatctgcagccacaggttggccctgagcatgatgagatcgtcaagtcgagagcccatcatgcggccgtatgcggagagcacggcgttgcgatgggattcgtcgagcttgccgaaaatccaggcaaggtctcgtgccggatcgttgacctgcatatcctgccagttggtcaccgtggtgatggtggaaccggagaacaggaagtcgccgtcggagaatccgccgtgaaccgtgcaggtggagaacgaccatagtccctcggtgtccatgatgcgcgcccagctgtcggtgatttcttggggaacatggccggcggagcgtaagcggcgaatccaggcggtcagctgcgaacgaatctgaccggtggtgactaccggatatttggcattggccagaaaagtcgaaggcaggcgatgaatggctccgatggaggtgccgacggccgcgcagtcatccaatgtcaacaggtcgagaggacgtgcctgaccatcacggtggacggcgatcatcacggtcgtctcgcctgtgggaccgggcttgcgcggggtcagcggtgtggactccgcctgggcctgctgccccacggcctgtgcggtggccgtctggccgggttgggaaacgtctcccgggacgaatgcgaccacacggtccatatcgaagccgaggccaccaagctcgcgcgcggctgccagtgtctgcgccgctttcacacggcggatcagacgtgtacgcccttccttgctgtcagtggcgtatacgtcgtacaacttgcccgaagcatcttggatcacggtctgatcgatgcctttggcctcgtcggttgcgctggcctgcacgttctcgcgtacgccggccacccccagattcggcaggacggctgaggcgagtgccgccaacatataatcgctacgtttcatcacccttccacactaatacatccgtggcgattcgcaccgcagaatgacacgcaaaacgcatgattctggcgatgttttgtcgtgagcccgattcagccataggcgtgagtcgtgccgtgagcgcgaatcgtgccacaatggacgcatggaacaggcgcaggggattcttgaggggctcgatgagcggcagcgtaccgccgcgactacgttgcaagggccggtgcgcattatcgccggcgcaggtgccggtaaaacccgcacggtcacacggcggatcgcctatgcctgcgccaccggggcatggaagccggagcgggtgcttgccgtcaccttttcggtaaaagcggcggcggaaatgcgcgcacggttgggccagctcggcataggggaaggtgccggacgttccggttcgggtgcgggaactgccggagtcacggccgcgaccttccactcagcggcattgcatcagctcaacagcgtctgggcggacatatgcgaggctccattcccgcatgtgatcgaagatcagcgtgacgtcgtctcccgcgcgatcatccgcgccaccgcacgtaccgatgccgatccgctgaccgttcgcgatgtgctcgccgaaatcaattgggccaaaatctcgttggtggcggtggaagattatgcccgggcctgtgccatcgcccatcggcagccgcccgccggacttgacaccgcccggttcgccgacgtctacagcgcctacgagcaggaaaagacctcgcgtggcgaaatcgattttgacgatattctgctgctcgtatgccatatcatggatgattttcccgaagccgccgcccaaattcgttccaccatcggctggctcaccgtcgacgagtatcaggacgtctcgcccctgcaacacaggctgctgaccctgtggctgggcgggggaggacctgacggcaagagcgcgatgaaccgcaacgtatgcgtcgtgggcgatccggcccagaccatctactcgtttgccggtgcctccagctgggatctgctgcgtttcgccgatgaattcgggccgctcgccgccgatgtcaatctcaacaccgactatcgttcgacgccggaagtcgtgaatctcgccaaccgggtgcttgcggccgcgccgaaccgtgaggattacctgaaactggtttccgcccgcgaatccggcccgcgcgttacccgaaccgcttatgagagcgatatggaagaggcgcagggcgtggcggcacgcatcgcccggttggtcgccaacggagccaagccgtccgattgcgcgattctcacccgcatcaacgcccaacagccggtattcggtgccgctttgcgcaatgcaagactgaaataccgcgttcgtaaggattcgggatggcaatcatccgcgctcgccgacgatgccgcgtccaaacgtgcgctattggaggcgatgggtttggacgccaccggacttgccgcaaacgacgatcccggcgttacgatttccacgattcacgcatccaagggtctggaattcaagcacgtgtttctgatcggctgttcggaaggactcttgccgtacggttcgccggaaacgggggatgcgctggaagaggaacgccggcttatgtatgtgggcatcacccgagctgaggattcgctgcatttgtcgtatgcgcggaccaaggatggttatggagcgcaacacagacgcccatcacgatttttgtgacgggcgtcgttcatgcatactgaatgctcctgaacattcaggagcgggaattggccgaaggccggttgactatgcctgcgtatcctccgagttgccgttgccgccatcttctccgtcttcgccgagaagcttggacagttcggcatcccaatcgatatcgccggtcttgccatctgcggcagggtgggaggcggaaccgttggcatcggaagaggagcctgaaggggcgtcggatgacggagacgcgccatccgcgggcttgtcgctaggcagcgaaggcagcagatcgggatgcgaccacttggcgtcacggccttcagggccttcggcggcggtgatcatctcccacaatccggcggcctcgcgcatgcgcttggggcgcagctgcaaaccgagcagactttcgaacgtacgctcggcggggccacccatcgcgcgctcgcggcgcatcatctcacgcaactgttcgatatgaggcagatgggccataccggcgcgccacaccacgcaatccacccagccctcgaccatcgccagcagcgattccagcgaagccagcgcctcgcgctgttcgggagtgtcggggatgccgaccttggtgagattcaccgcgccggaaatcgactccggatccatcgacgtggcgtcacgcagctgttcctccatcgcatccagatcgatggagatgccgcgtgcgtacttgccgatgagcgcctcgaaacgcggcatcagccacggtaccgaggcatacaggcgggcgtgagccatttcctgcagggccaggaaggaaagcacttcagattcgggaattttctcggtggtctcgaatccggagagcgcagcctcgaacgcggcggcgtcggcggaagcatcggagccggagacttgggcggtaccgtcagttgccggagtatcgctgttgccggccgaagtgaagccaatgggattggcggaagcgtcggtggatgtggagaacggattgaccgagtcggttgaagtgccggccgtatcggcctcgggcgcaggagtctcaccgttcagcatcctcgcgtattcggtggcgttctgggcaatcagtccaccagccggattcttcagcaatgcgatgccctgatcgaaactgccatgcacttcatggctcagattgccggccgcatgccccaactgcatggcaaaggacgtgttgcccagcagcttcatcagctgggctggatctttcatgccgtcgggaatcggaatcggcaccggtccggcgaacatgccggcaatctcgccatcgccgaacgcgccgccaagacgctccgaaatcaccgaagccaaagcgtcgttcatcgactcggccacaggagctgcgaacttcgcccactggtcgatggtgccttccacccagccggcgcgggtcagcacatccggatcgccgggcgcgggattgaactcgcaggcggtatccagccacaggttcgcctcactcatcgcgcggcgagccgcctcgccatccacggcggacacgctggacgcggaaccggaggcgttggcctgctgcaaggcaatcgacttggcgagcttgacgttgatcggcccttcctcgacagtgcgctgcatatcgcccatcgtgttgagtccgccggcgctgaacgcggccatcatctgctggacttcggatggattgggcagtcggctggggtcctgactcatcagctgttcacggatctcctcaggcaactggctgatctgctgccaggccatctcgccctgaatggggccgaagcatttgatcagccactcgtgaatcgcgttgtcgtccatgcgtatccttctttgccgcggtgtgttaccccaagtgtagggtctgcccgggcctgttcgctcgtggccgagcaatattttcggtttatgttcgttttcggctgatttcggccctccgcttacactgtagggtatgtttgcacgccacaggaatcaggaaccagacttcgtccaggagcagaagagcccgactgcggattcggaagcgggggatgggcgcatgccatcgttcgaagtgaagcatgattcgcgcctatctcgtggaatcagccgtgctcgggcctatgcggccgctcgtccgaaacgacatttcgtcggtgcattcgccgtgttgcttggtgtggtgattctgctgctgcccagcccgtacgtcatcgagatgcccggacccacccaagacgtgctgggcaaggtcgaggatggtgcggttatcgacatcaccggtaccggcgtgacgacgtataaggattccggcaagctgctgctgaccacggtgaacgcgtccggcgtgcccgggtacccgatcatcaacgcgcaggccgtctggggttgggccaatccgcaggtggaggtcatgccgcgtgaggccacggtaccggtgggccagagtgcggaccagtatcagaagaaagtcgaacaggacatggccggttcccaggattcggccagtgccgtcggtctggcgtatgccaaagcccatgcggacgaactgggcattgacgccagtacattgcaacacgccaaggtgacgatgcacgtggacagcatcggcggaccgtccgcaggcatgatgtacacgctcggtctcatcgacaaactcacccccgccaacgagagcggcggcaagaccatcgccggcaccggcaccatagacaaggacggcaaagtcggcagaatcggcggcatagagctgaagatgcttggcgccaagcgcgatggcgccacatggttcctggctcccgcatcgaattgttcggatttggccggccgcgtgccggatggtctgcgcgacgtcaaggtcgccacgctggacgaggcgtatcaggcgttggtggccattggcaaggggcaggccgacgatttgcctcattgcgaggcatgacacgcgcggccagtcgttgtttctggtgagacgactcgcatgggtctgcccacaatgcggcgattttcggccgcgttaacgcatttgttcgcgaagacttgctaatgtgtcccctgtgaatcaaacggcatcacagaacgctgaagaatttggtttcgagcccggcgatatcgttcaggagtggctctgggacgacgatgtggacgattccattcgtgcccagattgaagagctcacgggcgaggatctcgtggacgaggactacgactccgctgtggacggcgtcatcgtatggtggcgcgacggcgatgatgaggacgaattgtccgatacgatcgttgacgcctacgcggtactgggcaatgacggcccgctgtggatactgactcccaagcccggccgcccgggtgccgccagctcctccaccgtgcagtccgccgcacagaccgccggtatgaacgccgccaccccgctgaccgtcagctcggactggaacggcatccgcctgcgcgcattcggcaggggccgctgataagcctcaatcaatacgcttgactttaagcgtgttgactggcgtcgcgtgctgcgtagtgctgctgggcgtgactgaatgtcatcgcgattgagcgctacggcacgcgtatgcgacaccacgtgtcgcgcagtgccggccatacgctattgttgtcatttgcgggcaattagctcagttggttagagcgccacctttacacggtggatgtcgggggttcgagtccctcattgcccactttcatttttcatcacttcgtgcaatcccctcattccacagacatgggctgtgacgatattccctgacagtcttcggcaaggggttctgaaatctcagtgagatgcgcgcagaaggaaaccggcagtactgctacaaaatcgtgaatttcggtcttcttggtcagatgcgtctcaatagtcacgtaaagttgtggcagagtgtttatatccagcaggaggtcgaatagccgatggcgcaggaacttcgtgaaggggacggcaagtcgggcatcgcacgtgcgggcaagcgcaagtgggggtatgaccccgctcaggtggacgctttcttggagcgcgcccatgctctgtatgacagcgagggcatgaatctcacccagcatgacattcagaacgtgtcctttgatttgcgcaagaacggctatgtgatcgcacaggttgacgccgcgcttggacgtctggaacgtgccgtggtcgataagcagaccacatgggagatcgcacagcatgggcgtgtgacgtggaaggcgaagaccgagaagctgtatcacgaagtccagaaccatgcggagcgtaacgagcgcgaacgcttcaagtccggagcgcccaagcagccttcgtacgataagaagcaggtggatcgtctggtcgaccagattgtggacaaggcggcggccgcattgggcgttgacggcgtgaccgaagacgatgtacggtctttggccgatctcaatgcgaatacggtcaacaatgtgatcttcacccagcgcaagggcaagaaaggctatgacgagcgacaggtcgattacttcctgaacgcctgcgtgcagttgctgagtcgcttggaatcctatgcacgtgtggccgatttcgtgtccggcgagcccacggctcctgcccagaccgccacgaacgtgaccgttcaagcgaacggcgtctcgccattgttcgcttccggaacgcagcgcccggcaactgacgaacgttttgcgccgtctgccgttgctcatgacgaatcattcgatgccctgcatcaggccgagcagagcttgttcactgctccggctccggttgctcccgcggcgccggccgcggcggcaccgatcgcctatgcgccggctcctgcatcgttcgatgcttccacaagcaccaataacaccaatgcggaacagccggtttcctttgctcccgcagcatacccggtgcatacgtccaacgagtctgcggcgaagcccgtctccgagacgccttccgtggctcctaccgcagctgttgcggctgagcctcccgccagtgccccgtccgcgccggtttccggtgtgaccgctggcagcgccccctcgtttgctccggcacagtcgtcatacgaatccgcagctccgtcatcgaccccgtcggtgttcgcggaacagcccgtggatatggtgcaggacggttcctctctggccgctctcgcccacatggctgcggtttctcaggaacttccggcggtggatgcgccgtccttcgctcccaagatgcccagccttgatacaccgaatgcgctgaaattgaatgaggtaccgggttcggtttcatccccggcaccctccgccccggcagcgcaacctgtgaatagcactgccgacgaggctgcgtccgctgccatgccggtctcctttgctcccaccagcaagccggatcgtaacacgaactccattccggttcgcgtatccgatagtcagcctgcagacagcacggtctcccgtccggctgtggaatcatctgaatacgttgccgcctcccacgacacggaagcagctcagccgtcacaggataagcacgattccaacgattcgttcccgctgctgttcccgcttggcggtaacttcgattcggatatccccgacctgtcgttccccacactgaacaatgacgatacgaagaaggaaaagtgagcatagcctccaactccaccgtcatcattctcggatccaccggatccatcggcacccaaggacttgacgtcatctcgcgtcaccctgaacgatttaccgtcaccggtctggcggcgggcggagcacatatcgagctgctggcgcaacaggccgcacagttccatgtgcccgaagtcgcggtgtttgatgagaccaaggttccagcactgcaagcggctctcgcacaggccggcgcacaaggtgtccgcgtgaccggcggtccggattcggtcatcgccatggccggatccggtgcgaatgtcgtattgaacggcatcaccggctcgatcggcctcgaaccatcgatcgcggcgctcaaggccggttcccagctggcattggctaacaaggagtccgtagtcgcgggcggtcatctgctgttcagcgcgcaagtgcgcgagaaccagatcaacccggtcgattccgagcattccgccatctggcaatccctgcgctccggaacccacgccgaagtcgccaagcttgtggtcaccgcctccggcggcccattccgcggctggaaacgtgtcgacatggagaacatcactcccgagcaggcgctgcatcatccgacgtggaacatggggccggttgtcaccatcaactcctccacactgatgaacaagggcctcgaagtcatcgaggcgtcccgcttgttcaatgtgtcgcctgaacgcatcgacgtgaccgtgcacccgcagtccatcgtccattccatggtcgaatttgtggacggcgccacgatttgccaggcttcgccgccagacatgcgtctgcctatcgcgctgggcctgtccgcgccggaccgcatgaccaatgtggccgccgcgtgcgactggacgcaagccgcaacttggacctttgagccgttggacgatgaggcgttccccgccgtgcaactggcccgccactgcctggccgcctccgagaagcatacggcggtgctcaatgcagccaatgaacaggccgtgcatgcgtttcttgatcatcggctgccgtacctcggcatcgtggacacggtcaaagccgtgctggaccagatggacgccgagcttcgtggtaacccgctgttcacggacgtggaggaaatgaaccagcttgagcttgaagcccgccgacgcgccgacaacctgataaacaagcaatgatgaataccttgaatacggaaaatcccatcgaaaagccgttccgcaaaaccggtgatccggtcgacctgaccagcgaatcgcccttgcacccgcgccgcaagtcccgccgcatcatggtgggcccggtgccggtgggcgggggagcgcccatctccgtgcagtcgatgaccaacacgctcacggccaacgtacctgccacgttgcagcagatcgccgaactgaccgccgccggctgcgacatcgtgcgcgtggccgtgccgagtcaggacgatgccgacgcactgccggaaatctgccgcaaatcgccgattccggtcatcgccgatatccacttccagtccaaatacgtgttccaagccatcgacgccggctgcgcggccgtgcgtgtgaaccccggcaacatccgtaagttcgacgaagtcggcccggacatctgcaaggccgccaccgacgcgggcatctcgctgcgtatcggcgtgaacgccggctcgctggacaaggaactctacgccaaatacggtggcccgactccggaagcgctggtggcctccgccttgaaggaagcgcacatgttcgaggacgtcggcttccacgatttcaagatctccgtcaaacaccatgacgtcatcaccatggtcgaaacgtaccgactgctcgcatccaagggcgattggccgttgcacctcggcgttaccgaggccggccccgcctggcaaggcaccatcaaatcctgcctggcgttcggtgcgctcttggccgagggcattggcgacacgattcgcgtgtccctttccgcgccgccggtcgaagaggtcaaggtggggtgcaaactcctggaatacatgggattgcgcccccgcaagttcgacatcatctcctgcccgagctgcggccgcgcccaagtggatgtgatccagctcgcatccgccgtcaccgaaggcctgaaggacgtgaccgcgccgatccgtgtagccgtcatgggctgcatcgtcaacggtccgggcgaggcacgcgaagccgacctcggcgtggcctccggcaatggcaagggccagatcttcatcaagggcaaggtcatcaagaccgtgcccgaagaccagatcgtcgacacgctgctcaccatagcgaacgatatcgccgcccaaatggaggccgacggccaagtgcccgtcaattccaccggcccggtcgtggtcccaatccagcatcccggtcactgattcggccgaataggccctcggcgtaaatatcgcggtcagattacaatagcgcacgtgtcgcaagaagaagagcatcgcctgactgttcgatccaagccgtggaccagcacccaccggctgatggtcagcctgcccatcttcattatcctgatcggcgtgctggtctccatttccaacctgaccacggtgccttggaacatcgaacccaccggccagtcgatggccacgctcaccgacgataccgaagtcaccttcgataacccgtccggagaaacgctgccggcgaaaggcacgtatgaggtcaccgagcgatacatcacgctgaacatgaccagcgacggcaatctgaccaaggagcctggtgatcggggcaaggccaatgcggacggcgtccaagccatcaaggtattgattcgggaacctcagaacgcatcaggcaagcgccccggcgtggtgttcatgcacggtgccggatacggcacctgtgacaactcctttggcgacgtggcttccgatatggcttcggccggctttgtgaccgcagtgctcgacaaacccgtctggagcaccaccgacatcaaccgcgattatccggcctcagccaaggcatatgatcaggtcatcgaatacctacgagcccaaagcgatgtagacgccgccaaggtcggcatctatgccacctccgaatcgacatggatctcctcatatctgctcgaggacgatccggacgtcgccttccagattcttctgagcccgatggtgttcagcccacgccaatcactgggatttttcgtcacccaggacttcactcttgtcggcgcgaacgaaggctatcgatccatcgtccaacgcgtgttcagcgcggacaccggcctgttcggactgaacaattccgacctcgccacgctcaaacccgccgcttacgccgtacccacctatgtggcttacggttcaaaagacgtgatgacggcgcaggtcgacggcgtgcgtgcgattctctacaacgcccacaaagccgataactggaacgtgaccgtgcgcagctatccggtcgccaaccatgtgctgcgtttgggggatgagtccgaagcgggcaccccgtttgcggacgcctatgtggacgatctcatcgattgggccgtcggcacttccgccggactcacgcagaccagcgaaaaggtggccggcaccaatctgtaccaatcaatcggtctgccgggcgctttgaaggcaagacgcgtcggcaccatatatggtgtgatcctgcacgtcacggtggtactgctgctgctcgcatccatcgtgctggcactggcggcgctgggccgcaaaatcgcggcggatgcccgatggcggcgcgagaaacgcgaggccaaacgtgcgggcatgctgataccggaacggcctgtgatactcggtttcgcacatggtttcggcaacgcgctgctgactttgaccctcaccactcttgccacgctgctcatcttctttgccggacttggacaggtgattatgggtgtggtcaaacttgcatggggcagcgctcctaccgagacgccgggcgtcatgtattggagctggccggtcatccaagtggtgtccgtgctggtgctatgggcttggtcccgcgtctttatgcatctgatagaggtcgcttccgcccgcggactgattcagataccccctcgtcgtgaatccgttcgagacatcgtcaccggtgccgacccggtactcgcctccacccgtctgggccgagtcctgttctggctggtggccttcaccatgctgtacatactgttggtgttcgccttctggggcctgtttatttactgactacttcattgagtagagtctgccgggcgtcgcggggaaaggagatgagatgtcgctgtaccgagacgaaggtgtggtgttgcgcacctccaaactgggcgaagccgatcgtatcatcaccatcctgacgcgtgggcatggcaagattcgggcggtcgccaaaggcgtgcgtcgcaccaaatcacgctttggtgccaggctcgagccgttcatgcgagtcgatgtgcttatcgctgaaggccgctcgcttgacgtggtctcccaggctgaagcggtcgccgcttacggtgctccgatcgcggcggattatgcggcgtatgaggccgccaacgtcatcgtcgagaccatcgataaactcgccagcaccgaacacgagcagctgacgaaccaatatcggctgctcatcggcgcgttgaacgcgctcgccaaacaatcccacgccccgcaagccataggcgactcctatgtgatgcgcgccttggccttggccggttggacgccacgattgggtacttgcgtggtatgcggcaaggcggagccggcgtacctgtccatcgcgtccggcggcgtgatgtgcgaagccgaccacactaccgatgcgcgccgtatcgcgccgttcgtgttaaaccagttcgatgcactgattcgtggcgattggtcggtgcttgatgccgcgcctgtggagcgggttgtgcaggagttggttgaagattggggggagtattacctcgaacgcccgattcgttcgctgcgcttgatagattcatgagtatggcttttgagaacgttgattacacgtcgttggacattcccgcagctccgttcagcgaccctgcccgtattcccgacttccccaagaacaaggtaccccgccatatcggtgtgattatggacggtaatggtcgttgggccaagcagcgcggcatggtccgcaccaatggtcatcaggccgccgaaccggtggtgttcgacactatcgccggtgccatcgaagccggtgtgcggtatttgagcctgtacacgttctccactgaaaactggaagcgttcgccccaggaagtgcgcttcctcatgggcttctcgcgtgaaatcatccaccgccgcgtggaacagatggacgagtggggtgtgcgcgtgcgttggtccggccgtcgccccaagctgtggaagtcggtgatcgacgagcttgaggccgccgaggagcgtaccaagaacaacaaggtcatcgatgtggtgttctgcatcaactatggtggccgtgctgaaatcgccgacgcctgcgccgccatcgctcgcgaagtgcgtgatggcaagatttccggcgaccgtgtgactgaaaagatgattgccgaccatctgtacaatccggacgttcccgattgcgacttggtgatccgtacttccggcgaacagcgcacctccaacttcctgccgtgggaggccgcctacgccgagctcgacttcgtgcccgaactcttcccggactgcggccgtgacgtgctatggcgctccatcgaccattacatccaccgcgatcgccgatttggcggcgtgaaataaagaacagtcctatggactgttcgttcacgccgcctggccgaggccgataggacatgaccaggtaatgatgagtccggcgaagccggtccttgattgctgaggtgtgaaatagtccttgttaagcccctcaaaattgagggggctgagccgtaaaacaaacagcccgatgggctgtttgtaggcgaaggcgagacgagagtcgagccagaagaatgcgagcggcagcttgtccgtaattgcggtcgagctgtccgtgtagcggactgaggggagttaccggcacacctcagccatcctctctgcaaactcatccaaaaaacgtcccgaatccgcaccaagtgccacatgcacatgtggcatggaatgattcaccagcccaaccgggtctccggtggtccggcctcgtactccattgaaatcaccggtattggtctccgcgcgcaacgcaagatcaaaacaatcgaccagtgaagaatcaagtgcaaccgccgccgccaacggatcatgcaacggcatgccgccagagaacagtgcggggtcggcttccaaatttgccttgatggaaaagtccgcgagatcagccaagaaccgcccgcgcttggtccccgtcgcacgccactggtcggccgccgatcgcggtagcaaacactggtgagtcacatcaagtcccaccattgtgatgtctgcgccggaatgaaatacacgattcgcggcctcagggtcttggatgatattcgtctcggccaccgcatcccaacaattgccgggttgggtaagcgtaccgcccatcatcaccagcctgagtttcggtgcaatatccggtgcccgagtaatagccgcatccacatccgtcaacggcccggtagccagcacggtaacgtctcggccaaactcacgaacctgctcaatcagatactcaatcccatccgcagcatcaacggagcgcctccttttgccccagctggcgagagctgtcgatgtagccgactggggacggtccacaggccgagagcgacccacacgagaacaagaccccgacgccggatgagcatgagcgtcccctaccaaatacccgccaacagaaacaaccccatcgggcacatcctcagacatgtcatccccagacatatcatcaccaggcacaccagctccatcagccagagccccggcccctgccagccaagtattccccagtccatccttcccatgaaactgggcacaccctgcatcgggaataaacgcatcagcccaagaaggatgctcggagcccaaaaacaccggaatatccgcccggccaaacaaatcaagcaccgcgcaagtattggcataagccgtgttcgcatccacattgccataactggcgatcacaccgctcagctcgcactcatccgccgaccccaacaaatacgccaacgccaacgcatcatcaacaccggtatccatgctggcaataatgcggtcaggacgttgggccatggaatcgcctccttgttagcatgattcgctatgaataaccttatcggccgatacgcaaaaatgcgtcctttcctcatgggaaggacgcatttttgcgtagattcaaactcggaatatcggaaatcacttgccgaggaattcgtcggtgccaaggtccttggcctgcggggcctcatgaatcaccttgtcatgactgtcagtgtaggcgtcttcttcagccaggaagtcgaagtattcctgagtgcccttgaagtcgttggtgccgagcacgaaagagccgtccttgatcttggccggatcgccccagtactggccgtcgacgataacctgcatgctcttcttgacgaattcgggcttgaggttggcgtcaggggcttcgtccacgagaatctgcgcggcgtcatccgggttggcgtacgcgtactcgtaacccttctgagtggcctgagtgaacttcttgaccaggtcgggattgttcttgatggtcttgtcattggtgatgatgccgatggcgtcggcgttgccgggcacgccgtagtcaggctcggtgaagcagttgagcttcgggccgtacatgtcggcctgcacgccttcccacgtggcgtagaagccgccgaaatcggccttgccggattccatggtctggaaggtggaggtgccgacggtcaccttgtcgaactcgcccttgccgccgtcggtctggatcatgcggcgcaccacggcgtcggactcgttggagccgaaggtggcgaaggtcttgccatccaaatccttaggggacttgatggcggtgttggacgccagtgcgcaccaaatggcgctcggcttctgctgcacctgcagcacctgcttgatgtgagcgcccttcagcgtgtagatgcccacattggtcaagttggacagggcgaagtcggccacaccgttgttcacggcctgttcggcaccggcctgggccacggccacgatatccacgtcaagaccggcatccttgaagtagcccttgttcttggccacgtacacgccgatgtggttggtatcgggcgcccaggaaagcatgaaagtgaccttcttgaggtcggaggtgttggagttggaggagtcggcggtgttggtctgaccacatgcggcgaaaccgaaagtcatagcaagggcgcccacgagggcagcggccttggatacaaggcttttcttcataatgatggttccctaattcgttgtctctctatcgttctctgggattgcttcgaacggaagtcggcagaaaacgatatggagggtcttgatttccgttcgaccagcgcccccgacattccctatgaaagctcaagaaagccggtttgccacacgctggtaaagctgttccattatagagacagggctggagacctcatgagaagccgccccgttcagtcggttctggccgccggcttgtgtctttgacggtaaaaagaactactggtccgcgtcggggtcttcgtcatcgccggccgggccgagcaggatgcgctcgctggcgttcaccgccagcatcagtacgcatgtcatcaggataatgacgatggtggcggagaagatcagcggcgtgcggaacgaattgtaggcagcctgcagccagatgccgaggcccttgcgcgcgccaagatattcagcggtggatgccgtggcgaagatgtatgcggcagatacgcggataccgccatagatctgacgtgcggcaacgcgcagcttcacgtgccagagcgtccagaccggggtcgcgccgcaggtcaatgcgacgtcggaatagaactggggcaccgcttctagtccgcgcacggtctgcacggcgatggggaagaggccgaataccgccacgattacgattttgccggaaatctcaaagccgaaccaaatcaggaacaacggggcgatggaaatcagcggcatggtttgtgcggcggcaagcagcggatagaacgccgcgttgaacgtgtgcgagcagtacagtgcgatgccgatcataatgccgaagaacacggcgaacaggaagccgaccacgccctcatagccggtgatcgccgcggccgggccgagcgtgttccacgtttcgatggtggcggcgaaaatctcgcttggcgcggagatcatcgtgggagagacatgtcctagatccacccacgtttcccagactgccagcaatacgatgacggcgatgacggtgggcatgcggcgcttgaggcgcttggcgatggacatgggatgtcaccttgctttccgcgccagtccggtttgctggtggcgcttgcggccggggcgtggaacagtaaggtgaggagcctgcgcgcctgccggtcgtgtgatggattgtgttatatgccgtccatcagtataggcgaaggcgaacgacaggggcacacaaaaaacctccctcgtcagagggaggtgagagagctactccagtccgatggacttcatgtggtggagcttcagggaatccaccttgagggagccggactcggcgacgagcttgatggcgcgcgggccttcggaggcgtaggagtaggagctcagcacctggtggccaccgttgacgtagacctccacggagccgcgatccacgaacacgcgcaggtccagcttgccggaggccagttcggcgtcggtcagtggggcggcgcggtagccgtgatcgccgttggccatggcctggcgatccaccaccacgcggccgatctggtcgtcataagccacgtaggtgtaggcaccgtccttagtggcatgaatcttcaggcccgcacgctcggcagtggaggcggccaagtcgatggtcatttcgatttccacggcctcggcgtcatcggcgatgacctgctcgccatccatatcgagtgtgatcgaaccatgggcgagggtatcctcgcgcaggccttccatttcggcgaccggcgcggtgaccacgtcgccgtcatcgtcaagggtgatctcgcgcggcagggtgagctgaccacaccagccgtcatcctccatgggaatcggctgcacgaacgggctcatccagccatagacgatctgacggccgtccacgttgaaggactgtggggcgtagtagttgtggccgcaatcccacaggcggaactcggtttccggcttgaattcgccgcccggctcccacgtgccgatcatgtagccggcgttgttgacgttgcggttcatgaagccgctgggcttggaccccatggcggagaagccaatgatccacttctcgttgccgtccttgtctttgatggggaagaagtcggggcattcgagcatgaacacgtccggatccgggtgctggaagagcacgcgctcgtattcccagcggaccatgtccttggaggagaacagccacatctggccgcgcttgtccgcagaggagacaccgaaggtcatgtaccaggtgtcgccggtcttccagaccttcgggtcgcggtagtgatggtcgaccttgtcggtcgggcagtcgatgatcatgccgcgcttggtggcgctggtcagctcgtcgttgtccggctcggcgagcatctgcacttgccagtcgccgccggtgttgtcgtggccgttggcccaacggtggccggtgtagtagaacttgagcttgccatcgtcgccgattactgcggaaccggagaatacgccgtccttctcctcttcaagggtcggggcgaacatgattggctcgcgcttccagttgagcatgtcggtggaggagacgtgtccccagtgcatcggaccccactgggtgccgtacgggtgcagctggtagaacacgtgccagcggcccttatagaagcacaggccgttcggatcgttgatccaaccg

SEQ ID NO: 18 - DNA, 288719 bp, Unknown
  R30_18m  MAG No. k141_5134
gccgttgcccggagcgagcggcgcgacgtatcgtccgttcttgatgacggtcggatgtacgaagtactcatgctggttgtccacgtattcgacgacgcggtcctccatctcgccagagacggacacataatcgaacatcgcgagctggctgatggcttcgcacaggccgacgccgcccgcgtgagggcagaccttgacgccgaacttcttggcgagcaggtattcgaggacgatttcctggggaccggcgactcgggtggcgtcgatctgcatgaccttgaagctgccagcctgcaggtactgcttgtacatgactcggttctgcatctgttcgccggtggccaccggaatcggatcgatggccttctggattgcggcatgtccaagcacgtcatccgggcaggtcggttcctcgacccatgcgaggtcgtagtccttgaatttgccgatccattcgatggcctgcggcacatcccagacctggttggcgtcgacggcgatggcgatgtccgggccgaccgcttcacgggcgagcttgagcctgcgcaggtcatcctcgaggttctggccgaccttgagcttgatctgcttgaagcccatgacctcggtctcctgcttggccaggcggaccatcttctcgtcggaatagccaagccatccggcggcggtcgaatatcccggataaccgacttccttgaggtgggcgatacgctccgccttgccttcctgggcggcgcgcaggatatcgatggcctcctgcggagtgagggcgtcggtcaggtaacggaagtcaagcgtcgcaacgagctcttcaggctccatctcggaaaggagcagccagagcggcttgccggcgcgcttggctttgaggtcccacaaagccgaaagcacggcgccaatggccatatgctcgacgcccttctcagggccgagccagcgcagctgcgaatcgcgcacgaacagatcccatgcgagacgcatgttgtcgagcagttcctcgacgttacgtccgataagggtttcggacatggagtcgatggctcggacgacgacatcattgccgcggccgatggtgaagacgaatccgttgccggaatcaccggcatccgtgctgatgacaacataggcggaggaataatccggatcggggttcatggcgtcggagccggagaaggtggccgacgtcgggaatcggaaatcataggtggtgactttggtaataacgctcacgatgcgcttccttctttggaaaatggttaatctcaaaaagggaggacggccgttcggccgccctccctagcagtggcgggccggatgtcagtcggcgtcggtggtgaccttgaagccgttgtcctttgcgtaggtcttgagcttctgctgagccttggccatagcgccgaccatgtcaccgccaaccttcatttcaggagtgatgacatccttgtatacgactccaacctgagacatgaacggaagatactcccaatcagtattgaccttgtccatggactcgaagtagacggagttcacgtcagtattgacaaagtatccatctgtttccttcatattgcggatgtcttcgctatcttggtaagcggaagctgccatgaagtagttgccgtggttgttatcctgccaagactgaattgcttccttgtcggaatcgagccagttgatgaaggcaagggctgcagcctgcttgtccttagggcatgccgcggaaacactcatcatggagccgacggaagaagacttgaaatcatcggcagaatcgccgaatgcaggtggcagcgttacctgaatcagacccttaagagatggattctgtcccttgtaggagttgccttgccagttctgagaaatataagtggcataggtgccctcattcgtggcacggttgaacgcatcggtccagcctggagcggcctccatgaccccatcctgaaggcacttttgcaggaattcaatgaactccttggtagtgccagaagtcatgctcaagctgatgtcatcgacagaattgaccttccaagggcgcgcaccagccgaacgcagcaaatccgtaaagcaggagatatcgttattgatgaggacgcccatgtacttgctgggatcttccttgtgaagtttgacgccttcttcatagaattcctgccaagtggttggcaccttgagattatgctcgtcgagaatgtccttacgcacatacatggccaaaggagtggcgtcagtcggcacgccccacaggccaccagcataatgcacctggctccaagcggtctttgcataaagcttgctccacgccttttcgatatcatcgttggcgaaattcagcagagctccagaaatagcgtactgttcgaatcggtcagcactcatctgcacgacatccggaacatctttattggcagcaacgacattctggaacttggtgaaatggtcgcttgccgcgccggtgttggtgaatttaattttgatgtgcgggtacttcttctggaaagcttcaatcggtcctgccatctgcttcccggagaatccccatacgttcagctcgatttttttggaagtatcggtgagagcgttgttaatgtcttctacagtgactgcagttttagtgtccttggcaccagtacttgagccacaagccgcaacgctggctaccatagtaagcgccgccagcgcactgacgattttggtcatcttcttcatgattactcctttgtgtgtcatgaatcactgtcttattgttgttcttcaaatggatgtggatgccgcacggtcattagagcaacgaatgggtgatcgccaataaccgtgcggcgaggattcactgcttgactgcaccagccgaaaggccagactgccagtacttctgcaggaacatgaatgcgatgatcaacggggcaactgcaatgaggcatccggtgacaatgtagttgttcggaatctgaccgtccgcggtaccttcggcacccatcttcaaccacatgttcaaaccgaccgtcatcgggtagtcgttggtgtccgagagcatgatcagcggcaggaagtagttgttccagacaccgaccagcgtgaacagcagtacggtgacgaaacctggagacagcagcgggaaggcaaccttccagaagatggtccacgaatttgcaccatcgagcttagccgcttcaaggagagaagtaggcaccgatgtctgcgcataaataatcatcaggtacagtccgaacggcgtggccagctgtggaataatcactgcccatggggtaccgaccagaccaatcttcgagtacatgaggaacagcgggacagagatgaccgtggccggaatggacatgaatgccaaggtgatcgccaacagactattacgtccggggaaccgcattgtggcaatggcgtagcctgcaagtgtggcgatgatagtggcaccaaatccggcgacaactgcatacatcaccgtgttaagcaaccaccgtgcgtatgtaccatgctgatatgcaagagtttcctgaacattctgccagaacacattcttgtcatcgaaccacagaccaaaggagctaaacatgccctcgttggtctttgtcgcagagaagaacacccacagcaacggcacgagacagtagatgaccatcaggcccatgataatgtgcagcagccagttaagcacacgctgcttgccggtcagctttggagctgcctcacgctgctgcatacgcttatagcgttggctcgccttgagcgccagcttagcgtctctgcgctgcagcgacttggaacgtggttttgcgattgcttcactcatcacttgttctcccacttattgccaatgaccttcacgactgcgacaaggcccataacgatgacaccaatcaccaaggagaccgctgcagcatagttgaggttctggccgttgaacgcaaggttatatgcgtagagattcggcgtgtagttactggtgatcacattcggcgcggaattcatcaagatgctcggttcgttgaacaactgaagcgtgccgatcaccgagaagagcacggtcatcataatggatcccttaatctgcggaatctttaccgaccatgcgatacgcagctcggatgcgccatcgatacgagcggattcgtacagctcgttcggaataccgatcagtgcagaataataaatcagcatgttgtagccaagagaacaccaagtgcagatgtttgcgatggcgaacagcatgagcttttcagaaagcatgttcggcgcagtggccccgatcatagacgcaatctggccgacaaggccatacttgtcgccgtagatatatccccacatcagtgctgcgatgacgcctgggacggcataaggcaggaacagcaggattcgcggcactgcgatatggcggattctctgggaatccagaatgagcgccgccacaagggaaaggatcaaattgagaggaatctgaatcgccgcataaatcagcactcttctgaaaccgctccacagcgcttcatccttaaatgcagctatgaagttgtcgaagcctgcgaatgtggtgccgccaagaagggactgcttgaagaagctgagataaagcgcgtagaacatcgggatgatcatgccgaataggaagaccaccacgtatggaagacaatataacatgcctatgtactcgcgcttcggcttgcgcatcccggaagtatccggtttcgccgttgcatttgtcatagtttttctctttcttcttaacccgtctgaatgagcccgccaacaacatcgttgccattgccgtttcattcatcggtacgttcaatatacaaggttttacaaaaaagagcaaataaaacttcgttgcgcgtggcgaaattttctttatcttgttttttcgccttaaaagggctttattgcaacgatatgcacaaatcgtactcatcgaagaaacagcagccaatccatgtctacaacacccatttccgctatatagacagcaatacgccgataaaaaagctgttttagagtagcgaaaatttcgctactctatatataacgctttttttgcagcgtcgcatacgaaaagagaagagtcatggccacaatcaaaacaacaaacagaccgaaggtctccgacatcgcccaagcggcgggagtatcccccgctaccgtgtccaaggtcatcaacggccgtgatggagtctccgacgagacccgcgatagggtggaactgctcctcgaagaagccggattccgcaaaaaacttcccacaacaaaaaccatacggtcaatcgaactggtcgtcagcgaaatgaccaacaacggcaccgtggaaatggtcaaggagacagcttcatacgccagagattttggcctcggcatcaccgtaagctgcgccggaccggattccggagaatacgcaacaagaaacgaggccagcagctgcctccgtaacgccatcgaacgcaacccactaggcgtcatacttctcttatcgaatatctcatcggccgaggaatcgctgctgcagacgaggaacatcccatatgtaattgtcgatccggtcggccaggtctccgctgacgcattgggagtgggcattgataactggaccgggggaatgctcgccacgcaatatttcatatcattggggcatcgacgaatcgccgtcatcactggccctactaattcacaatcctcgcaggcgcgactgagcggatacatggcggcgctgcagaaaaacggcatcagcgcggatccgcatctcatcaaggttggcgactacgtgtctgacaaggcatacaaggcggcatgcgatctcctggaaatgagggagcaggaccgaccgaccgccatcttcgcgttcaacgatctcggcgcgatcaacgtctatcgcgccgcccgacagcacggcatcagtctgcccgaacaattatcgatcatcggtttcgacgatgtctatcctgcggcaagcatgtgtccatccctgacgaccatcaggcagccattcgacctcatcgccagacaatgcatcaacctgattctcgaagcgcgggaaggaaaggtggaacagaattacttcatttttcccacgcagcttgtcgaacgcgaaagctgcgtatcgccagcacgtccgtaactcagcaacggaacacagaatcagcttccacgaagcacccatgcatatgcaatccgtctctggcacaagcatttacttctgtttaccagatgaaaatacaatatcgtgcgattacgggggcgcagccctagcctcagctggaggtcaggaaggtttcgttgcctcgggtgaagtcgaggacggcaccggcgagttggacctcgcctgccagttcggggtcggcggccagaagctgctcggcacgggtgcgggcgtcggcgatcatgtcggcgtccttgaccacgcgcaggagcttcaggctggacttgccgccggattgggcgtcgccgagcacatcgccggcaccgcggaattccaagtcggcttgggcgatttcggcaccgtcgagcgagtggtgaatcacttcgagccgttgctcggccggggagccgggttccgcacgggaaataaggaacgcccacgagttggtgccgccacgccccacgcggccgcgcagctgatgcaactgagagaggccgtatcggtcggcatcaaagatcacgatgcagctggcctgtttcacatccacaccgacttcgatcaccgtggtggacaccagaatcggagtctcgccgccggcaaaatcggccatgacctgggttttgacgtcatccttgtcgcggccggtcagagtcgcaaaccgaatgccttggaattgcgggagtttctgcaaccggtcggcgatttcggccaccgcatgcaatggcgggcgagccacggtttcgccgttttcgtcgaaggtttcgtaggggtcgtcgatgccgatggcgtcggccgccgcgcgcgttgcacggccgcccgcagctgtgcgggcactggaaccagatgctgcggcgcgtccgcgggcagaaccggctgctgccgaaacgccggaaccgccttcgttcccctcatcatccgcatcaatgcgcgggcacacgatataggcccgctcccccgcgtcgactcgcgcgcgaatgtgcgcgaacatacggcccatggtggcggcgtcggcctcattgaccaccacggtgcgaatcggtttgcggccgccaggcaattcggtgagccaggaaatatcgagatcgccaaaccaagtcatggcggcggtgcgcgggatgggcgtggcggtcatcaccaatagatgcggcgtggtgccgtcatcggttttggcgttgagactttcgcgctgttccacaccgaaccggtgctgctcgtcgattaccaccaaggccaagtgcggggattggaaggtcttggaaaacgccgcgtgcgtggccacgataatgcccggctcgccactggcggccgcagcaagtgctttacgtcgcgcagcaagcttcatgccgcccgtcaacaacgtgactggaatcgctggcttgagttgctccaccatccggccaatggtttcggcatgctgctcggccagcacctgagtcggggcaacaagcacggcctgatagccggcgtctacggcttggagcatggcagcgagcgccactacggttttgccggagcccacctcgccttgcagcagacgctgcattggccagtcatgagccaaatcggcggcaatatcatgaataacctgctgctgccctgcagtgagggagaacggcagggatgcgatgaactgatcgcgcagactgtcggttaccaacgggcaagagtgagccgcggatttatgggcgtgcgacctggctttaagcagcgaggtctgcgaaacgaaagcctcctcatagcgcagggtttcgatggcctccttgaaccgggtcgtggaggccggatcatgaatggccaggaacgcctcagcccgatgcatgaggttcttggccttgcgcaccgattcgggcagcacatctgggatggattgggagagcgcctcagcaccggattcggcggtcgtgccggaattctcttccccgttttggacggcgatggtgtcggtcgtgggagccacaatgccggctgacccagcgccagcgagttgcccgtcaggcgtggatgacgtgcgggcccccatcatccacagcaatcccagaatcgtctcatgaatatgttcggacgagatacgcgaactggcgtgatataccgggcggggccggcagacgcgggtaagcgcctcttgcacggtatcggcgtcgtatttcagcgcggccccggaagaggcagccgcggccggcggatacgcggactgcacactggcatacggatcggtacttcccgcaaacgcaccattgccggatgccgcaccccgagcgtaaccctcaagccccgctcctgctccggccgacccgggcgcgacagtgaggatttcggggtgcgtgaattgcagctgccccatgtattcgctgggcataccggagaccaccacagacgtgccggcgcgcagccgcatgctgacccaatccacatacgatttacgatacgaaaagaacgtgagccgggccgtgctgccgggtacgcgacgagaccgggcgaagtcggcgtcatcgaccgtcgcctcgagtcggtagccgcggcgagcgttcatcggcaccacgcgcatgtctcgtatcacggcggcaaatgccatctgctggccgggtgcggcctcgcggatggcgcgaagcggcaccggttcggtgacgcggaagggatagtaggtcagggcgtcgccgacagtgacgattcccagcgatttgagcgcggacacgcgacgcttgttggtgaccagcgaagcgagagtggtgtccatagtgatgctcatattggcctattctattcgcacggcctctttaggccgcagaaacaacaaaacccgctgagccgaagctcaaacgggttttgctccacgttagtacgcgattcacgcggccacgcgctgaaccttgccggccttgaggcacttgacgcacacgcgcagacgagtgttctcgccatcaatcgtggtgcgtacagactgcaggttcgggcggaagctacgcttggtacgacggtgcgaatgggaaacggtgaaaccggtctgcggtcccttgccgcacactgcgcaacgagctgccatgatggactcccttaaccttgatgtgtcaagtctttcacgcattcgaccgccggtttcacccgacatgccgaacacacaacttcacaaatatatagcccaataccgacaaccgcaactcttgcgtgtatcatgggcgaacttcggcggttcgcgagcggttcgagcgtaacttgcgagtgggccatcagcggttcgcgagcggttcggcattggttcgccagcggtccgcaagtagttcgccagcagttcgccagcggttcgccagcggcgaattacgctgcaaatcgtagcgtttacccgataaaacacgccggactgcctattccgcatccaacaaactctcatataatctcggtataagagacggcaagggacgaaggggtcctcgtgcaacttacgacgaaggaggctgtcatgttgaatctcaggcgaggtatcggcactcacgagcccagcgtgatttcactgggtcaagtctgggtggacattatgctcaatgtggacgaggtgccggcacagggcggattcgccgtggccgatcatccgaagccctccattggcggcagctatcgcgtgctgcaggcggccagccgcatgggcgtgccgaccgagcacgccggcattctgggcaacggcctgtgggcgcatttcatccgccagtcattccaggacaacggcatcacgcatatcggccaggatcgccttgatgaggattccggtttccgcgtggtgctgagctccggcgcgccgaagaagacgttcatcgcttcctatggcgccgaggctcatggcgacgcggacacgttcaacacgctggagccgcagcccaaagacgtggtgcacatcagcggcaacacactgatggaccacacggccaccggcgtggacggattcctactcaaggccggtaccgacccggctgcacgcgactacacgctggtgatcaatcccaccaatacgttgcgcctggtcaatgaccacatgctcgaggatctggtgcttgcgcgcccggtctggtcctgcaaccgtcaggaggccatgacgctggccgagcgcctgggcgcgccgatcgacgacagcaaggtcaccatcggcggtggactcgacgacttcatgcaccagttgtgtgacggcttgggcactacactgcgcgcgccgctggtggtgcgtgtcggcgcccgcggcgcttggattcgtgagccaggtggcgagacgattcatatcgagggatacccgaccaaggccgtacacacccgttcggcgggcggttgccacaccggcgtgatgtgcgcgatgctggcaaagggccatagtctggccgaatcggtaaagatcgccaacgcggcggcatccatcgccatccagcgcagcctcaacggcgtgccgcaatgccccgattacgacgaggccatcgcgctgatcggcgaatagtttccggacgattgagtggatttcctcatctgggggaatccacgatcggctcccttcagtccgcttcgcggccagctcccctcagcgaggggagctatttttttgctctggctccccttagaaaggggcccggcattattcacccgccgttcaactttggcggttttctaccctagtccgcgcttctacgatagattgagttgaatactgtcgaggagtacatatgactgatcccgcaaatgtccacgaaccggtgccgcaaagcgccaaactgaccacccgcgagaagaagtggatcatctacgacgtcggcaactcggcattcgtgctgctgtccaccgccgtcatccccatctacgccaaatcgctgatgccggcggacggcaacatcgtgtccgcctggggctacgcgcaaaccattgcctccttggtcatagcgctgctcatgccgttgctcggctccatcgccgacgtgcaaggcatgaaaatcaagttcttccttggcttcttcggcaccggcgtggtcacctgctgcgcaatggccctgcccctgacctggctgccgttcctggtcgtctacattctggcgaccatcggcctcaacggctcgctgacgttctacgattcgatgctcatcgacaccacctcgaacgagcgcatggacaaggtctcctcgcacggctacggctggggctacatcggctccaccgtgccgttcatcttctgcatcgcgctgattttcggcggcccgtcgctcttcgactggtccacggtggcttgcacgcgcgcctcgttcatcatcaccgccatctggtgggtggcgttcaccatcccgctgcttaccagctaccgccaggtgcactaccgtgccacccgcgaccagctgggctcggccgtgcgcggcacgttcagcgaactggcgggcacgttcggcaaaatcgtgaagaacaagccgttgtggatgttcatgatcgcgttcttcttctacatcgacgccgtgaacacggtgatttcgatgagtacctcctacggtgccgagcttggcatcgactccacccagctggtggtggcactgctcgtcacgcagttcgtggccttcccctgcgcgattctctacggccgtctggccggccggctcggctgcaaagtgatgatcactgcggcggtcgtggcatacatgtgcatcgtgctcttcgccgcgttcttcatgaaatcggccgtggagttctggattctggcgattctggtcggcatgttccaaggcggtatccaggcgctctcccgctcgtactacggcaagatcatccccaaggaccacgccaacgagtactacggcttctacgatatcttcggcaagacagcctcaatcatcggcaccttcctggtggccaccaccacgtccctgaccggcaacgcctcgttcggcgtgctctccatcgctgtcctgctcgttgtggcgctcatcttcctgctcctgcagaaggacccgacgcgggagtgatttgccggccctcggcaactctgcgccgcgggcgacatctcgcaacccctgcaacgggccctaatagcaatggaccatcgccacttgatcacttacgctcgcgataatccttgatcagctgaatggcgacggccgcaacgccgcacagcacaccgccaatcggccacggcagccagaacatcgccccgtccgcggcgctcgacccgacggccgaccaatcgccgcgcaatgccgcagggttcaaaaacagcaggcacaagccagtcgccgtggctatcagcataatgatgccgcacaccgcgccggtcagtctggcatagaaatcctgttcgcccgcatgctccttgcggtcgtcctcggccgctttgttgtatgcgtcgatattgagcagactgtatctcatgccgcagtagacaaacccgaaaacaccgggcgcacagagcagcagaaaaattgcgttgggccagccatcggagacgccgagcatgtcatcggcatacaccgtcaccgcaatgccaatcagaatagccgagatgccaccgacgatgccgattaccagcagccgcaattctcggctgcggtcctccccggtgtagaaatcttctacgtatgggtgacgccgtttgaagtcaatacgcgacagacctcctggaatcagcatcgccagccccgcaatcacacccacacagacgcacagaaacgtcagaaaatcgttgagcggcgtcgctccgagaatggaattgttggaatcgaacaggttgccgatgccaaccccggcgacaatcgcagcaacaccgccggcaatcagcagcgcgaatcggcggcgatgttcatcgtagccagtgatatcctgcgcaagctccgcgataggagcgattatgcctgccgttttggaagaagcggctaaaggcgatgccgtctcagccgaggagtcaacattcgacgaaccggccgcagaagccgacgcggcaggccgactcacatcgccaagtaccagatcatcaagcgtgcagccgaacaggtcgcagatcataagcagcttgtccatctcgggataggccttttcggattcccatttcgaaatggcctgacgcgagacgccaagcaacatggccaatcgttcctgggtcaggttgcgttgcgcacgtaggtactgcaggttagcgcgaaaactcattggaatgtcccttcatacgtaatctttatcatgtcatgttcggccgatgggctcactatggcatgccgtccatgtcacccgccaccatctttgggttgcaatcgccggttattcgagcgcaaccacaagttgcatcggcggaattccgccattccgttgacctgagcagctttaacatcgcactccacgagaccgaagcttttccagccatgcgagggcagcttgtctcacctgccaccacgaatccgcttcgacccacgtacacatctgtgtacagcagcgctcgcaatcggttacctacgacccatatgatttgctgagcgaccgcaaaacacgcaatagccgagacaacaccgtcagcgttaaagcttaaggcgactacttgcccaatagtccggaaatctggctgatgatgtcagcgggcagtcctgcttgttcggcaatggatccgaggtccagattggcaccctgctcctgaattgcgccagcgacctgactgatctggtcggcggagatgttttcctccgccagcgcctgcagctcgtcaagtcggtcggcgttcaaatggtcgccaacgacctgttgatttcacccaactgatcggcattgaaatgctcaccgattaccgccggcaaatcaccaatcgaaccgagattgaaatccccgccaagcacattgcctagattgtctgcggcaaaatttttcaggctatcgaacagtcccacatgtgccgctgatactgcttgttcagcaactgctgcagagcatcgcacagaccctgcatcaatcgccgctcttcggcagacaagtcccgcgtgaaaccaatctctgcctttgcgctcatcagctggggagctcacggtcacactcatgcgtcgcagaccacgagcctcacgcgcctcctcattccacatctgtgttaacaacatgtgttaatcgcatgcatcgccaccatgattccccaatgatttcaagggttccccggtctcactattgtttcttccttaaaacggcctcaatcatcggcaccttcctggtagccaccaccacgtccctgaccggcaacgcctcgctcggcgtgctgcccatcgccgtcctgctcgtcgcggcgctcgttttcctgctgctccagaaggatccgacgcgcgcaaacgtgctgagacatcgccggtgaaccaagttctgcctttttaccgacgccagctcgcataagcaggaatcaaacgtcggcgctgggacacagaacgggaatccgccgacgttcagagtatctgatgccggtgccgggccatgttttggacgccaccgacacaagtaccactcttggcgacggtggtggggcatccgctgtcccaccaccgtcgccaatcgttctcagcggcgttgacaatccattatctgtccctccaacgccgccaaacgtccacagcgtcggcgacggtccggattttgacgcaccaccgatgcaaaaccattgcaggctccgtacggaacatcagccgcgaccaccgaacgagcaccagatgcggcatcagccgcgacaccagccgcacttatcgacgcgcccttaccgcgtcatcacgtccatcaatacaatgactcatcggcatatccggctgcagcccaataatcgtcggccgatagcgagcgattgaaaccggtggcatgatcgcttccgaggtcgccctcgccaccgaaatcgacatcgaaatcagtaccagcatcggaagtaccgccggacataccggcaacggacctgacttcggttttcagcaggtatttctccgcgaaattcagcgtggtgcacaccatcgcaaacccctttccatgcgcgttgccctggcggaccaagacgtccttgtgtaagtaagtatggcggctccccttccacaccgccatatccactatggaagcgcgccgcggcacacgacacaagccccgggacatatgaagaagttatggccggttcaaagcacccgtattacagcccaaacggcaccgcgcgcagcgggattgcacgacggccggacgccactcataatcggaaaccgctcacagccaaatgccacccgaggccggacgccatataaggaaccgtggcacggcagatatagaaaatgcccgccatcatagactgacgagcgtgatatcgggtgggcgatgtaggaatcgaacctacgaccccttcggtgtgaacgaagtgcgctagccgctgcgccaatcgcccgagcttgtgatgaaaaaaccggcaacattctgccggcgattcatcgagtgggcgatacaagattcgaacttgtgaccccttccgtgtcagggaagtgcgctaccactgcgccaaccgcccgggtcatcctcaggctgaatcaatcatcctgaaccagccatccgagagcggacaacgggactcgaacccgcggtctcaaccttggcaaggttgcgctttaccaactaagctatgtccgcatgtgttaccttcacgggcaacaggtgacaaagatacgccaatctcaggaaaaagccaagcccccgcgtgtcccaccggttttccaacgattatcgggtgccgccgtgcacataactcgcggtgaccgtatacagcagccaagcgatgggcatggccagcataaacagcgggtagaaccaagcgatgggcacattgcacggccatggccgtggaaatcaggaacgcatgacgataaccgatcagctggccgaagaggccaaggccttgatcggcgaccgtgccgaagtgaagttcctgaactacgccgacgtgccgttcttcaaccaggacgaggaattcccgaacccgacagccgccgtggccgccgccttcctggcgctcgttgcggagtaatcccgcccgaatcttggttacgttccgcctcaaggcggacggcggaccagctgcatcagcaatgtgccgaacccctctgatcgactccaatcagaggggtcgctgcgtttcaaggggctgatttggccttctccggaggtctactcccgtttcaaggggctggtggctgagtagacacgggccaaaaacggcgtaatgacgttagcccggagccgtttatacttgtggtttcccggatgaggagcccctcgaaacggagatagacctccggaacagcccaaatcagcccctcgaaacggagttagacggttgggatgtcggaaagaacactcatgccggcccaagaacccccactatgtcagatatcgctgcccagcacgcaatactgaccgtacagcacgacccgtccttcatgaaatcaggcacggtatgggcttcatccctcaacgcgcgataatggcggtatgacgcaacgacaactgatgcgggccacagtcgaaacgcccatcggcaggatgatgatggcctcggacggcgagggacttaccgaactctgtcttgaagactggtggtgggccaccgatcaccaagccgttctcgattcgaatcgcgaatccgatcgtgaacccgatgtgttccgtatgacccgcgtatggctgaccgcctatttcgccggcgagcgccccggcctagatcagacgccgccgttgcatcccgccggcacgccattccaacatgaagtgtggaatctggtggccgagattccctatggcatgacggtaagttacggcgaactcgccgccgaattggccgaacgacgcggtggcggccgcatggccgcgcaggcggtcggaggcgcagtgaagcgcaatccggttactatcatcgtgccctgtcaccgcgtagtcggctcgggccgcgcatttggcggctacggcggccgactcgacatcaaggccgaactgctcgaccacgaaggcgtggatctggcccgcttcaatctgccgaacctttgacggccccagcggtccgcctcgtcaaaaggattgagtggttacccctcccgctggcgggaagtggcacgtaacgccggagggtggtcggctggctggcatcgcaacccccgctacccgacaattttcgacaagctgacgggaatcctcccacgaattgttcgccgtcggtgcagtcttgctcgatcgcgccggccaaaaccgtacaatccctacaatggaatgtatatggttaattgctgcgcgcagccgcacggccgcacgcaatcgcaagaccacatggcccacggggatatgcaatatcaacggaagcaggaggtgcgtatgaccggcattatcgattacgcgcacaccgaaacgcgctccttcgccgacttgccgttcaatgaaatcgacgccttgatcatctccacgctcatctatgaggatgtggccagtatctgtccgacgttgatgctggatgagacgcagtcaggctcgttcgccgcacgcattcgcgctttcgagcccaagcatccactgatctggctgaagggtatctggcatcccgagcttgaatcggtaagccttgacgaggccaaccgcgagctgcatcgttcgccggaaacgcatgccgacgacaagccgcacgaagcccaaatggtttcagtggtcaatccggacctgacccacgacctgttccaggccgcgggcgagaacccccgctacgccaacgttcgtctgggcgcggtggtcgagcacatcaatcagggtgagcaaacccaattcgccgccgccaccttccaactgcccgacggccacaagcgccgaaagccgacctacaaaggcacgttggttatttccttccgcggcaccgatgattcgctcatcggatggaaggaagatttcaatatggctttccagtatccggtgccggcgcaacgttcagccagcgcctatctggatacggtggcgcgactgtgggagggtccgattattctggtcggccattccaagggaggcaatctggcgatttacgcggccatgaacgccgaccccaaggtgcgcaagcgcattcagcatgtctattcactggacggccccggtttcccgccggagattgtgaccagccccgcctaccgcaccatccagccgaaggtgacgaaaatcgtgccaagttcgtcgattgtgggcatgattttcgagaccccggagccttgccgcgtggtctcttccgattcggatggcattatgcagcattccgccttcacctggctattggatggcgaccagttcatcaccgagccggatttgagttccagctcgcagttgtttaacgaggagctgaaccattggatcgccacgcttacgcccgaacagcgcgagcgtgcggtggacgcgctgttcaccgtgctgcacgccaacggcgccaccagcttcagcgaggtgatgagcaacttccccgcttcgattccggcgatgcttggcgcgtatgtagggctgacccccgcagaccggcgtcatttggttgaggccctggcgatactgttcaaggcgtccacggccaaacgcaggccgacgcccgccccggcttccgcgccgagttctgcgaccgccaaaggaacagccgaaaccccagcaggaactgcgacaggaacagatagcgcggccccggccagcgccgataccgacaccgacactgacaccgcagcttcgccctcagcggaggacgcaactgaaatcgccgattagctcatagacatgtccacaaataatagttatactgcccgataagttattagacagcgtgaccatatcacgctggtgcatcaggaggaagagatgccacgtccacgccatgattccgaggtgctgcccgccaaagaacgcctagagaacgctttctgggaattgctcgccgaccgcgactaccgcaagatcaccgtcaccgatgtggtgcgtgaggctggcgtgaaccgtaattcgttctattatcacttctccagcctgcccgaattggccgattcagccatcctgcatcaggtcgaatcgattccgatcaaccgcacccccgacccaaatggcaatcccgaggaacaatggcgagaccgcgtcaccgccacgctctccgacccggagcagcggcagcgcctcgaccgcctggccctgttggccggcccgcacagcacgcttgaactgaccgaatcgctgcgcgacttctgccgtctgcaaatgctcagcacattgcaacgcgaccccaagaaccttgacctgaaaaccgatctcatggtcgagttcaccgtgggcggcatgctcgccgtgctgcaacgttggcccgaattgagcgacgccatcgaaatcaaagacctgcttaaagaagatgtggccgtgctggccatgggcatatacctggccatgagccaaaaggacatgcttaattactggaatcgcatcttcgtgcacaatgcgcaggattcggccgcccccggcatgccggccaccgccacgcatgccgcgccatcccccatctcaccgtcgaacggccccgcaggattccccgggtacaccgcttgaccaaaaaccagtgagtctggattgtttccgtcgaatgaacccccgcgtgaggtttctcacaaggcgcaatcagcctctcatgctggcgtttccagccctcacacaggaagatggaagcatgagcgaaacatcgaacaaaacccgtctggaacatgactgcatcggccagatggaggtgccggcgaacgtctactggggcattcacacccagcgcgctatcggcaacttcccggtctccggcatcaccgatagccaacatcccgagctgattcgcgcctatgccacggtcaagcgcgcctgcgccatcgccaatgaggaattaggcctgatcgacccggccaaggccgaggccattcgcgccgcctgcctagaaatcgaggccggcaaactggccgatcagttcccggtcgatgtgatgcagggcggtgccggcacctcgtcgaacatgaacatgaacgaggtgatcgccaaccgtgcgctggaaatcgccggccaccagcgtggcgattacacatacatccatccgaacgacgacgtcaacgagtcgcagtccacgaacgacacctacccggccgcctgcaaactcgcgcttatcgacgcgatcgggccgctcgccgagtccaccaagaaactcgccaaggccttccacgatctggccgacaaacatatcaatgacgtgacgattggccgcacgcagctgcaggacgccgtaccaatgacctatggtcaggaattccatgcgtttgccacgctgttgaagtctgatttggctgcattcgatcgcgtggtgccgctgctggcccagctcaacctcggtgccaccgccatcggcaccggcatttgcgcggatctgcgattccgcaagtccgccatcaagcatctggcgcagatcaccggcttgccggtcaccgccgcgcccgatccggtggccgccatgacggatatgggcgcgtacgtggccacgtcggccgccatcaagagccttgccgtgcacctgaagaaggccgccgacgatttgcgactgctcaattccgggccgcgctgcgggttcaacgatctcaacgtgccggctcgccaggccggatcatcgatcatgccggccaaagtgaacccggtgatccccgaatgcgtcaaccagtgctgcttcacgatcttcggcatggacgtgactgtgaactgggctgtggccgagggccagttgcagctgaacgccttcgacccggtgatggtgcatgagctgctgaccggcatggcgttgctgacgcgcgccatggagacgttccgcgtcaattgcgtggagggcatcgagatccacgtcggtctgggacgctcgtatgcccagtcctcgccgtcgatcgccgccgcactcaaccactacatcggctatgagcatgcggccgacatcgccgccgaagccgtgcacaccggccgtaccgtgcgcgaggtggccggcgaacgcaccgacctgcccgccgagcagctggacgagattctcgatccgattcgactggcccgtggcctcggccaaacctgccgcgagcatcgggactaggcgtcacggcgacgtcatcaccacgacgatgctgcaccgcggtgccgcggtggtgccggtggtgccgacggcacgccaccggtatcgcaccatcggcaccaccgcaacggccaaaacccgacgtgggcccgcatgtttacgacttcaccagaaatggtcgatacagtagggcatatgaccgaatatgcacaagacatcgcacgctggtttcaggtgaacgccggcaaactcatctggctggccgtcgtgctggccgtcgtgttcgcggccgaccgcgtgatcagccgcgtgctgcgcagggttctggatagttcgcagattcccagcgcctcgattttcgtgaatctcacgcgcgtgaccatctgggtcaccggtacggcgatggtgctgcaaccggtgttcggcatcaatccgaccaccctggtcaccgccctcggcgtcggaggcgtggcgatctcgctgggtctgaaggatacgatcgccaacatcatcggcggcttcggcctgatgctgggccgcgtaatccaacccggcgatctggtgaccattcaaggcgtcacaggtaccgtgcatgacatcacctggcgacagaccgtggtgcgcacccgctccggggacatgatggtcattcccaattcggtgctcaatacggccgccttgaccaagctcacgccggccagcgaaggcatggccacgctcgaattcacggccaaggcctccggcgatccgtccgcgatcagcagggatattctcgaccgcgtaaccaaagccaccgccgacgtggcactggagggccagccaccgctggtcaagttcaccggtttttctccttacggcatgaccggccaagtgctggtgttcgcgcgcgagggtgtgctaccttccaccatcaaagatatggcggcgcgagccatcgccggttcgggcaccgaataccttgtcgaagatggcggctcgtcagacaatctatgatatctcccgactcgcctctctgggtccggctatgacagtcatgcgaacagcatccaaccggtaagcatcacagtcaacagtaggtacgagataacgccgggattggcataggcggtgcgtattttaagccccgcaggcaactcctctggcgcaagatagaactcccaattcttgcgcttggtgataagcagcacgataccggcaatgcagaagcccaacatcactgtgccgtacaacatcatgatgcccatgccgcccatgttgccggtttcagccatacgcatgatttcggcctcgctgattgtgccgtcgaggatgcggggatcgatctgttgtatcaccaatggggcgagcactgccccgttcaggttgatcagcatgtgcatagccactgaataccgcaggcgggaggtgcgtgtgtatacatatccgaacatcagtcctaggccaaaggcgtagaagaactggaacacgttcatatggaatagcgcgaacgccaatgcggagaacatgattgcggtcttttctccgtaccggcgcaggcgggagataatctccttgcgaaaaatccattcttcgcaaaccggtgccaacaggcctatgaacaatgcgttcacccgccagtcgctgccaagaatcacgtcgttgatgcgattggtggcctgaccatcagtggctccggcagacaatatattgccaatcatattgcccaagagcattaccggaatgcacatgacgaaaatccgaatgaactcccccgccttcatggggtactgccgggtgcgaataaccggtacgcgagtgaaagccaacatactcagcggcatggccaccacatacagcggcccggaggaggcgagcagcacagcccaagcgggcacatcggcgccaagcagcgttcgtagtgcttcagtggccagaatattcagtccgatccagaacaccatcataatggcgagcgccgagccgattgtcgaaaaccggcgatgggccgtgaaccaccaatcgagtggggtttgttgcggctgctgcgccgacggcattggttcgctcatacttatcccccatagtcactggccgcaaacggaccgatcacacgtgcaatactcttcaagaatacggcacggcgtttcgattgcattgggaatgggggaggaaatcatcaatgggcaaggaatgatcaacgtcaatcattcccaatgacgagaaagtcccctactctgcgggattgttgtgggacggcacgcgattttgcccgattttttcgcggcggcccacaccactccacatatgactgatgacgccgcacgaagaaatggcgtcattgcaacgattcctcaatacaatctgtgggacggcacgaatgtacatcgtttgacgttcatgccatcccacaccggcgtgggacggcacgcgataatcgcccaaaaatcgccgccgtcccacacatatcattgccgataagccattcgacgatcgtacagtcacaaaacagaacagaaccgcacgatcatcgcaacgccattcagcaggcgagcgcggcgaccggacgcggggcgacaatcacgtcatcgcccaccgccagaccggccggcagctcgctggcgggcagctgcacggtggccttgagctgttcacctttgttccagcgctggtattcgccggaggtgatgaccgtgtccacacgaaccaaagagccaaggaagtgaatgacctccacgcgggcgcgttcgccgacgtgcgaatcgctgctgccagccaaggccagcatcaggttctccgggcgcacgaacacggccacggaatcgcccttggcggagccggcgagcagcggcacgcgctggccgaagaccacggcctcgtcgccattggatgcgccgagcaggcggttggtgagtccaatgaacgtggccacgtactcggtggcagggcgctggtacaggtcctgcggggcggcgatctgctcgatcttgcccttgttcatcacgccgatgcggtcggccacggccagcgcctcttcctgatcgtgggtcacgaagacggttgtggtgccggtggtgagttggatgcggcgaatctggtcacgcagctggacgcgcactttggcgtcgagcgcggacaacggctcgtcgagcagcagcacgcgcggcttgatggccagcgcccgggccaaggccacgcgctgctgctggccgccggacatctgctgcgtgtacttcttggcctgatcggcaagccccacgagctccagctgttccatggcgatcttgcggcgttcggccttgcccatgccgcgcacttcgaggccgaattccacgttctccagggcggtcatgtgcgggaacagcgagtacgcctggaacaccatggccatctcgcgcttgttcaccggcacaccggtgacgtcctgtccgccgaccatgatgcgtccgccttggatgtcttcgagaccggcaagcgatcgcagcgcggtggacttgccgcaaccggatccaccgagcagcacgaccatttcgccgggcttgatgtccaggttgaagtcgtcgagcgcgtgaacggtggagccgggatagatcttgacgacgttctgcatctgaatggaaccaccgccgcgcttggcggtgtctttgagcagggccttggcggccttggtcacgtccttgccgcgcacgccctcgagggtagcggtgggatcgttcttgaaggcgtcctcggcagtggaggacacggctgccgggatggccggggacgccggggcggcgtccactgcggtaccggtttcctgacgggtgggagttgaatcgttgttcatcgggtcacttaccttcccttgacttacgcattgcgtcggagatcaggtcgagcgcaacgaggagcaccacgccgaagagcagagccagcagcgacatggcggtggaaatttgggcattggattggccgagctggtagagcgcgacctgcaggttcatacggccgagcagcgaggcgacggtgtattcaccgagtaccacggcgatggagatgaaggatgccgagaggatcgactgccacaggttcgggatgatcaccttgaagaacactttgggccaggaggcgccgagcgatcgggaggcttcgaccaacgtcttgacgtcgatggagttgaggcccacggcgatcgcgcggaaggcgaacggcatcacgagaatcacataggcgaagcacagccagatcgggttggtgctcaacacgtcggcggaaagccaacggtagatcggcccaagacccaccaccagcacgatggccggaatggtcagcggcagcgtggccacccattcgattgcacgctccaaggctttggagcgaatatgcacgatgaccatggtgggcaccagcaggatgagcatgatcacgacggtgacggcgctcaacgacagcgagatgccgacgccctgccatagcacgctcagatcggcgcccaacgattcgccgttgccggtgaaaatcgccgtccacggcgcggccgaccagcggccggacaacgggtgccgcagcgtgaagatgaacatggccagcagcggcacgaacaggaacgccagggtgacgaacaggatcacgaatttgatgatgctctgtttgcgcacgcgggcggcacgtagctgcggcggcttggttgtggaagtttcggtcattgccaacgtccggccctcttttccacggcgtggctcagcagcatgacgatggccacgacgatgatcattgcgaatgccagcacctgcgcgaagccctgctggttggggtccatctcattgcgcatggcaccttggatcatcaacggcaccagaatcgagcgctgcgagaacagggctgcggcggtcgcgtatgcggagaacgcggaggcgaacaacagcaggaacgccgagatgaagcggggtgcgaggatcgggcaggccacgcgcgtccagtattggacggtgttgccgccgagcgactcgcaggcttcgcgccactgtggacgaatggaatcgaccgcaggcaggaagatgatgatcatcagcggaatctggaagtagcagtagacggtcaccagccccggcagggagctgagccaattcgggttcacggtatagccagtcagggttttgatgagcatggtgccgatgccgttgatgccaagagtggcgatgaacgcgaacgcgagcatcacgccgccgaactgggcgagcaccgatgagatggcggcgaccatacggcgcagcggtccgttcggcttggcgccgatcaccagcgcgtaggaggcgagcgcgcccaccacggcaccgatcagggatgaggccacggacaccaggattgacgtgccgaacgcggcgatggtgttggcttcgaacatcttgtggaagttcgcaagcgtgaaaccgccgctgcgatcctggaacgcgctgatgatcacgatcacggtgggtgccagcaggaagcaggcggtgtaggcgaagaacgggagcgtggtggcgagcgtgccaagctcctgacggtgcttcgccagtgcggacgaagcgggggtcgatgcggcggacggacccgcggccttggaggcggcgggtccgttcggtgcgatgggtgcgattgcggcggtcatcgtggactctcagttgccgatcgtcttgtcccagttgttttgaagccactcggtgatgcgggtggagtcatcgttgctgtaggtgaccggctggccttcgatggtgatggcgtccttcagggtggcctggtcgacggtgccgtcggccttcatggagtcgagcagcaccgggttggcgccgcccttgaaccacaggttctgggtttcggcggtgtacaggtattcctcccacaggcgtgcggcggcggggtgcggcgcgtccttgttgatggcctggttgtagtagctgacgacctgggctttggggaaggtcttgtacttccagttcacgcccttggacttgagttccttcttgtaggaggcctggttgtaggtccagtcgaagaccacgccggtctggccggagtcgatggtgccgttggtcacatcgatggtgttcaggttgccggcttccttgagcttcttgaagaagtcgagaccgggctgcaggttgttgatgtcgccgccggcgagctggttgaccatcagatagccgttgaaggccgcgccggcctcggtaggcttgccgttcagggacacggtgccggcgaacttcggatcgagcaggtcgttcagggaggcgacatcgccgtacttgtcggcgttccagcccacggacatgatgccggtgtagtcggcgtagtaggcgccgtcgacgttcttggcagcatcagggatcttgttccaggcctgcaccttgtacggggcgaaatagtcggtggaggtggcggcgatggcctggccgacgtcgaagacatcgggggcggcgtcggtacccttgttggtcttggcggcgtcgatctcctccttggaggaggcgttcgggttcagctcggtgatcttgatctccgggtacttcttcttgaagccctcgatgacctcgccgtagttggaccaatcatgcggcaaggcgatgacgttcagcgcgccctcttccttggcggccgattccgcaccacacttacctcagcacgccctcaatcaatcgcgtgatgagttcggtgtagctcactccggtggcatcccaagccttgggatacatagaaatcggcgtgaagccgggcatggtgttgatttcgttgaccatcaccgtgccatcaggcgtcacgaaggtgtccacacggctcaagccggcaccatccacggccttgaacgcacgccgggccacgtcacgcacgtcctcaagcacgctgaccggcagattggccggcacttccacgtggctggcggaggcatccatgtacttggagtcgaaatcgtagaactggtcgtcgttctgatgatcgagcacgatttcgccgggccagctggcctcgggctcgtcaccggccttcgggcacagcacggcacattcgatttcgcgaccatcaatcccctgttcgacgagcaccttccaatcgtgctcgccggcggtggcgatggcggcggccagacgatcctgctgggtctcgcggtcatcggctttctcgaccttggtcacaccgaagctggagcctgcgcgcgaaggcttgatgaacagcggataggtaagaccggcgtcctcgatcttggcaagcacatcggcggcggtgaagttgcgcgcatcgaccgtcacaccgggcgcggtgggaatgccggcggcacccagcaccaccttggtgtaatgcttatccatgcaggcggcggaagcaaacactccgcaccccacgtacggcacacccatcatttccagcaggccttgaaccgtgccgtcctcgccataaggaccgtgcagcaccggcagtaccgcgtccacatggccaagggaggtcagcgcatggtgcatttccgggtcggacatgctgacgaagctggtgccgaagccggaatcggcggaattgatgcggctgggctcgccgatgaagaaaccgtcctggccgcgagaggggtcaagcatcaccgggcgcgatcccggggtgatctttacggtcggcagctcgccgccatccagattccagccacgaggatcttcgccgttgatgatccacttgccgtccttggtgatgccgaccggaatcggctcgaaccgttcagtgtccatggcccccagcacaccggcagtggagatgcaggaaatcgaatgctcgtctgcacgcccaccatagagcaccacaacacgcttcttggccataaccatccttttattgaaactacaaccgttttcaagcctatgctttgcaccgccaaccggaccgaaccgcgctcggaccgccgcgcacaagagacgcacaccagtctactcgcgcacgtcaacgacgtatacgccacacgactttgcacgtacaacgtatacgccacgtatacgtcgcttctctcgttattcgccggtaacctcgtgcccgaacagtccggcaagcatctccgagcaggaaatgccttcgttcagcacgcggctcatctgatacgccaacggggtcggcacatcaagctgctcgccaagagccaccaccgcatccgtggtgggcacgccttcggccacaccgttgctgaccttggtggcctcctcgaccgtcaatcccttgccgagattcgcgccgaacgtatagttacgagacagcggagagccacaggtggcgatgagatcgcctacaccggccaagccgaagaaggtcttgggatcggcgccagcggctgcgcccagcgcggtcagttcggccagtccacgagtttcgatcatggctgcggtgttctcaccgtagccggcaccacgggccatgcccacggccagcgcggtcacgttcttcaggctgccgcacatttccaggccgatgacgtcggtggtcacgaacggcttgaaataggaggtggtacatgcctcggccaccttcgtggcattatcgaggttcgtgcaagccaccacggtggcggcaggatgacgatcggcgatttccttggacaggttcggtccggaaatggcggcgaaccggtcggccggcaggtcaagggattcgcggacgacttcgtccatacgcttgttggtgccacgctcgatgcccttcatcaggctgacgacgatggcgtgatcgggaatcagtcccttgaattcgacgagtgccactcgcgcgaactgcgcggcgatggccacaaccacgatgtccgcgttcttgacggcttcggcgcgatccccggtggcggtcatgttgtccggcaacttttcgacggacggcaggcgcacggcgttgtggtggcgatcgcgaatgccctcgacaatccgctgctccttggcccacatggtcaccgtgttgccggcgtccgccagcacttggccgaaagcggtaccccatgctcctgcgccgagaaccgttatatttttacccatatcagattcctaccttcgcttgtcgcgcaacttcatcggcacaatcttgtgccatgctactcgcctaggctccccgtacgggaaccggtgcggctacttctcagccgggaacgggccgccggcttccggccaaggcttgcgactcatgctgcggtagtcccagtagccttcagcggggaactgctcgccacgaatttcctccagtactgtgttcatgcgtttgagcacgcgccacatcagctcgctcacggcctcggcaggcggctcttcaccccatgagtccatgtcggcaagcagatcggagtaatcgagcgcatggtcatagcacatcaccacgttcttgcgcggccatggccaccagtggttgatggaggcggcaccccacgtcaccgccgggtacagcggcacctgatgccccagtctgcgcgaggattcaagggcgatgtatcccacgccctccttaatgctcatcacccactttttcgggtcgcgggtcacggtgccttccggccagaccgtcagcgggcggccggacgtcagaatatcaatcgaggtctcttcgatctgcttggccttgcccgaatgacgctgcaccggctgcatgccgaccaactggaaccacttgccgatcaatggccacttcgccatctcggccttggccatgtaacgggggcggcggcccatgtggaacaggctcatcatcggcacgaacacatcgaacatggtgatatgactggcggcggtgatgaacggtccggtttccggcacctgttccaggccccaggccttggtcttgcagctggcgcggaacacaatggacacccctcccagcagtcgtttggtgaccttgggattttgggcgtcgatttccggctgattgggcgtgcgagggccggtcgggtaatactgtgtcgagtccacaagcgtgtggcgggcggccagacgcttgacctgctcatcactcagcgggcttacggccgaacgcggcgacggttttcctttggatgccatggtctctattgtggcacggaccaccgcccaacgattccagcgcaacattcccgggaatgtgccgcggaaccacccctcacaccccgcctagcgcgacattccccggaatgcgtcgcacaatacgcggcggcccgtctgcacacaccatgcgtgcagacgggccgccgggaaaacgttcgaatcactccaccgcgatggcgtcgatctccacgagcgcgcccttgggaatcatgttgttgccaaaggccacgcgggcgggcttgacggagccgatgaacgcctcagcgtaacgtgcgtccacttccttgaagtcctcgacgttcttcaggtagatggtggcgcggcacacatgctcaatgccggtaccggcagtgtcgagaatgtgcttaatattcttcagcgcctgtgcagcctgctctccagcggtctcgcccgccagttcgccggtggccggatcaatgcccagctggccggatacgaacacgaagccattggccttcaccgcctggctgtatgcgcccagcgcggccggcgcctcggaagtggctacggcttccatcttttcgctcatattgtgctccttctcatcttgggggcgcccacctgctgcggccggcgccggtacacatcaccaccggctacgaccaatcgcacgatcagcaacgattggcaatgccgattacgtagcagtctactgagcgaagtcgcgtttagcgcgcatgatgcccggcatacggccatcaacagactattccttgctattccagacgattccagacgattcgactaccgttctcgccaaaccgggcggtttttccacgacccaagcgagccggcatcaccgaccccgacaccagcaccagcaccagcaccagcaccagcaccagcaccagcaccagcaccagctttgcacgcgcttaatatcacgcgccgaatatgcaaaaggcttccggcggctagccgaaagccatgctggtgggcttgatggggatcgaacccacgaccttctgttccggagacagacgctctatccactgagctacaaacccgagcaacttctttactgtacaccacatcacgctgcatacggcacatacgtcgccaaaataacgagaaaatcgccatcatcggctctacaatggggttatgtcggaacctacagatgacttcgaatacgaacgccgcttcttctgccgcgagctgccggcggaatacgacgacggcgacgccccgaccctcattattcagagctactacgtgcatgccgacaattacgccttgcgcgtgcggctggtctcgcacaaggtgcacgtcgacatgacgtccgacgtaaatccggtggccgtgctggacgaataccgcgaccggttctcggaagcgtatgtcaccgtcaaaggtccgtccgtgggtggcacgcgctacgaggtcgagcgcgagatcgacacgcgcatcgccgccgaactcatcaagcgcggcggctcggtaatcatcaagaaccggtattccgtgtggattgcggaagacggctggagcgtggacgtgttcggcgggccgaacgcgccgctgatcgtagccgaggccgaacgatccgggccggttaccaatctgacgattccgaaattctgcatcaccgaaatcaccgatcaggcgcgattcaataacgatggtctcgccaaccgtccgttctgcaagtgggcggatgatttcgaggaggaactggcgctggaggggccaaggttccagcaatatttcgggaagaatcggatggtttaggggaatcaatcaagtacgttcgcgcgcttccctcagtcatctacgcctgacagctcccctcaaagaggggagccaaaaccaatcagtacatgagggtggctaggcgacggcgggcgcgggccagacgcgggtcggtgggttcggggatggcgaagtattcgagcagacgcttgcgaacctgctcgatatcggccttgtgcccggcggccaaaaagtccagcaaacggtcgaaagcgtcttgaatctggccaccgatcatgtcgatatcagccacagccaactgcgcttccacatcgtccggcgctgcggcggcagcggcacgcacgtcacgtacatcagcggacccggagcgggccagcaacagcgccttcgcacgttcgcgggcggccagtgcatcggacgggtcggattcgagcacgcgctcgtattcggcggcggcaccggcgtaatcgccctcctcggccaaacgatgggcttcggcatgctccggcggcacctgctcagcacccacgccggcaccggtggcaccagcgctcttggcggcatcggaatcaggatcacccgagtacggcgcggtaccgttcacaccagactgcgcggcggcctgaatgatcttcggaatcacctcgtcggtaagttgcttgagctcgtcgtcacccggaaggccctgcaacagtggcatcggacggccggcaatcaacgcgaacagtgcgggcgcgccctgcacctgcaacgcttgggcaatcgaaggattggacgagatatcgatacgggagagctgaatctggccgttcagggcgttcaccgcgtcgcccaacgcacgggccatcgggaacaggcggtcatcggtcggtatccacaggagcagcaggatcgggaaggtcgcagaagtctgcaccattgcctggaaggtgttttcggtggtgtcgatcacgtacccaccagcggcaggagcgccacccgcttggccgggctcggccttgacctgatgcttcagcgcctccaaatcgacggcgcccgccaatgagactcccggattgaactgctgctctgccataatgcctcccgattccacgcgattcgcgtacaacaacaatcacatttgctgacattgattgtaatgccgattcccaccacgtagggattcttccactacgcggtgaaattcccaccacgtagcaaaacgcccaccacgatgtgactcaaaacggcaccattgtgcgaaaggtaaaacttaccgacatcgtggtggatgaatcatatcgtggtggggcgttaaccgcgcggtgggcggcggcaacaactacagcgcttcgacctttaccggctgacggtcggcgcccacggcggtgatttgctcaccggagcttgccaacggaatgtacaaggccaccacgttcacatacgtgaccttcatggtgctggtgtacttgtcgctattgaacagcgccttctcgtcgtcggaagccggctgcgattcgcggccatcccccgccctgcgagtccattcgccgttaatacggccaaccaccaaatcaccggcaccgtctgcagcacgcatcacccacatctgttcaggcacaacggtgaatttctgctcctgcgtaccgttgttgcgttgcataccttcctgcaccttggccgtggtattggccagttcctggcgcagcaaatcgtctgcgaacttggaagcgtattggctcttggagccgttctgcagcacatcggcgtattgggtcaaggcatcggcgggagtggccaccagcttctcatcctttgcagtgcccatctgcgagccaatagtcggaatctcgaacttcggcagcttggccccctcaaacagtcgagccatggccatcaacttgtaattctgctgggcggattcctgatcgaagaccagcaaacgcttggactgctgatcttcggtggtggtcgtgatggtgaacaccgagcgaggccatccgtcgtccatgggaatcaccgtctgggcgatgtccttgggaatggtcgcgtatttggacataccgccgccgcgctggttgatcgtggtctggctgatgcgaatgtccagctggggcccgcccataacggccgcatatccatcgggattcttggcctgatcggcttcatcgatcgtcttgagaatcttcaggcgaatcttcttctcctgtgcctcggtcaaatccggcgcaaccttggtggaggtatcagcagccggcgtcggcagccggccttcacaggcggtcaacggcacgaccaacgccacgcaggcgagggcggccacacacagtttgttccatcgcttgttcatcagctttcctcctgtccgtcatcggccgagtcgtctccggtattgacctcttgggccaagcgggagaagtaggcctgcagttcgtcaggggtgattaccgaagtcgattcgttatcgccggcgctgaagccggtctcagcgccgctctcggcaccggtctgctggtcggcgaccaggttacgtgaacttgggtcgatgataaccggtgtttcggtggcttcagattgcgaggacgcacggcccgaacgccgatttgtggcgtggcggcgacgattacgtcgacttgcaccatccggcttcccggacactgcgatgctggcgggtgcctcttcctcaattacggcgcttgccgtgccttccaccatgcgcttgcggcgcttatgcggcggcatggcgaacacggaggcgcacaatacggccagcacggccagcaatccaccggacagatagaacggcatcgcaaagtccggcacttcggagcgcacccagtgcagctgcaccttggcgttggtggcattttcacccaaatccacaatggccaccgtcgaggcgccggtcttcttgctctccagcgaaacggacccggtgccgcatttcacggcagtccacatatcggaatccttgaacgccaccgcgtcatcggcactggcaggcgctccctgactcgtgctgcttcccttctgggtgctcagctcgctccatgacgccaatccggtgatacgggtataggacttctcggacgcgacccatccggcaacatccttggacggacccaacgccacgcacgcctcgtcctgagaggatcccgagtccacggttatcgtggcgttctgatccaacaaggtcagcacattcggatcagtgacggcataccgggagccgctcatggttgcggaagcggtgatttcagtggagggcttccatatcgtggtattcatgtaccccaacaccacagccgccacggccaatagaccgaagataggcgtcaccactccacgcatgatcttggcatgacgggatggacgcttggcgcccttatccggtcttgtagtctgttcttcagcactcataacttaaccattctacaatcttcacctgtttattacctaggagcgcagaaaatcaaggttcaccagtagggtggtgtgtcatgcgtaagtctgttaaatctatgttatcccctctcggcaaggccgttgctcttgcctgctcgctggcgatgtgcgtatcgctggctgcctgctccagttcgagctcggactcgaaatcctcttccggctcttctgacaagaaggggcaaattgccggcgtgaccgccaagggcaagctcggcgagaagccgaccatctcctttaatacgccgatgaccgtgtccgacggctcctatgtggtgctgcaaaagggcgatggcgacgtaatcgaggagggcgaccgcgtctgcgcccaaggcatcgcgctcaacgttaaagacggcaccgagctcatggacacctggaccaagaacacgccggattgctcgctgaaggtggattccaagaccctctcctcgacctactacaaccagatcaagggtgccaagatcaacaccacgatcggctttggcgtcaacgctcaggattcgtccggatactcttacattttggcgatgacgtttgtatccaagtccaaggacctgaagaaggccactggcgaggaagtcaaggatgtgccggccaatctgccgaaggtgacgcgagccaagaatggcaagccgtccattgacatgaacggtcagggttcggttgattcgctgatctcgcagacgctgatcaagggtaacggcgccaagctgaccgacaagaacaccgtggtggtcaagtacaccggttggcttacggatggcaagcagttcgattcgtcctgggatcgcgattccacaatcgacgccgatctgttcagcgattccagcggccagcatcaggttatcgagggctggcagaagggtctggtcggccagaccgtcggctctcaggttctgctggtgattccgccggatcaggcctatggagataaggagcaaggttcgattcccgccaactccacgttggtcttcgtaatcgatattctcgccgcgtactaaacaatctcgatggctctccccaagaggggagctggcagcgaaactgactgaggggaggcctcacggaatataccgtgaggcctcccctcagtctctctatgtacgttcgaaccccccctcaagagggaagccaagaacaatcagaacagcctgagactgtcgtcctcggtgcctttcatatcgtcgtaatcgaggatgaggcaggtgaagccgcggtccttggccaagacctgggcttgcggcgtgatggtttgtgcggcgaagatgccatgcaccggggccagcagcggatcgcgattgagcagttcgcagtagcgagtcagctgctcgacgccatcaatgccgccgtgacgtttgatttccacagccacatgctcgccctcggcattcacggccatgatatccaccggaccaatggcggtagggtattcgcgacgcaccagcttggctcccttgccgatacgctcgatctgctcggccagatagcgttgcagatggtcttccacgccatccttgatgagacccggatcttcgcccagatcataggtttggtcggaatagatgtgttgcagcgtcacttcaagaatgtcagagcccttgtcggcgctgacacgtagcaccttttccggctcaccagcggcgacactttccggggaatgcgtcgcggaatcaccatccacagccccaccagcgacactttcccgggaatgttgcgcggatttggcggctgggtcgatctcacgaatcgtgcagggcgcggtcatccagttcagcggcttgtaggagcccaattcggagaaaatcaacaggctggaatcagccttgatcagcaatacacgcttggccaggggcagtgaggcgttgaggcggcccgaatactcggccgaacagtcggcaacaataactcgcataggccaccactgtagcgcaacacatggcatacatagcaaaaggggctctctggaaaaccagagagccccttgaggagttggttcagatcactcggcggtgccggagtactggacgtcgtggccgcgctcgaccgccacggtgagtttgttcgagtcgaaggagatgaatccgtcggtcacctcgaacatgtggcgatcgccatcgggctcaaccacggtgagcgtaccctgcttgatcaccgtgagcacaggctcatggtcgggcaggatgcccatgccgccctcagaggcgggaatggtcacgctcgtcgcctcgccgtgccacacagggtggtcagcggcgacgatgttgaccttcatcgtggttttttccgcagccatcacgcacccagttccttctgcatgttgtgccacttctcttcgagatcatcgatgccgccgataccggagaacgcctgctccgggacgtcgtcgtacacgccgtcgcagatgcgggtgaaggcttcgatggtctcgtcggccggcacgtaggagccggggcgaccggtgaacttctcggcaacgtagaagttctggccgaggaactgctcgatcttacgagcgcggttcacggtggtcttgtcctcttcgccgagctcgtcgataccgatcaaggcgatgatgtcctgcagctccttgttacgctgcagaatcgccttgacgcggttggcgcagtcgtagtgagcctggcccacgtaacgcggatcgaggattcgcgaggtggagctcagcgggtccacagccgggtagatacccttggaggcaatgtcacgagacagctcggtggttgcatccaagtgggcgaaggtcgtggccggggccgggtcggtgtaatcatcggccggcacgtagatggcctgcagcgaggtgatcgagtgaccacgggtcgaggtgatgcgctcctggagggaacccatctcatcggccaggttcggctggtaacccacggcggaaggcatacgacccagcagggtggacacctcggaaccggcctgggtgaagcggaagatgttgtcgatgaacagcagcacgtcctggttctgcacgtcacggaagtactctgccatggtcagtgcggtcagcgggacacgcagacgggtacccggctgctcatccatctggccgaagaccagtgcggtcttctcaagcacgccggcctcggccatttcgccgatcagatcgttaccctcacgggtacgctcgccgacgcccgcgaacacggacacgccaccgtggttctgagccacgcgctgaatcatttcctgaatcagcacggtcttgcccacacctgcaccaccgaacagaccgatcttgccgccctgcacgtacggggtcagcaggtcgatgaccttgatgcccgtttcgaacatctgggtcttggactccagctgatcgaaggccggcgggttgcggtggataggccaacgctcggagacggtgatggtctcatccggcttcttgttgaggatgttaccggacacgtcgaagacgtggcccttggtcacgtcgccgaccggcacggagatcggggcgccggtgtcggagacggaggcaccacggaccaggccgtcggtgggcttcagagcgacgcaacggaccgtggaatcaccgaggtgctgttcgacctcgagggtgatctcggtctccttcgcctcgccttcttccttggcgccggtgttgacgatcgttactttcagggcgttgtagatgtcgggcagatgacccaccgggaattcaacgtcgataaccgagccctggacgcgggtgacgcgaccgttggtaggctcggccgcagtggtctggttgtcagccatatgcgttcctactcttccttcttggtcagcgcgtcagcgctgccgatgatttcggtaagttcctgggtgatcgaggcctggcgggaagcgttgagcttgcgcgtaaggtcgtcgatcaggtttcgtgcgttgtcggttgccgtgtgcatggcgttctggcggcttgcggtttccgacgcggccgcggtcagcaggcactcgtggatgcgggactgaatgtacttcggcagaatcgcgtccagtaccttttcgaggctgggctcgaaagtgtacagcggagcgacatccgcagtagccggtgcctcttcatcaggatcgggcaccttggtctcgtttttcacgatttcgaccggcagcatgcgcagcacgcgcaccttttgcaccaccatgttgatgaactcggtgtagacgatgtagagttcggaaactccacctttctcagccggcttcatgtaggcgtccatcaaagtgttggagatcgtttcagcaatttccacgccgggctggtcggtgtcgccttcccacgtcgccgcgatgtcacgattacggtacttgtagtacgtcgaaccgcgacgcccgtacacgaacagctccggctgcttgcctgccgcatcgaggcgggacagcagcgactccgtttcacggataatcgaagaggtgtacgggccggccataccacgatccgaggtgagggcgagaacagccacgcgcgggttcttctcgtccttcaccgcgatcggatgcgtgatatgggtgtgggccaccaacgcttgcacggcatcgaaaatcgcatcggtgtacggcttcgcgttcagggccacatcacgggccttggcgatatgcgaagacgcgatcatctcctgagcgttgaagatcttcgccaacgactcggtggagtggatgcgtgatttcaatgcgagttgcgagcccatggcttacttttctcccgccacgatcttttcctgatcaaccggcgcggccttgtcaacgtccggcttcttctcgaccagcggcttgccggcggaagagacgaacgtcgaacggaactcgtccacggccttatcgagggcagcctcggtgtcggcggtgaattcctcggtctcgcgaatggtcttgaggatatcggtgttgtggtcgatgtagtccagcagtccctgctcgaacggaaggacatccttcaggtcgaggtcatcgagcttgccgtgggtgccggtccatacggacacgacttcctgttccggcgagtacgggtggaactgcggctgcttcaacagctcggtcagatgggcgccacgggtcagctgggccttggaagccgcatccagatcggaagcgaacatggcgaaggattccagcgaacggtactgcgccagggagatcttcagcgtgccggagaccttcttgagcgccttggtctgcgccgcgccaccgactcgggagacggagatgccgacgtccacggcgggacgctggttggcgttgaacagatcggactgcaggaagatctggccgtcggtgatggagatcacgttggtcgggatgtaggcggacacgtcgttcgccttggtctcgacgatcggcagacccgtcatcgaaccgccgccgagatcatcggagaccttggcgcaacgttcgagcaggcgggagtgcaggtagaacacatcacccgggtaggcttcacgccccggcgggcggcgcagcagcagggaaatcgaacgataggcctctgcctgcttggacaagtcatcgaagacgatgagcacatgcttgccgttgtacatccagtgctggccgatggccgagccggtgtacggggcgatgtacttgaagccagcggaatcggctgccggggaggccacgatggtggtgtactccatggcgccggcgtcttccaggctctgcttcaccgaggcgatggtggagcccttctggccgatggccacgtagatgcagcggacctgcttcttcgggtcgccggattcccagttggccttctggttgatgatggtatcgatcgcgatggcggtcttaccggtctggcggtcgccgatgatgagctggcgctggccgcggccgatcggggtcatcgcgtcgatggccttgaggccggtggacagcggctcgtcgaccgggtggcggtgcatcacgtcgggggcctgggcttcgaggatacgacgaccctcaatgccctggatctcgccgaggccgtcgatcggcttgcccagcgggtccacgacacggccgagatagccgtcgccgacgggcacggagagcacttcgccggtgcgtcgcacttcctggccttcctcaattcctgcgaaatcgccgaggaccaccacgccgatctcacgggcgtcaaggttgaacgccaggccgagcgtgccgtcttcgaacgtcagcagctcattggccatgcaaccaggcaatcccgtcacgtgcgcaatgccgtcaccggccgtggcgacatagcccacttcctgggtgggggtgtcgctcggcttgtacgacgacacgaagtcgtcgagggccttgcgaatcgaggcgggatcgatggtcagttctgccatgatcactccttctattggttattgttcagtcaagtctttgcttgtgtgtggtgttggacggattggctcggccggtcaggccggagtcgcctccgtctgcaccttgcgatgcaggttctgcagctgtgcgaccacggtgttgtccgtgacttcgtcgcccacctgaatgcgcatgccacccagtacggccggatcgaccaccgagttgatgtgcacctggcggcccaccttggcggagtagacctcgaccagtcgctcaatctgctccttcttcagcggggtggcggtggtcacggtgaccatcgactcgcccatgtggcgggagaacttgttgatcagccactggatggtctccaagtagcggcggcggcgcaggttgcaggtggcgtgttcggcgagcctcatggtgaccttgttcagggtcttgccggagaacacctcgcggaacagcttcacacgggcctcgctggtggcctggcagtcgtacagcttggagcggacgaccggcaggttcagcagtgcggaatgcagctcggacagctcgatggatacctgcagcgtggcgtcggtggcgtcagcgtagtacatcatggcgtccacgccgaagtcctccaccgcgttggcgatgtcgcgcgcacggctccaacggcgggagaccaagtcggtcatgatctccatggtcataggatgcgcgttgtcaccgagcagtcccttcaggacggccaccttgtcggcgaccgggcgggacgggtcggtcagtgcgcgttccagctgaatgctgtcatcgagcaccttggtgatcgtgaacagttcgttgccgatccgccacgcgtcctcacgggtgtcgcgcagtttcggggccagcgaatcacgcgactcgcggtctgcaatacgtgatgcctctcctcgcatggtcacctccctttctggttacggatggtcacggtcacttcttggcgcccaggtcgtcgatcatcgaatcgatcatcgaggactgcacgtcgttgtcttccagcttggcaccgagaatcttgccggcaagcgcggtggcaagagcaccgacctcgcccttgagcgagacgatggcctgctgctgctgggattcgatcgagcgctgtgcggatgcggtgatttgagccgcatcggactcggcgcgggaacgagcgtcggcgatgatgtgggacgcttctgcgcgggcgtcgtcgcgaatcttggcggcgtccacacgggcggtgctcagctgggcctcatacttggccttggcctcgtcggcgtccttcttagcctgctccgccttggcgatgttgccctgaatcttggcggcgcgctcgtcgaagatcgcattgaacttcggcatgaagaacttgtagaagaacaccgcaacgatgacaagaatgatcagggaccacacaatgtcataggtctcgggaatgaacagatcaattccgccttctgcgagcgtcattatgaagtcctcctttcactggtggattcgttttgccttctgtattcgactgagaaaacgttcgatcagtggaacatcagggcggtaacgaagccgatcagtgccagcacctcgatcagagccaggccgatgaacatgatggtctgaatcttgccggacatctcaggctgacgagcggtggattccatggccttgccgaagaggatgcccagaccgatgccagggccaaccgcaccgagaccgtaaccgatgacggacaggttgccggcgaccgctgcgagggtgatgatatccattgtgtttcctttctaacgtacttggcgacgttataaatcttatttcgttcggtcctgcctacctaggcgaggccgggttccgaaagagggggttgaacctcactcctccgggaagcttaggttgatgtacacggtggaaagaatggcgaagacgtaagcctgcaggaaggcgacgaacgcctcgaagcacgtcatggcaagaccgctgacgaaccacatcgcgccgactgggatgccttgcagcttgttggctgcatcgacgatccagtactgtgcgaatgccaggcaggtggcgaccatcaggtggccggaaatcatgttggcgaacagacggatggtcagggaggccggacggatgaccagcaactcaaggatgttaatcggggtcaacaggatgtagaccggccacggcacaccgggggtgaacagctcgtgacgcagataatggccaagaccttgcgaacgtgcggcggcgatccaatactggaccatggtccagatggcgaacaccagcggcatgaccacagtggcggtggccgccatgttcatacccgggatgatgccacacaggttgaagatgaaaatcgtgaagaagatggtggtgatcatcggcacgtagcgcttgccgcgaacctcgcccatcacgtcatagacgaccttgtcacgcacgaagtcaagaccgtattccaccacgccctgccaacggccggggatgagcttggcgcgctttgcggtcacgccgagcaccaccaacagcacgatggttgccacgatacgaatcaaaataatgcggttgatagcaaacggagttccctggaacagaatctccgggggaaggaagtcgttgaccgagggcagatgagcgcctgcctcgtcagccaacagcaatcctgcgccgagcgaaccgaccatatcacgcctcctgctttttcaatgtcaggtgtcagtttaaacccaccgggcaggcaaatgtgacgtgctcgttactttcgtctttttcgtctcctcggtgtggagcctgccgggcgtggacacggagtctgcgctgggcattcggctccgaatgactgaagagtgattatttgcctgcgtctagacaaagtcaatattacaccggcgagtcttttccgaggcctactggcgcaaggctttcccgggcgtttcgccggcttcgcgcgctattggtcgcatatggcggatgtgtggcattatgttcatcaggttgtccgtatcgtggacggattgccgtccacggtgcgaacgctcagccctgaataaccccgtatccgtcatgaacaaacggcttgaagtcatcctcacgtggcccgcccggctcatgccgaatcgaacggtcggtacccagcttcttctcagccctgagctgcggcacctcggtcaggtcgtacggcgtggtctggtacacccagttgagccagttgcgccacagcagattggcgtgggcacgccagacgaacaacggttccagcttcggatcgtcatgcgggaagtagttcttcgggaagggcacgttggtcatgcccttggccatatcgcgctcgtattcctcggcgagcgtgtacttgccgtactcccaatggccgagcgcgaacacttcggagaagtcacgtgtggcgattaggccgggtccggactggggaccccaggtcaggatctgcagatcatggttggcgcgcacatcatcctcgttcacgccggcaagacgggagtggggctgcagcgcgatctcgtcgaagccgttggtcaggaagcagtattcatcctgcagatattgggggaacactccgaagatcttctcggggtaatcgaccttgcgaatgccgtagcgctcatacagcgcgcccatcgcaccccagcacaggtacatagtggagaacacgtgggtggaggcccagtcgaggatcgtcttgaactcgttccaatagtccacgtcctcgaacggcatatgctccacgggggcgccggtgaccacaaaaccgtcgtaatagttgtccttgaacgcatcgaggttttcgtagaacttgacgagatgatcggcggaaacgtgcgtggcctcatgcgtggaggtcttcatgaagtcgatttcgacctgcagcggcgacttggaaatcagacgcagcagctgcgtttcagtctcgattttcttaggcatcaagttcaggaccaccagtttgagcgggcggacgcgctgacgctccgcctcgggcttctccagagcgaagatgcgctccgaatcgaggatatctctggccggcaggccactggggatcttgataggcatgttcctattatgtcaatattcgggataacggttcagggcattcctataacggccatttatggcgcgttatcaccccgactccggctccgccccaaacccctcgctgcgtgagccgattcacgttttaaaaccgtgggaaaatgacacgacacgccgatgttgactttctggaatctgcacctattgtagatagagctgtctgagagacaagccgacgcggggtggagcagctcggtagctcgctgggctcataacccagaggtccatggttcaaatccatgccccgctaccaataagccattaggctcaaggaatttggccggtgcaattccaaggaattgcccggctttttccatatctggaatcgtccacgacgttgcgccattcattttctgcgagatcaagccacgcgacacgcccagagcgcgagacaaatcggtctggttcttatcgcgcatcgcaagcgctacacgcatgttagtgctaattaccttttccaacggaatcacttgggtttccggctctaaagtttgtgtactcatacttaacactctaccatgttgttaagcagaatttagcaattctgcacctactttctgtttagtgtgactaaaacatgggttatagtgtttagcgtggctaacaaatgtattggaacaacggctaagcgagtggacatggttcttcgcaacgcacattttagccggtctgcgcttgccgaggagctgggcgtgacgagatcagcagtaacacagaagttcaccggcaaggcacagttcactcttcgtgacctcagccgcattgctgatttcttcgatgtgagcgtcgatttccttcttggtcgttccgattatgcgaaaccgttggaggtggcgcaatgacgattcttgcgggtgccgtgttgctgtttgttttttgtgcaggcgtgtttctccttggtatgggcggatacgtctctgtcatcagttttcttgaggacgattggctgggtgtcgcctttggcgtgcttgtgggctttgcggggttgttgattgcatctctcccagtggtggtccttgtctccgggggtgtgtcatgagctggtcagcctattcccccgcgtattgcgtggtatccgttggtgtcgagccagttgattgcatgatcgagcgggcccccgtccttgggctgcatcgtcgcgggaattgttctgcgctgtggagcgcagtccggggtgttttggaacaattcgccacagcggtacttcatcgcttttcgcattttgcgggtgggcttggtatattgccgtattcggctaggcaacgcgctggtgccgtccagctggaatctgtcgatgtgacgcacggtgacgtcgttatgcgtcgcgtagatgaccaccacgtcctcggcgtcgccggtcacgtattcgttgaagaactctccgggcataaggacgtttcgaggcatgtttgggtcgttgacgttcccggcggaataagactcgcatctaaaccatatcgattggatgagcacaccggttcctccgacgttctggaatcgtattgcggtgcgtggcgatctctccgctattcttccgacgttgagcatcccgtccatgagacggtcgcggttccgcttccatgtgcagacggccacgctgaaggatatcagcgccgctatggatgccaaaccattggctatattcagcgcttcttcaatcatgattcttccttccttcgttcgttcgtcatgtggcttggttctttcttttcaagcctacggcgggggaaggaacccctttcaaccattcaaacgatggaggtttgccatggatagtcgtattcgtgtcttccgtgagcctgatgggcggttccgtgttcgcctgttgggtttctatgggcctcacgctcatttggatgcgattatcagcgtcgatgatttgcgtcagtggcgcgacaagatcgatgaagcactgaaggaggcaaccaatgtcggtgtttgatcccgagtccagcaggaaccgtttcagtgcggagttcaagctgaccggtgatggtggcagtccctacgagttcggtattcggttcagtgtcgatggggattacttcgcgttgggcggtttgagtatgggtgacatggtgcgtatcaaccgtgagttcgccagggttatcagggaggcgaagcatgcacgggctttataagggtgttctcgtgttctgtgcggtgttcgtgggtttgattctggccgtcgtgggcttgtgggcttgcgtgggcgtgatctgtctgtgtgcgggcatggtgttggcggatgtgccggagcgtatcggtgggaggtttggccatgagtaggggtgcgccgaagtcgatgggttaccggtttcagtcggtgcgtacccgtgatggcgtgatgctggtggtcacgccgtacacggagcgtggtgattgcatggcgaagttgtatgcgttcactcgggaggaggtgcgggcgctgatctcgtgtctggatattctgccggacgggccggagtagcggtgattattcggtattcggcgatgtattcgcgtgtattcgttcgtattttttcgcgtgcccgacgctgattcgggtcattgagaatgtaatggctgtgatggcgcgtatggctacgcctagccctacctatgcccgctgtggtggcgggaagccggccgcattgcaactgcggtacttgtgagacgaagaggttgccaccgaccctatccagccgctggtaaaggcggaatcgggcagcatcaccacgcgattgtgtggggctggatttggggaccattcccggcgggcttcggcccgctcttgcaatcgacggccgaccgaccgaaagcgagacccacttgaggattctcggccgagattacgtgttgcgcgtctcggccgagaatcttcgggtcttgacctctccagcctcactcccaaaagggacatgaaaacgataaggggattacggattatgagcagagcgacgttcgagaacatcacgttgaaggacgcgggaatcagactgcttccgaagctgaacgagttcatccgggcgaggaagaccacggagagcttcgaggtgacgatagagcaggtggcacgctgggccggactggtccgacgcaacggacgaatcgatgacaaccagacgtacaggatgatgattctggccgaatgcccggtgtccaaggtcaggaagtacgggatgcgttgctgggatgcgcgcgaggccttgcaggctttggcgaaatggacgggctcgtgggcttggatggtggaatgatggccgcccgcacgaagccgagcctcgccgaggcattgagcatgtggacaagtccgcatgacgcggcgttgctgcttgacacgttccgcctcgcaatccttgcgcttgccgatgagcagcacaccggcttgccggattcgagccgtgtgcttcggatactgcatctgcgtacgggcacggctctggccgcgttgggtgcggattatccggcgatgggcgtgcgccgtgtcggcaaggactggactttggacgcgcgccagttcgatttgtgggcgcagggccagcgaagcgtgttccggcgcagggccggcgaagcggtgccggccggtggcgtgcagtcgaggctgaatctgttctagggggtcggatgaatccgagagcgaagcttactaccgcgcaggcggccaaatacctgcaccggtcgcaacgccagatggagcgcatgcggtcggatggcaccggcccggagtggttcaaggccggtgatgccatcaacagcccgtgtttgtacgaggtggccgatttggatcgttgggtggcgtccaggaaggacggtcgtgatgcgtaggcaggtgatagacccgctggtgcgccgtgaggtcatcgagacgtggggcaatgattgttggctggagctgccgggctgtacccatgtcggtgccgaggacgaccatatcgtgccgtattcgcatggcggtatggacacggtgcctaacatccggcgtgcctgcaagcattgcaacgcatcaaggcaggaccgtgtgctgtacggttacggtgccagactgcacatggtgatcgtgcctcccggcagttgtgaccgcgaggccatggattacatcgacgcgcacaaggcgccgggtgatcccgtggtgagcttcaccggtcttgcccgtgcgatgggtctgaccgaccccagcctgggcgagcgtcgtgccgtcgcgatggcgtggagcggtgcctaccgccagttcgcgacgagcccggaacccgtggacgtgtggctgacgcgcacgatgcccaacagtcgccgccaccctcgcatgctcgatgaatgggttgcgctcgactatgacatccatgtgcttgaccctggcttcgaggtggagtgggagcgcgcggccggcgaggaggcacggcgtcgtgtgcgccagtggtatgcgctgcatctgtcgcaggctctgatcgacagcaggcagtcacggaggcgcgcgaggctcgtgcagctcgggttgagagcggacgcggcgaagatcgcggcgaggccggcatggtagccgcgttttttaaacggacgtggccgaccaagaccccgcgcccacttttttcttctctcgtatcagaaaaaaattttttggaaaacggcggaattgcaacgaaaagaggtgaatgaatggcattgcaggaagcattcgaaggattcgatgagataggcaattttcagggattcatggaaaagaaaacccgtcagaatctcacggagttcttcagggacaagcaggtgaccccgatagcggacacgctcgctgctctgctcatcgccatctcccacaacatcgactcgtatctgctgaagggcaagaacgcgagcacgctcttcgacagcttcgccagcaatcttgatcgcttgcaggtcatctacccggaacgggtcaagcttgacgacgagctggccatgctgttgcaggaggccaaggcgtgattcccatgaggggaggcaccgcgcggaaccccgagcggggcacggacggcggcaaggtgggccggtttgcggccatgctcggaaccccgctacttccttggcagcagtatgtggcggacgtggccggcgaaatcgacccggaaaccggaacatacttttatgacacggtgatactctcgacgccgcgccagtgcggaaagtcaacgctcgtggacgccacagacacccgcaacgcccaatgggggccgggccgttacatctactacctcgcgcagaccggcaaggacgccggcgaccacttccgcaaatacctggaaaaactgcacgcgccggaatgcccactgggggcgatcgccttgaaaccctaccgcggcatgggcaacctcagccagacgttcgtcaacggttccgtcatcatgccgaaatcggttacccgagtcgccggccacggcgtacagggcgacaagatcaccctcgatgaggcgttcagtctcagcgaggaaaccggcaacgccatactcgacggcttccttcccacgaccgtgacccgtttgcaggccaccggtgtacagccccaactgtggatcaccagcaccgagggcaccgcagaaagcacgttcttcaacaaacgcctggacgaatgcagggccggcagccagtcacgccgtacctgctggttcgatttcggactgccgcccgacgccgaccccgagaatctggacctgataatgcgctatcatccggccgccggcctgctctggaaccgcgacaagctccaggacttccgcgaacagtggagcaacaacccatccggctgggcccgagcgttcggcaaccggcgtgacgtgggcctggccgaacgcatcatagacgccgacacctgggcgaccacggccgttgccccactcgagccctcgcaacttgacggccggcctgtcgtgttcgcagtcgccgttgacgttgacggcacccacacgagcatatccgccggcatctgcaacgacgacggcaccataaccgcgcaactgctcgaaatcctggacggcaccggctacgcccccgaggagataagccgcctgtgcggcaaataccacgcgccggtggtgatcgacagcaagggcaccgcatccgacctgtcggaccggctgcaccggctcaccgacaataccggcgacgaagcactggacttcgtggacatggacgcaaccgactacctgaccatcgggcaaagcttcgtgagcggcctcaccaacagaatcgtgttccacgccacggatgccgacctggacgaaagcacggcgaactcggcccgcaaatggtcgggcgacgcttggcgtatctcacgacgcggctcgaccggcctcacgtcaccgctggaatcctgcatgctggccgcatggggagccgcccaccggccggaggaagacggccccttgcaaatctactgaccccgtttggcggtacttggcggtacttggcggtacttggcggtacttggcggcacggtggtggacggttcggtggttccgcttccataatcggcggcatgaacgaacgattgagtctctgggggcgagtgaagctcgccggccatgtcctgacccgcagcgatgcgggtgacatgcccgagggcatcaggccgcccagccgcgagatcgagcgagacccgttgagcctgtccaccgtgtttcgcggtgtccaggtgttgcagaccgcgataaccggtctgccgatccatgagatgcgcggcggtctgaagctggacaccgtgagctcgctgatcctccagccggacgtgaaccgttcccgccgtgacttcctcgccgacatggtggccagcatggttctggacggcaacgccttcgtacggcttgtgcgctacgccggggaggtcgtgacctgcgaggtactgccgccctcattggtcaccgtttcggacgacggccgtgatccggcggcgccgaagctccgctattcgtatctgggccacgactacacggccgaccagatcgtgcattgcaagttcctcaacgttccgggccgactgcgcggcctcggccccatcggcgcggcccgcgaggaagtcgaaagcgcccagatggcccgcgactacaagacgaagttctacaccgattccagcaacctcaaaggctacctgcgcacgaaggcgaaggtgaccgagaccatcgcggcgcaagcgaagcaggattggcgggccagcggcacggccggcgacatcaaggtcatcggaaacgacctggaatacgtgccgttggacatgaagcccgccgacctacagtttctggagactcagaagttcgacaccacgcagatagcccgactgctcggcataccggccagcatcatgctggccgcagttgacggctcgaacctcacctacagcaacatcgagcaaagctggatcgagttcgccgactacacgctggccgcctatgcgggcgagatcgaggaactgttcaaccgtctgctcccgcgcggacgcaccgcctcgttcgactgggattcaagccgccgcgccgacatgagcgaccgtttcaacgcctacaagaccgccctcgaatcagggtggatggaagtcaacgaggtgcgcgcacgcgaggcattgcccccgctcgtcaacgcgccgcaaccggaagaggtgaaccagtgaaccgtcatgaaatcggattgaaaggcgtatgcctgcgccaggcagaggaaggcgacgggcgcacattggagggcatcgccgtgccgttcaaccagatcatcgacacctgggagggagccgagaccttcgacccggattgccgtttcgatgaagcggacaccgcgaagctctgctaccagcacggcgagctcatcggccgcatcaccagtgccgaaagccgcgaggacgggctgcacatcaccgccagaatcagcgacacgcagcagggccgcgacgtcgtgaccctgctgcgcgacggggcgctcgactcgttgtcggtcggattcatcccggtggagaacgaggtggacaaggccggcgtcacccaccgcaggcgcgtgcgtctgctggaaacgagcgtggtcagctggccggcgtacgaggccgcgaaaatcaccggccagcgcagcgccgaaccccacgaaaacatgtccgaaaccggaaaccaaccatctaccgaaagcgaggaaacccgaatggacaaggaactggaggaaactctcgacggcatcaaggacgagcagcgaagcctcaaggccgcattggcccacgttggcgccacggagaaaccgaagccgattggctccgaataccgcaccgccggcgactatctccaggcgctctaccgcggggaggaaaccgccgtgcagctcatgcacgaatgccgcgacctcatcgtcaccggcgacaccggaaacaccgccacctggatcgccgacgacctgcggctcatccagatgcgccgcaaggtcactaacctgctgacgcacgacacgctgccggccaagggcatgaccatggaatacaacgtggtggcatccgacaccacggtcaccggcaagcaggccaaggaaggtgacaccctacagttcggcaaggtcacgttcggcaccaagagcgtcggaatcgacacctacggcggctataccacgctgagccgccagaccatcgaacgcagcaccacgccgatgctcaacaccgcgctctccgccctgcgcaacgcctacgccaaggccaccgaaaccgccgtgcgcaactacctgtacgccaccatcgccgcccagcgcgacgcctcgacggatgcgaacaagatcgacgcgccggcggcgttggacgccatgaccatcgaccagtgggcgaccctcatcatggatgccgcggaactcgccgacgaccgcaacgtgagcctcacccgcctcggcgtttccaaggacgtgatggccgcactcatcaaactcaaggacaccggcagccgcttcttcgacctgagcggcgacggcaccgacacgctgggagacttcgaccttaccggcatcgcgggcaagttcctgcgcgtgcccgtgcagatgcttcccaaggcgccggccggcaccgcgtgcttcatcgaccccgaggccgtgaccgtatgggagtcgggcggccccacccagttgagcgacggcgacccgaccaaactcaccgagaactattcggtgtacggctatctcgccgtggccgcatcccatccgctgggcctcatccccgtgaagttctcgaccacatccgtcaagtgagcatcatggccgaacccgagtggaagacctatgaggcggccgtgcgcgacgaaatcggagtgccggccggcgacgacgaacgcatacagcgcgccatcacatccgcccaggcatacgtgaccggcgcgataggcagccacaccgtgccggaaaccgtactcgccgactgcgtgaccgcatgcgccgcggacctgtacaacatgagggacgcgcgactcggcgtgatgaacgtgacggacggcaccctggaaccgttcagaatctcaagcgacccactgcgcagcgtctggcagaagctcaacgctgccgacgtgcccaccggcggaatggtgatcgcatgaacaacctgatcgtccggcagcgcgcacggctcgcgtcgaaattccgggaaatactcggggacatggccgtcatagtcaccgacgattcgcagcaggccagacctcagtccggcaaggtggcggtgctcatcgaatggcccgacatcgactatccgatatggggtaacgacccggaaatcacatggcgcgtggatctcatcgccggcaccatggccacccaggcgagaagcctcgaacccatcagcgacgcgctcgacctcatcgccgaatccgatttgtgcgtcatccaggcgcggccggtcaccttcaccatcaccaacgtgggcgacctcgccgcataccagctgaccatcaacccatcagacctttagaaaggaaacaaccatggcagacaaaatccgcaccctaggccccggaagcctcgtgatcggctccgacaccgacacctacaagctcgacgtggactgcacgaacgcggaactcgtgcccgacaattccagcgaggaccccgacagcttcctcgacgggcacgtggaaggaggcgagctgaccacctcatggaaactgtcgggcagcatcggcgaggactattccatgagcggggcccaggtgtattgcctgaaccatgccggtgaaacgaaacacgccaaattcatcccgaacaccaagggagcgctccagctggacatgagcgtggtcatcgcacccatcgcgttcggcggcgatgtgaagacccgcaacaagaaggatttcgagttcgccgccaccgatgtgaaggcctcggaatacaggcccaccaccgaaagcgcctgatggccgacaaagccctgtacgtggtcggccagaaacgtttcgttgccacgatgcgcaaggccggcgcggacatgaaggaactcaaacagatcaacagccaggccgctgaactggccgccccggccgcacgaagccgcgccccgcacggcaagagcggacggctggccggcagcatccgagcaggggccacgcaaaaggccggcgtggtccgagccggccgcaagtcggtgccgtatgcgggcgtcatcaactacggatggcccaaaaggcacatcaaaccacgctcgttcgtcaacgacgccgtggccgccaccgaaccgcaatggaccaaactctacgagcaattcatcaaaaagacattgaaccaagtgcaaggagcatgacatgagcaaacaacccaccgcgaaagtcacctatacggacggacgcacggaagaggcgccactgaccccccgcgtcatcaccagcgtggaggaacacgcgcagaaggcgggatgggctcccggagaaggcagcaagctgcggatgtcctactacatggcgtatctcgcgcagcgatatgccggaaacacacaaatcccctatgagcagtggctcgactccgtgggcgagatcgaggtgaaaaccccggaaaaccctaccgaatagacgcctggccagacggttcactgggccgtctctcactgatcctgtccgccagattcggcggcagcccgtgggaatggcggcagaaggccagcgaactcgactggggaacgggcatcgaactgcttatggaggaaatggaacgcatggaggaggtgaaccatggctagaagcgcgatcatgtcggtgcgcatcaccggcaactcggacgacgccgtgaaggcgctctccaaggtgacgggcaaggcggccgcgttcggcagcttcatgggcggcgtcgccctcaagggcgtttccgcgctctgggacacgctcaagggcttcacctcggacgtgatggccatgagcgattcgaccgacaagttcaggaacacgatgaacttcgccggcctcgacacctcagccatagacaaggcatctaaggcggcacgccaatacgccgacgaaaccgtctacgacctctccaccatccagaacaccaccgcgcagctcgcctcgaacggcatcggcgactacaccggcctgacccaggcggccggcaacctcaacgccgtggcgggcggcaacgcggaaacgttcaaaagcgtggccatgacgctcacccagacggccggcgcgggcaagctgaccacggagaactggaaccagctggccgacgcgatccccggcgcgtccggcaaactccaggaggccatgctgcgcaacggagcctatacgggaaacttccgtgacgcgatggccgacggccagatcaccgccgacgagttcaaccaggcgctgatgcaattgggcatgagcgacgtggccaaggaagccgccaaatccacgcagaccatggaaggcgcgatgggcaacctcgaagccgccgtgacgggcggcctcacggatgcgttcgatctcatcaagcccaccatcacgtcggcgatgggcacggcggccgaaaaggtcaccgcattctccgacagagccgtcaaagcgatcaagggcatcatctcgttcgtccgggacggggatttcaccagcgagttcgcgcaggcgttcaacgtcagcgaggactcccccgtggtcgatttcctcttcacgctcagagacacggccgtcggcgtgttcgacgcggtgaaatcacgcgccggcgacgtcaaggccggattcgacagtctggctcagggcgtggggacggtactggggccggtggtccagttcgccgccgattcgctcggcctgaccaataatctgaatgcgggggccacggcctcacagacgttcggcgacattctcgatttcaccgcgaatgcgttgcaggcggccggcacatggttgcagcagaactcccagtggctgggcgccctcgtcgtgggcgtcggtggcgcggtggccgcctaccaggcttggcagaccgccatagccgtatggcagaccgcaaccaagaccgcgaccggagtgcaaacagcgttcaatctggtaatgaatgcgaacccgatcatgctcgtcatcaccgccatagccgcgctggtggccgcgctggtctacttcttcacccagaccgagaccggccggcgcatatggtcgaacttcaccagctggctcggcacctgcgtcaacaacatcatcggcttcttccaggcactcccaggccgcataggcgcgttcttcagcaacgcggccaaaggcgcgacaaacacgtggaacaacgtggtcagctggttcgcgggactgcccggccgcatcctgggagccatcggcaacgtcggcagcctgctgtggaatgccggcgcgtccatcatcaacggcctgctcaacggcctgaaaagcgcatggaacaacgttaccggcttcgtcggcggcatcgccgactggatagcgcagcacaagggccccgccagctacgacaaggtactgctcgtgaagaacggtcgcctcatcatgcagggactggccaagggcatgaacaccggcttcgacaccgacgtgcgcaagacagtcaaacgaatcaacaccggcatgggccgtcttgcattcgagacaccggcagcagccacgacgcagccggtcggcaacacatacaacatcaccgtgcagaccggcgtgggcgacaaatacgagatcggcaaggaaatactcgaatgcatcagaacggttaaggacgtgcgctcatgagcggccgtctcgcattgctgtacttggatcgcggcaacggctgggagtgtctgaccccgcacgagaacgaccaggcggcgcttgaatcattgtccatcgactggggcgtggactcgatacgcgaccagccggacgcgccggtgctcaggttcacgatacgcgaccgaaccggcgacctggccggtgatgtgctgtatctggccggtgccaaggtgtggttgcagaagacggacgcggtgtcgtggcaaaggttcgacgtctccggccagtggcaacaggtggcggagtcggtgtcgtgggccgagcttgccgacttgaagccgccggcgattccaccggcgccggacagtggcctggaatccgtattctatggccggatcactgtgggcggcgaggtcacgcagcgcaagacgaagaatgattggctggtgtcgttgtatgcgttgggcatgagcgtactcacgcgccgccaggccgcgcaggggccggaacagtccggggccctggccggctatcactggccggcgtccccggcggaacgcttggacgtgctgcaagggcgtctggccgcgttgggtgtgccgttcgacgatatgtctttggcgtggcttcgccggcatctgccgcctgcgctggccccgtatggggatgattcgcaccccgatctgatcacgctcgtgcgcaatctcgcgtcgtcgtcgccggattggccgctggtctacgaggcgtacgaacagggacggaatacgccgggcgtgatgacggtggggttgctaggctcgcccgcgtatgtggccatgctgcctgatggcacgctggcgacctcgtggcaggggcatgtgaccggcagcgtgcgcgcggagctggtcatggtggacgacaccacgttggcgttgcccgatccgatcactcaggtcacgctcaagggccgtaaggtcacatgggatgcggagaagtctgcgttcggtttcgaggattcggagctgacgttctcggctcgcggcctcgtgccggataatctcaccgagtcgcagaagagcgtttccgtggagtcggacgcggtgatccgcgacgacagcggcggccattggacggccggcgtctacgcggcgtcggattccgaccgtttgcagcgcgcggccgtgatcctggccaacagcacccggttgcgcccccggtcgttgaaggtcgaatcacgcaaggtggacgacgtggagcacgccatgcaattccacccgtgggccggcctgcccttgactttcgtgcacaaccgttacacaccgttggtggcgcgtgacgggacgccggccacggctggcgcttggctgcctgtaggcggcacgctcacctaccggcaccgtaatggggaggccgtgtggagcaacgagcttgagttgcatccattgccgcgcgacccgaccatgcgaccgttgcgctggattgatttgcggccgttgacctgcaagtgggagcggctgccggaaatgacgtggtccgaatggggccagatcgatttgataaccacagaacaggagctaggagcatgaaagagacaccgaaacaccatatccgatacccggatggcaccgaccttgtgcgtaacgcctcggcgcagttcaaggacatggcccagagcatcgacaacaacatcgatgacctgcccgatacgatcctcgtgaaggtgaaggacgcgaccgcgcgaacggagaaggcggcggccgacgcggagaagtacagcggcggcgcggtggcgatgcaggatggtgccgtggccggtctgctgggggatgcttccagtgccacgcgcgcagcattgtcccacgctcgctatgcgcccggcagtcacgcggtgttcatcggcgacagcatcacccagggctatctgaccagcagcgggtcgaaacggtggagcacgatcctgtgccgcatgttcgactggatcgagcacaactacgccgtgggcggcaccgggtggatcaacggcgcgcaagccaaccggttcgacggccagtgctcccgcgccgccgcggactcgtcgtacgatcacatgctagtgtcgcatgtgttccttttcggcggcgtcaacgacggcgccggtgatacggccacggccacggagcgggcgcgccagtgcgtcgcgacattgcgcgccgcgtaccccaacgcgaggatcgtcaccggcacgggcatgcagggccccctgaaggtcggggccacgcagggcggcgtgcccgtcgtgtcgcgtctcgtctattacaggtctgtggcgcgcgccctgcagggcacgggcgtggtgtgcgtgccggactgctggcggtggctgatgacgcgccccgatttgtgcaacgacgacctgctgcatcccaacgacgcgggccacgccgtcatcgcgggcattatggcccagatcgtccagggcacgtactcgaccccgaccgtcgccgacaaccagcccgtctaccaggtctcgtacgcggccaacgtcaccgtgcgccgcatcggcctcgacgtgggggccgaccgcgtcaccgtgtacggcagtgtcgaggcgcaggtggtcgacgacagcagctacctcaactcgttcagcatgcgcctgccgctgttccagatgcccgactggtgccggatcgtctacaatgacgtcatcccggccaagcccgccgtcagcgtcaacgggctatggaccctcttcgacgcctacctgtacgtcgacgacgacagaatggtcaacgtcagcgtcaacgcaagatacttcaaacccggcgacgacagacccgaaccacccctcggctacaagttcaaagccggcgacaagatcaagacttggatcaactggaccatgcccatctggggatattccaattaaggagcaacatgcagcaaaccgaaatagcagccctcgccatcgtgggcgtactcattgccatcgactacctcacgggtctcatgaaggccgccatgcagcacgacatcagctcagagaaaatgcgactcggactctggcacaagtcgggcctgatcctggtcatgctcctcgcagaagtcgtcgaacgcggccagcagtacctcgacctcgggtacgcggtgccgctcatcgtgcccgccgccgtctacatcagcgtcaccgaaatcagcagcatcatggaaaacctcggcgagatcaatcccgaaatcgccaacagcccgctgttgcagctgttccgtagccagaaggacccgaacgatgaagacggcaagtcatgatcctcgccaccgcaattctgtggatcgtcggcataacggtcgtcatgctgttcgtgcatggcagcgaccatcgccgctgaccaccgccaccgactggctgctcgccatcggcgcgctcctcttcctcactatcgtggccgccgcgttcggcacggccatcgcgctgtccgttctcacgctcatctgaaaggaaaacaaccatgacaatgacaatcgaccaattcatccagacgtacaacggcagggccgttgacgtcgatggggcctatggcggccagtgctgggacctatggagccggtacgcgcaggacgtggccggagtgccacagtcagccaccaacaccagcaacggctgggcgggaagcgtctacacgaccacctacgaccgtcagcccgcactacgcgccaaattcgaccgtctcccggccagcgcaacgccgcgcaagggcgacgtggccttctggggcaacgcccccgccaccccgtccacgcacgtggccatcgtcctcgcagaccagggcggcagcctcttgtgcctgacgcagaaccccggcgccacgcaccagggaagcatcaccaagaacggactgctgggctatctgcgacccacggccgccacggccgcgacaccatccggcatcgccggcacatggcgcatcaacgtgcaggcgctcaacgtgcgtgaccagcccaccacacgcggcaacgtcgtggcccagtacaaggccggccagaccgtcaacctcgacggctggaccggccgcgcggacggctacgactggggccgctacatcggagccaccagcggacaacaccgctacatcgcactgggcccggccggtaccaccgactatctgaagcgctgaaccacagaccccgaattatacggccagcctgacggcatccaacgcgctgcgtagcctgctgtcgggcatggccacatagatttgcgtggtctccaccgacgagtggccgagcagacgcgcgaccaggaacaggtcgtgcgtctgctcgtaggtcttcgtggcataccggtggcgcaggctgtggcagccccacccgtccggcagcaaccgtgatatatgacggttcacgtagctctgttcaacgtggccgttccaccggccgggcagcagccaaccgccgcaacgttcgatatattcggccagatcgtccggcaggggcacgatgcgctgcttgtcacccttgcccgtgatgaccagcgacttgcccaacaggtcgtccatcacatcccgactgttcacgcgggcaatctcggcacgccgcaacccgcattcggccgccagccgcagcatgacacgctccaacggggtcgccttgtgcagtgcggcgatgatgtaccggtcggggcacgggcgcggtttcggtttcggacggcgcaccaccggcagcagctcgctaggatcatccgccctgcgaccgctctcgtgcagccagcggaagaacgacacataggtcttgcggtagccgcggcgcgtttctgtcttccacgcctgggccgatgtccagttgatgaggtcttcggcggtcaccgtcatcggtgacaggccgatgcatcgcgccgtgtgcgacagcttgttgcgccggcacctcaccgtctcctcgctgagaccggcggcgcggagcgcgtcaagccaatggttcatgtcatcccgccactgagcagggggcagctcttgtttttgactcatggcacatcatcgcaccacggaatcacgccgctagcataaagtcggataatcgggctgcatggatttgaaccgtggacctctggggttctgcaaggttcccagaggtccacggttcaaatccatgccccgctactgcgggcgaggccgtcacgattattcgtgacggcttttcgtttatccgccgtcgtgccctacggggccgcatatccgatcggggcgatgatgtcctgtgaaaaaacaacatccaagcccgctctgggcagaatcaatcaatctatggctcgaccccctcaaggcggcgggctactcccccaacacgatcggcacgcgccgatgccagatgtccgcattgtcgagggcgcttaagggcgatctagggacgtggagggcgacgacctcgccctgctgatccgatccgccaacggctatccgttccccggccggtggagcggccacgcctcggtcgagaccacgcaacggtacatcgccatgcccgacgaccagctgcgcgccgccgtggaagccacgcgcctcgccgcctaggaggatcacgatgttccgtttccccgacttgattgtggtactaaattgattgtggtactaaattatggtaccacaataagcatgatcgaatgcgagccgtcagccttcaagcactggctcacacagccacagatcgaatacatattccggcatccggtggccgtgttcgaggtgcagtcgagacacgccggcgacagggtcatggcgatcctcggacacccggacgagttcagggaacgccccgtggagctgctggtatcccagcgcacccgcaaggtgttccacgcgatggactgccgccgcgaatggctctacaagttcgacgactaaaaaacaccaaggaggacatcatgagcaacgaaacagactgggacgagctctcggacgaatacaccgagcacacccccgccatcatcggcgagaccatccgcccgcaaagggcgatcacgatggatgacatcgacgacatcttcgccggccgccccctcgccgaccagccccgccggaaggccgacgtgctctacaaggcatacctcacgcccgacatggacgcacaggtgcgggcacaggccgaacgagagcacatcggcaagagcgctctgatccgcaaggcactggccgcatacctgaccgccaatcaggcacagcccgcgatggcctgacccatatacggcgaaaagcccccgaacctgccgcgtgatacggttcaggttcgggggcttcttgttattcggccttggatgccttggccttgagggcgctggcgccgatgacgacgccgatggtcagggcgacggcgctgatggtcgtcgcggccggatcggcccacgtccagccccatacggggccgagggtctgcacggacggtcacggtacgggacggtggggcgttgctgccggtggcgacgctgccgccgccgttgtaggtgacgacctgaccggggcgatatggatgaaaggcgatcaggcagctacggtgcccagggaagtcggcgatcataaacgtctcgtcgttttcatcgcggaccttcagttgtctaatccacgggaggcgacaggcgtgaagtttctcaacgaagcggaagccgggcacaagtcgtatgtcacaatcgacttcgtgcccagctcccgtccttctgctcagaagcggagtgcggttcaccatccagccgacatcatcggcatcatgccgcagcgggtcaacgtatcggccagcgcatcgtccagtgcttggatcggtcatagcaacgacgccaccgaacgacgatggacagtatggcgcctatcgccagagctgacacggccagaaccgaggcaagcgacacatcgccacccgtgacgggcagtgacgggcgagtgttgggcgtggttgcctccgccggcgccggtggcgtctcgggtttctccggttcgcacggtttctccgactcgcatgggggcaacacccgcacacgctcccaggcatcgtcataccggctggacgccggggaaacacggtcatccccctcgaaccgccaaacgaacacgtaccacccatgccgttcggcggtcagatgcatgggagcgccatgcgcgtccaacgccccggcgccgattttgaacgtgccgttcatcgcgggaatctcccaggtggccagcaaccggtggttgtcgtcttccgtggggacctctcccccggatggcttgtacgcctcatcgttggaggggttgtcgggatcgccggaccaccatacgctcaccgtcgcatacggctgatccgccgcgaaaccataggtttcatcacccatgaactggccgtggtccgccgggaaccccgatacggtgatggtgtcgctgagttcggcgccgatatccgccgaatgttcggtaaccgtcgacatgacttcgaccttcccgcgccccacgttgctttccgaagcctccatgaacgggctcacccagtcgccggtaaggtattcctgcgcccgtttgctttgctcgctccgccggaacacccacacccaggtgccaaagccgccggtcttcggagtcagataggcggcgtcaccgtccggcttggccatggcccgcacacgaacccgctgccccacaccggtgaaggacgccttgccataagcactcggctcataacccgaggacgccagccgggcgagaaaagcgtccgcgctctcccgtgcgttcggcgcgatgaccttgcccagatcgtccttgccgagcccgtcgaaatagtatccacgcgcctgcagcttcagaccgggcacccaatgactgccctcgtcccccacgccgctggtcacatcatcgaacaccggcgaagccgcatcaagcaccttatcggacacctgcgtggacaccgacggaacgaaatccttgcgcacctggaacgtcgacgacgaaccgccggcggaagccatcgaatcgaaggccagcatgtcctgagtgctgtccatgacgtgcatccgcccatactcgtatgtggtgttcgccgtcacctcgccggcgccggtcgcctcccacgcgatcgaggatccggcgctcgtcgacacccccgagaacgtgttgccgccttggatgaaccgcgccggcccctgcaaggtgacagtgaacggcactcccgcgatcgcgtcaccgtcgcggttcaccactttcaccgagatggaaccgctgcgcaaagcctcggcatcggtgcgttccaccgtcgtgcccgcaggcgtcttgccggccgattgatcccatatccgggccgccttcgccacgatctcgggataccggccttgaatgaccgccatctgtctcgcccactcgtcccgatcgcgcccgaagtgatcctgcacgatgatgccgatcgccgcatgggtggcggcatccgtgtcgcggtaccggtcaaggatccatgccatacgccgggcgttctcatcggaggcaagcaccgtggtggggcctatcacatagtcgctcagtttccccgcttcgatgcagtagtacttgttgcccgaagcgtccagccccgcgacaccgacgtaatattccatatcgttgtatggaaacatcacgtgatatctttcgtcggcgggcgtcaacgtcgcggcatacgccgtattcgccgagccgaacaccactcccaccattattatcagaccggtcagcatcgctacgatggccatgccccgttgccgccatgtcgttatcatcattcgtcctttcctggtacgttccccgcatactgcactgtgtgcgggtaggccacgatcatggcagattttcattcgctacagccggtctttcgacctatgtggtccgagcttgccgtttgccggcgagttgtggataactcttccgccgagttatccacctcatgcggttgaccgaacgtttacctgaaagttatccacaatgcgcaacatatgttcataagcccctagaatagggccttatggcagcagtacaacatcgcgcgaccacgcgcactagtaataccgataacaacaccacgaagacgaagtcaaagacgacttctgcccgaaagagccccgcaaccaagcgcaagagagtcagcgccgaaacggcacgcgccgcagcagcgctgaaaggcctggctgtcgaagcccccgcaccgtccatcgaagcaaacgagcccggccagttcggccgcatcaatgtcatggacatcactcccaccgaggagcgtggcatcttccccgcccgtgtggaactcggcgaaccgtttgagatgaccgcccaagtgttcatcgaaggccgtaccaaggtgggtgccaccgccatcgtgcgcaacccgcgcggcaaggaaaccatgcgccgggccatgacctgcgtaaatcccggcctcgatcgttggaccgtgatggtcaagtgcggcgaacacagcgatctgaagccttgggaggatggctacgcggccgtcaagcgtcagctcggcgaatggaccgtgaccatcgaaggttgggaagacacgtacgtctcctggctgcatgacgcccgtatcaaggtgcgtgtgatggacgacgtggacaacgcgctcaattccggcgccgagctgctggcccgttgggccgcaaccccggacgccggcctgaccgcacgcgatcgcaagaccttggagaaggccgctgagaccatggccgatcagacgctgagcgccgaggatcgcctcgccgccggcgacaaccctaccatcgccgccctgcacgagactcacccgctgcgcgatggcatctcccccagccagccccagcgtttcaaggtggaacgcccgaagtccagcttcgcggcttggtaccagttcttcccacgttccgaaggcgccaccatcgatccgaacaccggcaagatcattcagggtacgctgaagacctcgatggccggcctcgaacgcgccgctgccgaaggcttcgacatcgtctatctgccgccggtcttcccgattggcgtgaccaaccgcaagggccgcaacaacacgctggtcgccggccccgatgacccgggctcgccgttcggcatcggctccgagctgggcggccacgacaccgtggatccgctgctcggcaccatggacgatttcaaggccctgtgccagcgtgcacatgaactgggtctggaaatcgcgcttgatttcgcactgcagtgctcgcccgatcacccgtgggtcaaggcccacccgaactggttccgtcacaagccagacggctccatcgccttcgccgagaacccgccgaagaagtatcaggacatctacccgatcgacttcaacgccgacatgcccggcatcgaaaaagaagtcgaacgcatcatgaatctgtggatcgaggcgggcgtcaccatcttccgcatcgataacccgcacaccaagccggtgcgtttctggcaggacgtgattgccgccgtgaccaagaagcacccggagatcctgttcctggctgaggcattcacccgcccgggcatgatgcgtgccctgagctacgtgggcttcacccagtcccactgctacttcccgtggcgcaacaccaaggacgaactggaagagtatctgccgatcaccaatggcgacgacggctactaccagcacaacaccttctggcccaccacgccggatattctcaccgcttacgtgcgagacaacggcgtagccggccactgcgtgcgtgcggtgctggcagccatgggctcgccgtcctggggtatctacaacggttacgaactcatcgagaacaagcagcgccccggcttcgaagagcagatcgacaacgagaagtacgaggtcaaggttcgcgattggagcaaggccaagcagtacggcgtggccgagatgctcaccgcgctcaacaagattcgtcgcgcccacccggccgcgttgagctaccacaacctcaccgtgctgcctacgtccgaccagaatattctggctttcgcacgccacacgccggccgaactgaccggtaccggccaagcggacacgctgattgtggtcgtgaacctcgatggacacaacgcacaccagtcgatgattcacctggaactcggcgagctgggtctgcccaccgaccgtccgctcaacgtgcgcgacgagctgaccggccgcgaattccagtggggttgggacaactacgtgtctctggcgccttgggcggatgtggctcacatcctgtccgtgcagtgatgcggtagtgcaacagtgatgccgttgacgtgcatgggtttatcgtgtgcgtaaaccgctagaaatcctccccttgaggggaggatttcgtctgtttagacatagtgtcggcataatctcagcacggtttcttgagttccgcacctgttttgcaggcgcaaacagggtattgtggtgagacgataacgtaactgtcgattttcaaggagaaatgacatggcagaaaccttcaacgtcgttgtggaaattccgcgcggctccaagaacaagtacgaagtcgatcacgagaccggtcgcgtcttcctggaccgtaccctgttcaccgcaatgggttacccggatgactacggctacatcgacggcaccctgggcgaggacggcgatccgctggacgctctcgtgatgattccgaactccgtgttcccgggctgcgtggtcgagtgccgcgccgtgggcctgtaccacatggtcgacgaggccggcggcgacgacaaggtgctgtgcgtgcccgccgacgttcgtttcgatgacatcaaggacatcgacgacgtcaacgagtaccacaaggccgaaatcaagcacttcttcgagcagtacaaggctctggagccgggcaaggaagtcctgccgggcgactactggaccggtgctgacgccgccgagaaggaaatcatcgcggcacgcgaacgcctcgccaacgaaggcaagtgatttcctttaggaaagcccggtggctttccggcggcggcgtacgaagacgcgacagcggctgagccatcattgagccggccgcaggccgtccataattgcatgccgaaaaggaaatcgtcgcggctcgccagcggttcgctgattccgagaagtgattcgattctgaatcgttaacaggaggccccttcggggccttttgttgtatctgcggcaaagccgctctactctccctcagtcgcaagtttcactgcgccagctccctcaacagagggagcttgtattttgtgatatagtggtactttgtcttttcaactaggcgtaggcggcgtgtaggaacgctggtcgaggcccatcgcacggtaatccggcgatgaaccttctgtcgcaccatgattccgataatcattcaaatcctgcttatttctgtttccgtagctatggatgcattcgccgtatccattggcaaaggtctgaccgtatcccgcgtacgagtgcaagacgccgcgaaaagcgccctctggctcggcggattccagatgctgttccccattctcggctatttcgcggcatctacattcagcaaatacgtaacccaattcgatcattggatcatcttcgccctgttggtgttcatcggcggcaacatggttcacgaagccttcgaagaagatgaggaaaactccaaggagaccgcccagttcgattggaagcatatgcttcccctggccgtggcctgcagcatcgatgcgttcgccgtgggcgtgagcctgaccttcatgttcaccaaagcccatatggcattcgccatcctcagcatcggtgtggtcaccggactgttctccgctgcgggcctgtacattggccgcgcgttcggctcccgctggcaggagccggcgcagatcgccggcggcgtggtgctgattctacttggcgtcaaagtgctgttggagcatttgggcgttatcgcgttctgatttagtgtcataagccccttcaccagaaagggctattttgtttgatttcaccgttccaatgcccgacgtaggattgggatggaaattcgattatctgagaggcgtatcatgaccgagatcacccaggagggttggaagaacaaagccctgagcatgttgttggcccaactgacgtcctatgtactgctcatcgcagccacggtcattccctcccctggcaccgtccccatcatccctttgattatcgccgctctgacgttggccgcatttgtcgtgttctggccgttccgcggcagcatgctggatcgtatcgtcactttggtgtttggcgcgatttctctgattttcgtcatcgtacctttcccgaccggcaaggttccgccggatcagaccgctgcggatggctcggtacttccttggtattcatgggcactggccatgggcctgctgctggtggtgctggtggtcttctccttcgggcgccagatggctcgtgagaagcgcgaacatcttatccgcgcactctctcacgccgtgacttcaggtgtggcggctctcgccgtggccggctggtgcttcctgcctgatttgggcgcgatgctcgccaagggcaccgttgcgggaaccgttgccctgatcatcctcatcgttttgggactggccttggccgtggcctccacgttgtgggtgcgtgacgccgatccggacccggatatccgctatccgtggatcggtaccggcctgatgccggtaatgctgatgggcgtgaccatcgccgcaaccgcactggtgctcggccgtgtcatcggttgatggacgtctgccgttccatattccgcaaacttgtaacccatgtgtccactacaagcgcgtagaataatgaaaaaccgcgcgaaagcggcataacgccgctgacgactcgtacagccacaccaagcaattgcgtaacacattgcaggataaagggggattagcgtgacggatcttacgttgatgactttcgccagcgaccccgccaccgttttgccatcactcgccctgctttctcatcgcgtccgcgtgctgccgatggatgcagccagcttggtgaagatgccggagaacaccattctgtttctggatgcacgcgatgatctggcgaccgccaaaaccttgtgccgtctcatccacgcctccggcctgtccacgccaatcgtgctggtgctgaccgaaggcggcttcaccgtggtcaactcccagtggggcattgcggatgtggtggtcgccaccgcttccccggctgaagttgagggccgattgcgattggtctccgagcgcggcaacgctcccgcagccgcagcagccggttctcccgccgaatccaccaccacggtggaagatggccagattcgctccggcgacctcattgtggacaccaacggctataccgcctccctgcatggacgccccatcgatctggcatacaaggagttcgaactcctcaagtacttggtccagcaccccggccgcgtgttcacgcgcgcccagttgctgcaggaagtatggggctacgactactacggtggcactcgtacggtcgacgtgcatatccgtcgtctgcgcgccaagcttggcggcgaatacgaacacctcatcggcaccgtgcgcaacgtgggctaccgattcgacccgccggagacggataaggaaactgccgccgcacagcaggccgccaaagcatcctctgccgccatcggcaccgatgacgatacccccgatctcaacaccgccgcctgacagaccagcagcgccacaaaccatcaatcatcgacattacgccgcttaggtccatacgatgagagaaaccaaatccgcgcgtctcacgcgcatgcatgacgaatacgacattctgcgccaggtgattccggcacccgcttgcgcactgcatttctcgaatccgctcgaattgctgatcgccaccgtgctcagcgcccagaccaccgacaagcgtgtcaacacggtcaccccggaactgttcgccacctaccccaccgcccgtgacttggcggccgcgaacccggcccaagtcgaagacatcattcatccgctggggttctaccgttcgaaaacccagcatctcatcggactggccacggcactggacgaacggttcggcggcgtggtgccgcgcacgatggatgaactgaccagcttgccgggggtcggccgcaaaaccgcgaacgtcgtgctcggcaacgcgttcgatatccccggattcccggtcgatacgcatgtgatgcgcgtaaccggacgactgcgttggcggtcggattggcggtccgcacaccctgatcccgtgaaaatcgagaaggaaatcaccgcctgttttccgcacgaagagtggacgaatctcagccaccgactgattctgttcggccgggccacctgccacgcacgtacccccgactgcgccaactgcccgctgtccgacacctgccctagctatgcgccgcccgccggcaagagcacgtccaagcgctaactcatacctcatcatggtgaattgcggattctaggctgaatccaccgctagactgaaaaccatgcagcacagcaagcggaacaatacatggtccaagtgggggatttttctcggagtcgccgtggcactcggcgcactcgtggttgcgggatggacgttcatgcaaaaccggttccagccgggatcatccctcgatgccgatgtgaccattggcatcgacgatatgccgcaatccttggatattcggtccgattcctctgcggcagccgagcgcctgctcgtcgacaatgtgtatgagacattagtgaccgtcgatcaagacaacaagattcagccgggactggcgacaagctggaagacttccgatgacggactgaccgtcaccctgacactgcaatcgggcgtcaccttctcgaacggtcatacgttggacgcctcggacgccgtgtggtcgttgcaacagaacgtgaccaacaaggtggcggacgtcgacgaattgggcgatctgacgtcggtcgccaatccgaacgccaccacggtggtcattacgcttgccaagcccaatccgacgctgctgcgagcgctgtccggcaaactcggcattgtctacgattccgagtcgtccagtgccgattatcaacgcaaggccataggttccggaccattcaccgtggccgatttccagcctggccattccctgaagctggcgcgcagcgatacctaccatggcgccaaagcggccagcaatatcgttgaatttatgcaatactccgacgccgatgcgctcagcaaggccctgaccgacggcagtctcgatatggcggcaccggtttcggcttcgacggccaccggtttgaacggcaaggatggcctgaccgtcaaggagggggccactacggataaggtgctgctggcctacaacaacggcatcgattcgctgctctccgacgaacaggcgcgtaaagccttccgctatcaaatcgacgcagccggcatcgcctccgcccaacccgacgcagccggagcattgggcggccccatcagcccgctggaacccggatacgaagatttgaccggactgtatccgcatgacgaaaaccaagctgggcagatgttctcctacttcggtgcgcaatatctgactacggtgaatctggtggttcccgaagaataccggtcgttggccgaaaccatcaagcagcagatcgagcggcagccgcgccccacggtgaaccttgaagtgctctccgatgaagattatgccaaacgaatcaaggacggcaaatgggaactgaccgtgatgagcatggacggcacggatgatgccggcatattcgccgaccccgattccatgttccattacgaccataccgaagcgcaacaggcctatgcggatgctcgcgccgccactaatgacgccgattatgaggcacgaatgaaggcgtacgcccggctgatcagcgaggatgcggccagtgattggctgtatacccgcaaatgcttcactgtggcgtccaccaaggtctccggctacccgacctcgatgatcaatcgtcgcatgccgctggccgggttgacggtgaagtaggcaaccttcagtcacggacgggctacgcccgatagtccttggctcactatcgttcgatcgttcgtatctcgcctgcgaacagcctactgggctgtttactgtacagttcggcttgtcatgcaacgtgcataaactttggctttatgactgaaggcaaatccatcatcaacgccaacctcaccccgctgcccgacaaggtcggtgtggacggacttgaggacaagtggcgcgccgtctgggatgaagacggcacctacaaattccgcaatacccgcgaccgcaaggccgtctactccatcgacaccccgccgcccaccgtctccggttcgctgcacgtgggccacgtgttctcttacacgcacaccgatgtgattgcgcgttacaagcgcatgcgcggctacgacgtgttctacccgatgggttgggatgacaacggcctgcctaccgagcgccgtgtgcagaactactatggcgtgcgcgtggacgtgtctctgccttacgacccggacttcaagccgccgttcgagggcactgatggcaagaagatcgacgccaaggatcaggtgccgatttcccgcaagaacttcatcgagctgtgcgagcgtctgactgctcaggatgagaagctgtttgaggccctgtggcgcaagctgggcctgtccatcgactggtcgcagacctaccacaccatcggccagcacccgcggcgcgtggctcagaaggccttcctgcgcaaccttgcccgcggcgaggcctaccagcaggacgcccccggcctgtgggacgtgaccttccagaccgcagtggctcaggccgagcttgagtcccgcgaatacccgggcttctaccacaaggtggctttccgctttgaggacggcaccccgatctacatcgagaccacccgccccgagctgctggccgcttgcacctcgctgatcgccaacccgaatgacgaacgttacaagcagtacttcggccaggaagtctactccccgctgttcaaggtcaaggtgccgattctggctcacccggccgccgaaatggacaagggtgccggcatcgccatgtgctgtacgttcggtgatgtgaccgacgtcgagtggtggcgcgatctgaagctgcccacccgcccgatcattcagcgcaacggccgtatcgtgatggacaccccggattggatcaccgacccggccggccgtgaggtctttgccgagaccgctggcaagaccacgttctccgcccgtaaggtcatcgtagacaaactgcgtgagtccggcgacctggacggtgagccgacgccgaccaagcgtatgacgaacttctacgagaagggcgacaagccgctcgagatcgtcacctcccgccagtggtacctgaagaacggcggtaccgacgagaaactgaacgccgagctcatcgagcgcggcaaggaactgaacttccaccccgacttcatgcgcgtgcgctacgagaactgggtgcacggcctgaacggcgactggctgatttcccgccagcgcttcttcggtgtaccgttcccgctgtggtacccggtgaacgcttccggcgagccggattacgatcgcccgatcaccccgagcgaggatcgtctgccgatcgacccgaccatcgatgtgccggaaggctacgacgagtcccagcgtgatgtgcccggcggcttcaccgccgaaaaggacatcatggatacctgggccacctcttcggtgaccccgcagatcgtgacccactgggctgagccggacgaggcctccaaggccctgttcgcttccaccttcccgatggaccttcgcccgcagggtcaggacatcatccgcacctggctgttctcgactgtggaccgcgcgcacttggagaacaagtgtctgccgtgggcccatgccacgctgtccggctggattctggaccccgaccacaagaagatgtcgaagtccaagggcaacgtcgtggtgccgaacgagccgatcgagaagttcggcgcggacgccgtgcgttactgggccgccgccgctcgcctgggcctcgatgccacgtacgacatcggccagatgaagattggccgtcgactggccatcaagctgctgaacgccaccaagttcgcgctggccatcggccgtgaggacgagaaccatcacgtgggcgctgccgccgagacctcgtggaacccggccgatgtgaccgaaccgctggatcgcgccgctatggccaagctggctttggtggtgcgtcaggccaccgaggcgctggaatcctacgagcattccaaggcgctggaagtcatcgaatcctacttctggcagttctgcgacgactacatcgagctggtcaagaaccgcgcctatggcactccggacgagcacggcaatgtgccgtccgagaaggctgtgaagtccgcccgcaccgctctgggtctgggcttggacgccttcgcacgtctgctggccccgtacctgccgtacgccaccgaggaagtgtggagctggatgcacgccggttccggttccgtgcatcgcgccgcctggccggtcgtggacccgtatgtcgaggccgccaccggtgcttcccccgagctgctgacttgggccggcaaggccgtggagcagctgcgtaagatcaagtccgaggccaaggtctccatgaagaccccaatcctgtctgtggcactgtccgctgcttcggaaggtgtgaacgcgattcacgccgccttgggcgatatcgcgcaggccggtcgcgtggtcggcaagttcgacttggtggccaagcacgccgaggaatccgccgccgaagacgcgcccgaaaccgaggtcgccgtcgaagccagcgagctcggtgagccgccagccaagaagccaaagcactgagcgttgcgcacaacaacaaaagaggggaacctcctattgaggttcccctcttttgtttttttgacgttcggatgacacgactgtgggacggcacgcaaatatcccgcattgtaagctggcggcccacaatagcgtgggccaccacgcgtgtcaaacgttttatatacgcggcgtcccacagaccgaatcaacaaatccttggaatttagccattcttcaaactatagttagctctgacttacaagagggtgtgggacgccgcatcgaaaaagccagtttttgatgcggcgtcccacaccgataacgcactttacgcgtattggggcacctgtcgcatgcggattttcccgcatacaccatcacaccgtcggaatcacgatgaggtatcgggtttcggcggttttttgttgcgtattggggctatcgagctgcgcgacggcctgcgccaagagcgtgccagcatcactgatctccacggtctcattgatcagcgcgctcatgtcatgcttgagcagcgtgccgccagtgccaaagccgaacagtactggagcggtgtcaagattgttgccggaatcgccagtatcgctcgacttggctgagtcgttcgttcccgaaccatcgctcttggacgaatcgaacttacctccaccaccgatggccgaagtaagaccacccgcatagttcatcacatcgccagcagacatggacatggtgtcatcgaccagtgaggccttggaatgctgcgactgctgctgctgttgcgcggctttggcctgcttacgggcggcatcggccttacgcttggcttgggcggcccgggtcttgccgtagaacgattgcgattgcgaatcgaccaggccagtcagtgcctgagcctcggtcaccggaccggaagagacatcaccggacgagccatcgccatcgctgccggaagccgaggacgcgactccttcgaactgatcggagaatcgcaatacaatctggcgcaaggccgtggctttgcccgtatgctcggaggcggtggcaagcgtgctcatcgcggcatcgaccttggattgagcgtcggcgagttcatcgctaccgttggtttcggcgatggcttggctctcgtaagcggtggcgcccgaagacgtgccgccggtcagggcgctcaaattggccgtgtagacgtccgtgtatttcatcgaatacggaatcattgcggcggagagctggctctggccatcggcgtattgcttggagcctcgagtggcttcctccgaagcctcggcggtcagatcatccaccagtccggtggtgccttgctgctggatgcggcgaatcacctcatccaacgcatcgaccgcaccggcatgctgatgtgcggcactgacgttgttcaccgcgttggccaagtcgagtacggcttgtgccaaaggcgtatccccggacagttcgccggccgtgcccatcaacgccggcaactgggtggaggtaccaatcgatccagacaggtgcgtggtatatgagcccacatacgcggccatatagtcttcaaacgtccgcttatgggcggtttcgcgttcggccactacggacttgtccagcgcacgctcattatcgcgcagggtttgaagctgctcgatgagctgttgatgctccccggaaccggcgtcggtcagtgaatcgaccagtatggcggcagaggcgacgagttgggcgacatccgtatcggcagcaggctgtgcggcggcattcgcggcatcgggattagcaccaactaccggactgctggaattggaaggcaatacggcgagcgccacggaactcatggagaagtctttggcgttcatatagcagctgaattccaagccggttgcggcttttccagctgcggcgactacggtattggaaccttgcgtggttaccgtaatggagttgtcagcggaaacatcatcggctacctgcgtaggcacggtaaaggcgacaaccgggatcgtacggttggcctccttggtttgcggcttaatatcgatatacacgccgatcagtccagatgcgccggcaacctcgtttgcctcgacgtttggaccgtcaagcgagtaggtgacgctgactttccatggcagggtggcggcggaagcggggatacgagaaaccttggacgtgccggaattactattggcggaatcggtatcagtggaaccgctattgccggaatcggcactggcgccattgccggcgccgcccttccctaccacataccaacggaccggctccccttcggcatcggcgacggcgtacatatcacttgccgtagcgagcaccggaccgtaatcaaccggagtcggacgagacatccaagcaccgccgagaatcgaagccacgcacaatgcgcaactgaccagtgcggcaccacatctcatctacgtatcccattcatacagtcggccactatgggcattccattcccgtattaatgtagtcgctgccggcaacttgccctatagacgaatatccgaaaggtgcccattcgctgcgggcgaatcaggcgaatacgtcgagtacgcccgggtcgccaccggcatcggcgatgcgctggtggcgcttcttggcttcggtaaccacgaattcacggtacatttcggcaatttccggatcaagcccggcatcgatggcgatgcggtggaggcgttcgatctgatagtcctcacgcttggtgtcttcgggcgcgaatccggcgttggctttgagcacgccgacctgcgaggtggccttgaaccgctcggccagtaatgcgatggccgccgaatcgatgttatcgatggtttggcgcagcgttttgatgcgcgccaccgcttgtgcggtttccgggtgggccgccgcctgggcggagtcgatggtggtcctttgccagccgctgctcgtttcgctcatagattcgaggatactcccgattgcggctttgcacgatgcgcaaagtcagatatctcagatgtcatagtcgccgtaggggatatggctggcatccgcatcgccgaacatggccgcaccattgcccactcccaaaacaatcgaacccattgatacatctttcatctcatatatcgtcagcgtgcatgtgaacgttgacggcaatactacaactgcaatgtgatagttgatgtatttgcatcatatacggcaagggctgcgccccgtatcaatcggggtgcagcccttacactattgttcagcggtctggtcagttgccgttgaccgcgttgccggtgttggcctgctgcacgatggcggcgaggaagtcgcggttggtggcggtcttcttgaggcgcggcaccaacgtctggtaggcctgctcgggctccatgccgcccagcagtcgacgcagacggtagataatcggcagttcctgcgggttggtgatgagctcctcgcggcgggtgccggaagcgttgatgtcgatggccgggaacagtcgcttgtccgccagctcgcgggacaggcgcagttccatgttgccggtgcccttgaactcctcgaaaatcacctcgtccatcttggagccggtttccaccagcgcagaggagatgatggtcagggagccgccgttttcgatgttgcgggccgcgccgaagaacttcttcggcgggtagagggcctgcgcgtccacaccaccggacaggatgcggccggaggcgggggcggcgatgttgtaagcgcgagccagtcgggtcatggaatcgagcagtacgaccacgtcctggccgagctccacaagacgcttggcgcgttcgatggccagttcggcaaccgtggtgtgatcggaggccggacggtcgaaggtggaggagatgacctcgccctggaccgtgcgctccatatcggtgacctcttcggggcgctcgtccacgagcaccaccataaggtggacctcggggttgttggcggcgatggagttggcgatgttctgcagggtgatggtcttaccggccttcggcggggagacaatcagaccacgctggcccttgccgatcggggaaacgatgtccatgatacggccggtgagcttgttcggggcggtttcctgcttcaaacgctcctgcgggtacagcggcgtgagcttggagaactgcggacggttgagcgcttcttcaacgctttggccgttgatggaatcgatggcctgcagtggcacgaacttctggcgttggttgcgacgatcgccttcgcgcggggcgcgaatcgaaccatggacggcatcgcccttgcgcaggccgtacttcttgacctggcccatggaaacgtacacgtcgttcgggccgggcaggtagccggaagtgcgcacaaaagcgtaggagtcgagcacatcgacgatgccggccaccggcaccagatcctcctgcggctcttcgcggcggctatcacggtcattgcgatcgctacgattatcgcgatcatcatagcgacgatcatcatcggcgttgtcgcgatcacggccacgcatgcggcggttacggcgatcgttgcgatcattacggttatcgcgatcgttgcgatcgctacggtcgcggcggttacgacgcacaaactcgtgatcgtcgttctgctcgccgtcttcggacgtttcctcgtgcttctgcgtgggcagcgtggccaggatatcgtcgaggtcacgcacggtttcttcgctgttttccgcagtgcgacgacggcggcgaggctgctcgtcctcatcatcacggactcggcgaatcagcggaacttccacgtcctcatggcgctcgcggcgacgctcggtaggcgctgcatctcccaaatcgagcgtggccagcagatcgccggcctcatcggccttcttgcgcggcttgcggcgagcgaaatcggactggtcgtcatcgcgacgatggcgggccgcacgcggttcggatgcggcatcatcggcggccttacgacgggtgcgtcgcggttcggtctcgtccttcttggcatcgtcggccacgggaagcggcaaatcgagctgcggttccgtggcggccggagccggagccggcgactgggtggccacgtcagcattgtctgtggtattggcctcagcggcatcggactgcggagccttgacgaccttggcggttttggcggccttgggagcgcgcacggtcacaccggccggcggctctccaccattgcgcgccgcctgcagggtggcgagcagctcgggcttgcgcatggtcgacgtgccgcgcaggcccatctgtttagcgagctctttgagctcaggcagcttcatatcctcaagattctggctatttgccactggttgccctttccataccgaacagacccatgcctatccaggcgttaagagtgattattgcggttgcaccgctcatgaatgttcgctgcgtctctgagttttcacgaacttcgtttactgtacaacgccaactcgaccaacgcaaaacggcccgccgaaaaccaaaaaagctccctctgtgacgagggagctcaacaaggtttattcacttttcttcgtggtaggacttttcggtgttgacggaccacacgttcttcttggacgtcttgccggtcttgatgttgccgacggcctccatggcggtggccatggagtggtccatgttgttgtagcggtgctggccgttgcggcccacgcagtagaggttgccgaagccgtcgaggtactcgatgagctcgtccatgtgctcgtaggtgtcgaagtaggcggggtacgccttcttgacgcgctcacgatgggagtcgatgacctcgtccgggccgttgatcacacgcatgcgggtgagctcggagatcgcgaacttggtgacgtcctcctcgctcatgttccagaacgagtcgccctcctcgcagaagtactcgaggccgacccacacggtgtcgtccacgttcttgaccaggtacggactccagttgttgaagatctgcagacggccgaccttgtagcccgggtcctgcacgtagatccagcagtccggcacgatcggcggattgccgagggtggggatgttggtggtgttcttgagcttcaggtgcttgaccagcaggcccacggtcacgaagtcgcggtacggcaggccgttggccacctcggtcatatcggccggggcgggcttggaatcagcggcctcgggatcgtcgccggccgcgtcgatggcgttgaccaggtccttgaccggcatcgaggagatgaactggtcgccggaaagctcggtgcggttgccctcggaatcctcgtacaccacggaagacacggcgccatcggtctggcggacctcgaccaccctggcgtcggtcagcaccttgacgccggcggcctcgcaattggactcgacggtctcccacagctggccgggaccgtacttcggataccagaactcctcgatcagcgaggtctcgacctccgcgttggagcgcttcctggggctaagcttctggaaggcgttcttgagcacgcccatgatggacaggcccttgacgcgctgggcgccccagtcggcggagatctgggaggggtggcggccccacagcttctccgtgtagccctcgaagaacatcgaatacagcttgcggccgaaacgattgatgtagaagttctccaggttgtcttccggcagcttgtggaacatggacttcaggtagctgaagccggccaccatggtgagcttgaagcccatggccttcaacgtgttggggctcagcgaaatcgggtaatcgaagaagtggcggttccagaagatacgggacacgcggtggcgcttgagcatcaccttgtcctccgtctccggatcggggccgcccggctccatgtcgtggtcgcggccgagcttcttgtcatcataggagggtgcgccctgcaacggcagaacggtcttccaccaatccatgatgcgttcgtctttggagaagaaacggtggccgccgatatccatgcggttgccgttgtgcttcacggtgcgcgagataccgccgaattcgcgggtcccctccagcacggtcacgtcatagttttccgcgccgccgtccttgatgagttcccatgcggcggtaagtccagccggaccgccgccgataatcactacggattgcttgtcggtcattatgctccttataaacgcaaaatcagagacagtttactagaagccccggaatcgcacaccgaaagatgagcgaatgcttacagaattctcccgatatacgaccgatgcgccgtcttccatcagcagaaaggcgacgcatccaatcgtgaggtaggggtattcggcaacgctgcgtcacgcacagcgcggcgaatcggtttggtcttgggctaattcgtcagcgacgaaccttccatagattcagcgagattcctgcaagtgcaagcagcatcatcttctatcaaccgcaagcaaacaagacacacgatggcaaggttacgaatctgaacttttgctatgcgttgtatgaacaatgcgcgacgccccgccgtaagatgacggaatgccgcgcattgtcaatacaggctgtatcagacgattgcctgtcagtgaatatcgtcgggaatgtcgatatcggttttctggacttcctcgacgttcacgtccttgaaggtcacgatgcgcacagacttgacgaaacggctggaacggtagacatcccatacccatgcgtcagtcagctgcacatcgaaatacacgtcctgaccagcggaacgcacgttgaaatcgaccttattcgccaagtagaagcgacgctcagtctccaccacataggtgaacagcttgatgacgtcacgatattccctatacagcgcgagttcggcgtcggtttcgtaattgtcgagatcctcggcactcatgcttgtttactcactcactttccgtatcgcgtttgcggccgcggcccagcgtacgccaccatgcttcctttgagggcttgcgttccgcctggccgtacggccagttgctttcctcttcgagactgtggcgcgtgttcttctgcgtatcgtcgtggtgcccggcctgtggctcgactggctgtgcggccgccggcgtctgggcctgggactgcacgtcactcgtcgtgacggcggctgcctcaccacgctgtgccggctcgggttccggcttgttctgctggatggcgatggaatgctcacgcgcggacagcgcttccttgacacccgggttgtcctcaatcaagtgcataccaaaagcgtcaagcgaacgaatcggatcgtactcgtcgaccaacgtgtccatgacgataaggtcctggtatttgttgttttcgacatcccacaacgcgtcgcgcgaggtgccggacggcacgaagccgagcgactggtagaccgaaatcgaacggctgttcttttccggcacgctcacccagatgcggtgcatgcccaggccggccggttcgggcgcaaagccgtaagtcatcacacgcggcatggcgtcacgggagtagccgcggccacggtactcacggcccaagatgatctggatgcgggcggacttggaccagccgtcgatgtcgatgaggaaaatcatgccgatgacattatcggtgctggccgcatcgagctgaccgtcatcgtcatggtcggcgtcagtcaatacggcccatgcgatggtgcggcgggattccgggtcgcccacgccggattcggcgggtgcctgaccggcttcccaggcttgggagcggcggacccatgtgtgtacgatggcgcgttcggtgaccgcatccttgccggtgatcttggatgcgccatagaaggcatcaagttcatccaaacgagccaggtcctcgatggtggcggggcgcaggtgcaccatttcgccacggattggcggaatgacgatgctctgtggcagatcgcgcttcagttgcgcttcggtagccatgctcagcgtctcgttggttgcggtcatcggtatacatcccccggttcggcttgtttcggctcacggtccagtgccgaacatatcttactcgactgggtgaacgctggaaatgctctgagacgactttcttacagaatcaataaaggctcccgctggcgggagctgtccaacgaatttgaactggaggatttccctacaaataagtgctcccgctggcgggagctgtccgcgaagcggactgagggtggtcatccgtacatggcgaccaccctcagtctcactccgttcgacagctcccgccagcgggagccagtgaatctaatcagcccttgatcttgcccatgacgaccttggtgacggccttggcgtcggcctgaccgcgcgtggccttcatcacggcaccgatgatcacgcccatcggcttcatgttgccgctcttgagcttctcgacgacatccgggttggattcgaacgccgcgtcgacggccgcctcgatggcaccgttgtcttcgacgatcttgtagtcgtgcttcttgacgacttcatccggagtgccttcgcccttaagcacgccttcgacggtctgcttggcgagcttgtcgttgagcttgccggaggcgatgagcttctcgacctcggccacatcggccggggtgatcggcagctcttcgagggacatacccttggcgttggcttcgcgggaaagctcgcccagccaccacttgcgggcaccggcggccttggcaccggccttgacggtttcctcaatcaggtcgagggcgtcggcgttgaggatgtcgcgcatctgcagatcactcaggccccactcagacttgaggcggttgcggcgctcacgcggcatttccggcatctgggccttcatctcctcgatgtgctccttggtgatgtggagcatgacgaggtcggggtccgggaagtagcggtagtcgtcggcatcggacttcagacggccgccggcggtggtctgcgtagcctcatcccagtggcgggtctcctgcagaatctccttgccgtcgtccagacgggcggcctgacggcgaatctcgtactggatggtcttctcgatgccgcggaacgagttcacgttcttggtttcggaacgggtgccgtacggggcgtccgggctcgggcgcagcgagacgttcacgtcggcgcgcatgttgccctgctccatgcgggcgtgggagatgttcaacgcacgcacgatgtcgcggatggcgcgcacataggcaccggcgatttcgggagcgcggtcgcccgcaccctcgatcggcttggtgacgatctcaatcagcggcacaccggcacggttgtagtcgaccagcgaatgatcggcgccctcgatacggccgtcggcgccacccacgtgggtgttcttgccggcgtcgtcttcgatgtgggcgcgctcgatcggcacacggaacacggtgccgtcctccagttcgacatccaggtagccattgccgttggtgggcttgtcgtactgcgagatctggtagtcacgcggcatgtccgggtagaagtagttcttgcgggcgaactggctccactcggcgatttcgcagtgcagggccaggcccagcttgatcgcgtaatcgacggcggtcttgttgatcaccggcagggagcccggcaggccaaggctcaccggggtcagctcggtgttcggctcgccgccgaactcgatgtgggccgggcagaacagcttggtgttcgtggacagctccacatgggtttccagaccgaagaccacatcgtacttcttggtggcatcggcgtacttcatcagtttttcagccatgatgttgtttctttccttccgatgctcacttgcccaggccgtcaagccacggggtcttgaggtcgttccagatcgggccgttccagctgtcttccagcgcggcttcgagggccgcagccggcttgtacatgacttcgtcgcgctgctgcggggcgatgaactggaagccgacgggcaggccgtcgtcggacaggccggccgggatggacatggcaggcacgccggcgaggttggccggaatggtggcgatgtcgttcatgtacatggccagcgggtcgtccatcttctcgccgaacttgaaggcggtggacgggctggtgggggccacgagtacgtcggccttctcgaaggcgttgtggaagtcccggatgatcagcgtgcggaccttctgggccgaaccgtaccaggcgtcgtagtagccggcggacagggcgtaggtaccgaggatgatacggcgcttgacctcgtcgccgaagccggcctcacgggtgtaggccatcatgttggcggcggtctgaggcacgccggtcggcggcatcacgcgcaggccgtagcgcatgccatcgtaacgggccagattggagctgacctcggacggcatgatgatgtagtaggcgcccagcgagtagccgatgtgcggaaccgagacctcaacgacctcggcacccatctccttgagcttgtcgacggcctcgttgaagcgggcctcgacgccgggctggaagccgtcgccgccgagttccttgatgaggccgaccttcatacccttcagatcgcgcttggcgccttcgcgggcggcggcgaccatcgggcgcgggccttcggggatggaggtggagtcacgcttgtcgtggccaccgatgatctcctgcagcagtgcggagtcgagcacggtgcgggagaccgggccgatctggtcgagcgaggaggccatggcgatggctccgaaacgggagacgccgccgtaggtgggtttgacgcccacggtgccggtcagggcgccgggctggcgaatcgagccaccggtgtcggtgccgagggcaatcggtgcctcgaatgcggcgactgcggaggcggagccgccaccggaaccgccgggcacgcgctcggtatcccacgggttgtgggtggtctggtaggcggagtgctcggtggaggagccctgggcgaattcgtcgaggttggtcttgccgagaatcggcatgccggcggccttgagcttttcgatgacggtggcgtcgtacggcggcacccagccttcgaggatcttggaggcggcggtggtctcaatgcccttggtgacgatcatgtccttgatggcgatcggcacaccagccagctcaggcagggcggccttgtcttcggcggacttggcgtcgaaggcgtcggcctgctcgagagccacatcgccggaaaccttcaggaaggccttgatggacggctcggcggcttcgatcaccttgaggtgggcttcgacgagctcacgagaggtgacgtcgcccttcttgatggcagcggcctgctcggcagcagacagtttgacgagagttgcggtttcgttgctcatcgattactcctcgcttcccaggattcgcggtgccacgaacatgccggcctcggtcttcgggccaccggcgagcgcctcttcctgcgtgagcggggtttcggcgacgtccgggcgcaggtaggcttccagaggaaccgggttggcggtcggcggcacatcgtcggaggcgacttcctggaccttgttgatggagtctgcgatgacgttcagttcgccctgcagacgggtgatttcctcatcggtgagcgcgattcgggccagatcgcccaaatgcacgatttcttcacgtgaaaatgttggcatggccataactatatgagccgtatgtgacacgcagttgtcgggaagcctcattttcccgcctactggagcccttcagcgaatcagaagctcaagccggtcgagcatttgccccgctgctggcttcttcggcggggcaaaaccgttgccggaccgcaagttcaccttactgagacgactcgcagcagagcaaaaccgcgagctgaccgatgaaacgcaccgctcagccatcccagcaaaacaaaaccgcggtccaaccaataaaacgccccgctgagacgccccgcagcgaggcaacgccacggcccaaccgcaaatgtgccccactgaagtatctgcatggccaccctaataagctcacaatgagcccaaacacacctacatcgaacatatgaacgacaatcgccctgcgcacctcgccagttatccacattttgcatacccacccaaaagaatccacataatcagtccaatacggtcagatgcctgataatcaggcaaaaacacacatctaggcaccgaagctagaaccacataaccccagacagatagacaccgtgttcaccattggcataccgtcgaatcatgaaacatcacaaagcagtggacatactcatcacgaaggctgaagcaacgcaacagtgcgcttatggaacaaccaaggcacaccgctcggcgctggctcggcgcgtgcaggcgcacgaactcaaacgtgtattcaccaacatgtacgccgcttcggaatactgggattcgctgcaacccgacgaacgtatcagacatattgcacgaactcttcataacagacatccggattgggtgttcgccggggtcacggcagcggccatccacgattttgaacaccaatggcatcttcatgctggcaccatcactctcgccacaacatcacgaggccccaacgccagcagtgcaaaggtcaaacgcatcttcacgtcaagcagcacgccagaatatgccaatggactcccggtgaccagcaaagccagaacggtggtggattgcgggctgtccgtcgacttccgatttgcactgcccattatcgattcggcgctgcgcaacggcgtcgccatcacggacattctgaatgtgtgcagcactatgcgacgtgattgcacgccgatattccgcctactgcattatgccaatccggcgagtgagaatggtggcgagtcacttggacgaggcaccatcatcgcaggcggcctattagccccagaactgcaacaaaacatcaccgacccgcaaaccggtgctctgtatcgcgtggatttcctctggcggctacctgagaatcggcttatcgtgggcgaattcgatggctatgaaaaatatgtgaacccggatatgaatgaccgcaagggtgttcgtggtgcagttcaggcggagaaagaacgggagacggcactgtaccgggccaaagtcgacaccattgtccgattcacctatgaggaggtgatgcaacaacatcctttactcaataagctgcgggcagccggcatacctcatgctggaacagtgatgggagctggttaagcgcagtgaaccacggtggtcaaatccatggggtcagagtcaccagaaccatggtcactgcagaaccgccaaagccatagccatgacaaactgccaggaccatgtccgaaccggcagaactgccaaagcagtaacccgcgttatttgatatctgatatccgcttttccggtgatgatgagaccgccgatccatgcggcggcagcccaggcgatgagaatcaggccggactgccaccattcgggaatccagtagtccggtttaacggcttcggccagtgtggactgcgcggagctgctgatgcctgcggcgagcaggatgccgacgatgccggcggcaaatgcgaattaatgccgcggcgatggatttggtggcgtagatcatgcctctaatgtggcccatattgggcagatgcggcgggattgtcgatgcatggctacacgcctgatacggcgtgttgggcaatccatgcgtgcatggccacggccgccgcagcgcctgcattaatggagcgcacggaaccgaattgagagatgtagaccacatcgtcggccaattcgagggccttctcgctcaatccggggccttccgcaccgaagagcagcaggcaccgcttggggaaggtataggtttccatcggcactgcgccgggaatgatatcgagggcgatgacgcgggcggcttgaagctccttgatgcgcgcatcacaagcatcgatttcggccagcagctcatgaaggtgcttgttgtctccatccacagccacatcatgcgcatggatggcggcggcaccggccttggctcgttcataggcgatttcaccggcgatgcgatgatgccagctttccaccagttcggcgatggaggggtggtgttcgacgtgctggtacagttcggtcatcaacgcgcccttgcgattccacttatgtggaccgacaatgtgtacgcgcttggcctggaaggcgttggcggtgcggaccatggaaccgatgttgaaatcgtgggtccagttttccaccgcaacttcgaagtcatgacgccctcgagcgtcaagatcggccttaatggcagcgacggtccagtagcggtaacgatccaatacgttgcggcggtcgccgtcattcaacagcaccgagtcgaaacgaccgtcataattcggagaagtcggatcgtcgggacgaggctcgccgggatgggtctcagaccacggcccaaggccgatttcacggaattccggttcacctgaagctttggcagccaaagaaatctggttgggtgcgtgcaatctttctcctcgataacgctattcaccggttcctcttagtcaacttcgcggctcagcccggctgactttatgcgagggaagtcaaaggtggatttaccgcagttcggattcgtcgaagacctggatgaaggggagcgtttgctcgtcgccggtggaggggttgaccacattgatgtctttggcaccgccaccgaccagcgaggcgatggccacgaccttggcacccagctgctccactatgccaaagtcgaggctcagctcattgccgttgcgcagggtgaccagcgagctggtctgcacgtacgacttttcggacagccaagcatccaacagcaccacacggcggccttcgatggaggggcccttgatggacgggtagacgaagtccatcacgaatccgtctaggtcctcgccacgagaggcggcggcctggatcatggcggacaccatgggcacagatgctgcggtcaaggcaccaacagcatcgaagtcatcaaccgaatagcccgcatcttccaaagtgtcaatcagtacatggcccatgacggtggcggcacggtggtcaaaagtcaccgcggcaagttcggagaacggacggcccaccacatgctccctcagcaaggtggctagctgttcacgcggctccagcatggcaaagtcattgtggctcttcgcgacggcgaggtccggggtaccagtggggcggaatccagattcagtcatgactccagactatcgcctgaggcagtcagatgagtatcaccttcatcggccggcaccacttcaggggcggacagttcgctcacattgcctttgtctgattcgatgatcggtacttcctcgatgatcttggtcggttcgattttttgcagcttgcgagcggtgggcaacacacggcgttccaagctggacgcgaacttgttgtaagcgctgactgtcttggtgatctgggtacccaatttgatggcataatcacccaacgtggagaaccgttcgtacagttctcgggacagatcgaacagctgcttggcgtcatcggtgagcgactgctgctgccaggcataggcgacggatttcagcacggcccacagcgtgaccggcgaggtgagcgccactttgcgagagaacgcatcatccatcagtgtgggatcggcttcgagcgcggcctgcaatagtgcctcattggggatgaaggccaccacaaaatcgggtgccacatcaaaggcattccaataggccttttcgccgagagcacgtacatgctcgcgcaacgccttggcatgggaccgcagtaaatcatcgcggcgggcaatatcctcggggctggcggtgtctgggatttcgcaggcacgctggtaatcggcataaggcactttggcatcaatcggaatggtcttgcctcccggcagatgcacgatcatatccgggcgcaacgtacgcccatcggcatccgtgaccaccacctgggtatcgaaatcgacatgttccagcaatccggcggattcgacaatgttcttgagctgggcctcgccccacgcgccacgcaccttgttgttgcgcaatgcggcggacagggagctggtctccttgtccaaacgggcctgctggtcgttgagccccttgagttgggctcccaatgcgcccatttccctcttgcggccctcttcgatctgcgtgaccttgttctgcaaggtatcaagatttttggccactggcgcaagcgcctcgagcaccttgctctgttctttcaaacgtgcttcctgttcagcacgcttggcctcggcgtcccgagcatccgcttgacgcttccgttccgcctccgcagccgcacgctcacgttcctgctgaatgcgaatctgctcagcctgctgcgcctgggcaagttgtgacttggcgaaagccaattgctggttcacgccttcaatctgagcctgtgcggcagcattgcgagcgctaagctcagcattctcgaatcgcgcattctccagcgaggtcttggtctcctccagctcctcgcttttgacgcctcgagccatctcctgacccttatggcgccccagcacgaagccggcgaagaggccaagccctgcaccaaccactagcacgacgatgacgataaccacggttcctatttgctcaaacatggtacctagtatgtcatcgatggtgaatgacggtaaatttttaccgaattcgacggtttcaagcagttaaacggatgctcagcagcccacattggacatttggactcatcgcagtcgagcatcaaccgttattgcgctgtgtcacacccgaacgccggatgtccttccatgatttgccagcgcgcgtcatcatgcggcagaactcgtcacgatttgacgagacgtgcgatggccgcggaagcctccgcaagtttttcatcagccacctcgccgccctggaccgacgcctgccgcacgcaatggttgagatgatcgtccagcagcaataacgccacggatttcagcgccgagttcgacgccgaaatctgtgtcagaatatcgatgcagtatttgtcatcctccaccatctgtgtgatggcgcgcacctgcccttcgatacggcgtaatcgtgcgatgaccttggccttgtcttcgtcataaccatgcatcgcaacccccctgatacttatccgtcagctgaacacaccccatcatataccctctaggggtatagggtatacactgttgttcagtgcattaggaatgggaaggaacagttatggagttcagcatcttctcgaccgccacggcgctgatagtggcggccgcattgacatggctggtcctgcgattcttcttcggaacgcagaaggcaacggccggggccatggacgcttccggcgaacgccaatccgcaacaatcactgtcaagggcgggtactcccccgccgtggtgagcatgcgtgcgggtacgccgatcacactagccttcgaccggcaggagaccggcgaatgcacctcacatgtggtgtttgctgatctgggacttgacgccatgctgccgggcaacgccaccaccgacgtggaactgccggcgttgccgccgggcgagtatccgtttgcgtgcggcatgaatatggtgcatgggatgttgagggttgagggagaggacggctcggatgagaacacgccccttcctcatcctgatgcttcgtatacggcacctaccgccgtggatgcggcggaggccgatcggcgagaggcggctgaacgcgccaatgagatcaaggcgctgacgaagctggtgattgtgggcgcggtactgacgttgccggtattcgccgtcaccatgctgcatatggccaatcccacgctggtgccgcattggatggtgaacccgtggttgcaggccatcctgatcacgccggtgatgttctactgcgggcgtccgatccacacggtcggcttccccgcgttggcgcatcgctcccccgacatgaactcgctggtctcactgggcacttcggccgcctacctgtattcactggcgacctgcatcgccccgtgggtgttcccggaaggctcgcgcgaaccgtatttcgaatcggttggcgtggtcatcaccttggtgctggtcggccgccttctggaaaccaaggcccgcgaaggcaccggcaaggcggtgcagtcgctcatcaaactgcgcccgcgcaccgcgcacaaactcaacgccacttccgcagacaatgtggacggcatcgaatggcgcaatccggcgaacttcaccgacaccgacatcgacaccatcgccaccggcgacctgctggtcgtcaagaacggcgagcgcgtgcccacagacggcatcatcgtggccggcgaggcgcatatcgacgaatcgatgatcaccggcgaatccaagccggtttccaaaaccgtcggcgatccggtaaccggggccaccgtgctgctcaagggcgactgcgtgatgcgcgccacccaagtcggcgcggacacggtactctcgcagatcgcggcgatggtggcccgcgcccaggcgaccaaggcaccggtacagcaactagccgataagatcgcccggtatttcgtgccggcggtgatgatcatcgccatctggacgttcgccatctgggtgtcgttgggcccgacaccgcaactggcgcacgcgctggtcaccgcggtcagcgtgctgatcatcgcctgcccgtgcgcgctgggactggccacaccgctgtcggtgacggtctcgctgggcctgggtgccaccaacggcgtgctggtcaccagtgccaaggcgctggaacaggcgcgtcgtatcggcactgtggtgttcgacaagaccggcaccatcacgcgcggcgtggtggacgcggccgccgactgggacaagccgagctacgagcaggacacagtcaaggaaggctcgcgcgaggccatcgcggcgttgcgcgaacgcggcatccgcacggtgatgctgtcgggcgacaaggccgaggtagccgggcgcatcgcccgcgaagtcggcatcgatacggtgatatgcgaggtcaagccggacggcaaggcctactggatcgccaaactgcagcgcgaacgcgacgaggccgccgccaagtccacggacggcacctcccgcacggccgcgcaatcccgcactctgattgcgatggtgggcgacggcatcaacgacgcccccgcactggcccaggcggatctcggcatcgccatcggcaccggcacggacgtggcgatgcagtcggcggacgtgaccttgatgagcggcgatttgcgcggcgtcatcaagaccatcaacctgtccaacgccacgatgcgcaacatccgcgagaatctgggctgggcgttcggctacaacgtcatcggcattccggtggccgccggcgcactctacccgttcaccggctggctgttgagcccgatgatcgcgggtctggcgatggcgttgagctcggtgtgcctggtgctgaacgcgaacaggctgcatggggcgaatatcaacgtgggtgctgccgatagtaccgctggctcgggcaacagcacggcggatatcgaatcagccggatcggccgaatcagccaacgccgccaacatcaccggctccgccacatccaacgcgcctcacgagccaaccgtcatcatcgacgatcgcaccacgctgaatcacaccaatcacgcatctgaccaatccaataatccaaccaacaaggagaacactatggatatgggaatgcacatgcaccacaccgcccccgcggacggcgaaaccgccaccgacccggtgtgcggcatgaccgtggcggtgaacgccgacgcgatcacgcgcgagtatgagggcaagtcctattacttctgcggcgaacactgtgccacgaacttcatgaaggccccgcaggtgttcctggagcagtagcctctgcgtttacctgattcaacgacaatggcctccgcccaaaacgagcggaggccatttgcatatatgaatcaatcaacgaatcagctggcgaagaagaacacgaacagccaagcgccgatgatggcgccgatgatcggggccacgaccgggatccaggcctcgccccagcgggaggagcccttgtgcgggatcggcagaatggcgtgcagcagacgcggcatgaggtcgcgagccgggttcaggccagggccggtcgggccacccatggaggtcacgaggccccacacaatgaagccgacgacgatggaggcggcggcgtaatcctgcttgccccaaaccagggacaggcagcacagggcgccgaagacgagcaccagggtgccgaacatctcgttgaggaagtagttgaccttctggttgtccgcgtcggtggtgcagaaggtgccgagaatggcgtcggcgtcctcggtctccttgtagtgcgggtagtaggtcaggtagacgatgaactggccgagcagggcgccgagcagctgggcgacgatgtacggcagcacgtcgctccacgggaacaggccgttgacggcctgggcgatggtcatggccgggttgatgtgcgcgccggagacgctaccgaacataagcaccgggaacatgacgccgaagccgtagcccatggcgatgttcaaccagccggcgtggtgacccttggtgttcttgagctcgacgttggccacggagccgttgccgaagatcatcagaatggcggtgccgaagaactcggcggccagcttggtaaagagagagtattccactgcttcttcttttctcttcgccgcgcaacaggcatggctgactgttcacggcattctgtgtgattggaaatccgttcgcggagccggcgacgcgatttacgctgggcgcgaaagcaaacgtggcgattgtacactttgccccacgacgaaatgctggcaggatgcgatgtcgaatgttcagccgaatgcaatgcccaaaaaagccaccggaatcagccgaagcgaccttgactctcagtggttgcgaatgacgttgcgcaggggtaggacgctggtgggcgagacggacagttcgtcgattcctaggcacaggaacgtatcggtcaggctcaggtctgcgccaagctcgccgcagatgccgcaccagatgccatgacgatgggcagcctcgatagtcatctggatcatgcgcagcacagctggtgaatgcgggtcggcaaagcgttcgagactcggggtctgacggtcacaggccagcgtgtactgggtcaggtcgttggtgccgatggagaagaaatcgacttcggcggccagctcgtcggccataatgaccgacgcaggcgtctcgatcatgacgccgatctggatactctcgttgaagtcggtgtgctcgccgcgcagctcgcttttggcttcttcaagaatccgcttggcgtcgcgcacctcctgcaccgaggtgatcatgggcagcataatggcgatattgccgtatgctgaggcgcgcaacaatgcgcgtaactggactttgaaaatctccgggcgggtcaggcagatgcggattgcccggtaaccaagcgcggggttatcctcgtggtccagattgaagtagtcgacctgtttgtccgcgccgatgtcgagtgtgcggatgatgaccggacggtcgcccatctcctgtgcgacttgtctgtatgcatcgaactgaaattcctcggtcggccagtcctcgcgttccagatacaggaactcactgcggaacaagccgatgccctcagcatcattggccagcacggcggctacgtcagagggacggctgatgttggcgtacaggtggacccgctgaccggacttggtttcggtgggcttgcctttgagcttccgtagtaggctcaggtgttcctcagcttcggccttcctgcgctggcactcggtcagcgtggcctcgtccgggtcgacgaacaccgcaccgctggcgccgtcgattacggcaacgtgaccgtcatcagtcgggtcgaaggcgtcgccgataccggtgatggcgggcaggcccatcgtgcgcgccagaatcgcggtgtgcgagttcgctgagcccttggcggtcacgaggcccaaaaccttagcgcggtcgagctgcgcggtctcgctgggagcaagatcttgggcgaagatgatgtggctttcgccgttctgcgcaatcccgttctgcacagtaccgttctgcacagcatcgccttgtatactgccatcctgcgccgtgctatcgcgtttgccttgcagcacgttcatcacgcggcgagaaacatcctcgacatcagcggctcgagcctgcatggtcgagctatccatcgcagcgaacatggcggcgaactgttcggcgacgcttttcaccgcaaattcggcgttcaccttgtcttgcgcaatcaaaccttcgacgcatcccgcatagtccgggtcctggagcataagccgatgggcgtcgaacagctcggccttgttttcgccgaactcagcggcgacgttgtcacgcagttgcttgagctgagcgacggccatgtcacgggccgcgcggaatcgatccatctcagcctgcggatcgtcgattacgcggcgttctacagcatgatcggcggcggcgagcacgcggaccgtgccgatagcaatgccagcggatacgccgacgccctgtatcgttctcattacaggtgctccttgaggaatcgctcgaactctgcggcagcgacagcttcatcgttgccctgcacccgaaccgtaacctcgtcaccttgttgaacatcaagtcccataacaccgaagatacgcttggcatccacggatttgccgccgtaggcaacggtgatgttcgactcatattcccgcgctttggcaaccaaccggccagccgggcgggcgtgcatgccttcggggtcggatacggtgaacgcgaatatctgagacatgacgccgctccttacacgtccggccgtcacgcgcgaagacggcctttccgcaccagctacggactgatgctggaaaaaaaacaaaaaaccggaatctttcgattccggttgtctgtgcccccgcagggattcgaaccctggacacgctgattaagagtcagctgctctaaccaactgagctacaggggcttggttagatgttgaagtgttccttgcaacaggtgataaatatactcagatttgaagcgaatgcaactctcggcgtgtcgcgtctatttccggcgtttttgctaatacaaaaatcccccatgcggcgcgaaccgcacgggggatgatgcttaagctcagactcttggtctgtgtgattccagcactaggccggaatgactcactcggccacgaccttcacgaagaaggaagcggtgatctccgggtggagggccaccttggcggggaaatcgccggtggtcttgatggtctcgacctcgatggccttcgggttcaccgcggccttgtcggacagagcgatggcgatggcctcgttggagataccaccgaacagcttgccggactcggacaccttggcggcgatctcgacggtggtgccctcgatggcggccttggcggcgacggcgtcctcgcgggtggcgacggccttggccagacgagcgcgcttcatagcggtgatctgagcctcagcacccttggtccacgcgaaagcgaggccctgcgggaacaggtagttgcgggcgtagccggccttcacgtcgacaacgtcaccggagtggcccaggttggacacggtcttggtgagaataaccttggtttcagccattgttcaaagcctccctaactcagcgacccgaagtggcgtacggcagcagggccatctcgcgggcgttcttgatcgccttggacagctcacgctgctcctgcacggtcacgccggtgatacgacgggaacggatcttgccgcgatcggaaatgaacttacgcagcagcgcaacgtccttgtaatcgatctcggtgaccttggcggccttcagcgggttcggcttcttcttgaacggcttgaccggcggttgcggcctcttacgtgacatgatgttctccttataaatcttgatattgattgctgctggcagcggggaggtaagtactgatcagaactccgggtcggaatcgtcgccgccgccgaaatcggaggaagcgccgaacgtggagaagctaccggcatcagatgcaccggcattgctccacgggtcggccgcaggagcggacgggttggcgggagcggcaggctgctgggagtatccagcgccaccaccctgatagccaccgttgtaaccgccctggccaccggcataaccaccttggccaccctggttgccatagccctgattgggttgctgaccaccctggaaaccaccggaacgaccttggaagccgccctgaccggacgactggcgggtcacctgtgcggtggcgtagcgcagggagggcccgatttcatcgagctgcatctccacgacggttcgctgggaaccatcctgtgcctgataggaacgctgctggaggcggccggtggcaatcacgcgcatgcccttcttcagggactgggcgcagtggtcggccaggtcacgccaagcggagcacctcatgaacagcgcctgaccatcctcgaactggttggtctgacgattccaggttcgcggggtggaagcaatcgtgaagctcgccacggtcgcgccgctgccaatagtgcgcagctcggggtccgcagtgaggttgcccacgatggtgatgacggtttcgcctgccataacggtccttcttacttaccttgaataccagctgttcagctgactaaacgcttgattcagcccttacgaaggatcttcgtacggatcacggattcgttgaggttcagaacacggtcgagctcatcgctggtagcgggctcggcggtgtacttcaccacgacgtagttgccttcggtcttaccggcaatctcataggcgagcttgcgacggccccagtaatcgggctcatcgaaagagccgccttccttggtgacgagttccagatactgctcggtcagcttcttcagaccgcgctcatccagctcaggatcggcgatgaacatcagttcgtacttgtgcgcagacatcacccacctccttcggactattcggccacggacgttccgtggcaggagtgtgtatgcgtgttaatcatagggcgatgcagatgcacttcgccctgtgagcaacttacctatcttatggtcagggcgggacagtgccgcatgttcatcaacgattgcagcactcttacaacacagccccacttcacggcacgcgctgcggtggggtgctagtacactggttaaggctaaaaacactgcaacacaaaaggatgcgaaagcatgtcggcgattcttgaaggcactccggataaacgactcgtattggtcacgggccgcgcctaccccgagctagctgagaaggtggccgaatgtttgggaaccgaaatcctcgaaaccacgtcctatgactttgccaatggcgagatgtacgtgcgtttcaccgaaccggtgcgtggtgcggacgtgttcgtgctgcagtgtcattcgggcgatatcaacaagtggatcatggaacagctcatcatgatcgacgctttgaagcgcgcctccgccaagtcgattaccgtggtggcgcccttcctcggctactcgcgccaggataagaagcaccgcggtcgtgagcccatcaccgcccgtctgattttcgatctgttccacgccgccggtgcagaccgcattatgacggtcgatctgcacgccgctcaggagcagggtttcttcgatggtccggtcgatcatctaaccgccatgccggtgctgctcgattacgtgcgttccacccttgatctgggcaacaccaccatcgtgtccccggatgccggccgtatcaaggtgtccgaacagtgggccgccaagctaggcaatctgccgctggcattcatccacaaacagcgtgatattactcgtccgaaccatgccgaggcacatggcattatcggcgatgtcgacggccgcgactgcgtggtcatcgacgacatggtcgataccgccggtactatctgcgaagccgtgcgcaccctgaacgaatccggcgccaagtcggtgacgctggtcgccacccatggcctgctctccggcccggccgtggagcgcctgtctcactgcggcgcgcatgaaatcgtgtttatggacaccgtgccgattcccgaagagaagcgcctgccgaatatgaccgtactgtcttgcgcaccgctgctggccgcgggtattcgctccgtgttcgaggaaggttccgtggcgattctgctcgacggcctgcccgaggacatgcgtccgcgcaatatctatgcgtgattgatacgccgaaaatccttacgaaaaacgccgcttggctattgatcaagcggcgttttttcgtatagctccaatcagatgaaggcgcgctcgccgaagatggcggtgccgacgcgcacgatggtggagccttcttcgatggcgtaggtcatgtcgtgggtcatgcccatggacagttcggtgcagtcggccgtgccttcggcaccggaggcaataatctggtcgcgcgtgcggcgcagatgcgcgaagcccgcacgaatcgtgcgctcatcatccacatgggcgccaatggtcatcaatccctgcaagcgcagtccgcccatcgcaccgatgcgctgggccaagtcgatggcgtggctgggtgcacagccggacttcgattcctcgccggattcgttcacctccagcaacacgccgaccgtgatgccgcgcatggtggcacggcgggcgatcttttccgccagttcgatggaatccacggattcgatggtgtccactaccggcagcaccttgccgattttattggcttgcaattggccgatgagatggaagggaatatgcgttgcagctgcggcattggccgtgtcagcctcagcggcatcaatcacgcctagcgaataaccacgctcccccagtcgttttgccagaccgtcagccttgacagtaatctcctgtggacgattctcaccaatcacgcgaataccagcatcaatagccgccagaatctcgccgacatcgcgcgtcttggtggcagccagcaattggaccgaaccggcagcacgcccggctgcggactccgctgaggcaatccggtcaagcacgcgatgcacaccatcagtaatctcttgtgcgcgcgcctgatcgataacttcgttggcgagatccttatggtccatgtatgccgtcattgctgcccctgttcgtagattccccaccatcgtagtctcatacgcgcacataatgcttgttattgaacaaaagtgaagcccccgctgttcatgcgcgggggcttggtgatgctaggctgagcgagtgggactagcaggtaccggacttgcggcgcttgaggatgattacacccgcaacagcaagtaccacggcgaggatgccaacaccaagcacggctgcaccggtgtcaggtatcttcttgtgcttgccggagtctgcatcacccttgttctggttggaatcgttgccttggttgggcttgtccgtgccggaaccgggcttatcgccaccttggccaggcttcgtggtgctcttctcaaccagacccgcgatggcatcgctgattgcctcagtcgcagcctgtacgtcagactgggcggcctgaccatcactcgtcagcgcattcgccgtagcgactgccgaatcaagcacggccagcgattcatcagtccactttgtgcgatccacggcagcagcggcatcgagctgagcactcagcgcggcacgatcttgcaccgtagctacaagcaccagcttcttcgctgcctgcttcagctgggttgcggcatccaccaccgcagcttcggtggcatcctcagccttatacacctgctgcgccgaatccaataccgccgcgtactccgcccatgaagtctcggtgtacttggaggcatcgtcagccttaggcgagtcagcgagcgcctgcttgagctcggtcttgtcgatcggtgtgggctcaggcggctcaggcgtactgtcgtcaatggcatgaacctgccattcggcaacagccggagaagccgagccggacgtgataaccatacgcaacttggtagtcttgaccggagtgttccacgtgccatcagaccaccccttggcatcgccggtggcccagccagcagacggtgaattggcggtcacagtgtaggtggcgtcgggaatatccacgaagttgccggcaccgttgttcgccaaggcgtcccagtactgcaattcccacgatgccggaatacccaatccgccatcatccgaggtgaattgcacgcggctagagtcgatagtcacttcacggtcccactcgtagtcgaggcgcatctcaccggtgttgggccaagtgccccagacatcctcgttggcaatggtgatatcgggaatgatcttgccgtcgttcaacgcagcggcacccttgacccagccggatgccttgccgtccacatcggtggcggtggcatcgccctcaatgtagccggtcagcggcacggaagtgtcggatggaatgtcggttttcgccgaagcggacacgttgccggccttatcggtggcgcggtagtacacggtggcgcgcgacgcgctcggtgcagcaatcggcttgctgtacgtggcccattgaccgtctgtgccaatgcggtattcaattgatgcgacaccggaaccggtgccgtcatcagcggtcaaggtcagcgtgcgctcctccttatcggcggcggcggtcacggttggcgcggcggagtccaccttgccgccggccttggccacgtcggaaacgttgccggcctgatcggtggcgcgagcccacacttcgacatcgccctgctgggaaagcgtggcaatggccgcgtttgcattcgcggcgatggtggtccagctcttgccttgatcagcggaaatctccagcttggcgataggtgcggtgtcgtccgtggcctgcacggtggcgaacggagcggtggtgagccactcgctattgcctgcgttagcagtaacggcaacggttacagtcggcttcgtggtatcagcggcaggctggtagccgtcctgcacggtgacatttaccgacacattgccctgctcgcttgcctcaccgggcacgccggcgaccacgccgtaggccgtaaacgaaccgaccttggcatacgaggaagcatcaactggacgccaaattactggggaggcaacggttgggttcccgtacttcacatccactgtggccggcagagtaggcgcagtaccggtggcggtggtcacgctcttcggcgcagtgattgccggcgattcgctggagtcggagccgacttcccattcagcaacggccacggaggcatagccgccatccacagcttgaccggtcatgtcgagctttaaggcagtagtggtcaccgcatcgaaggtgacggcgttggggttggccttgcctgtggtcgttgtataggcactcgggttggtgacatccttccatgtgccgtccgcgtccaagtactgaatcttccacgaggcgggcgcgcgcagagcgttggaatccacgtcgaaccaaaccttagacgagttgacgcgcacagtgccatcccattggtagaccagagaatcgccggactgcgattgcgggatagaacggtagttggtccagtgattcggcgggaccacagcggtttgcaacacacggccgtcgttcaccgaacccttccaagcaggcgtttcagtgaacgtggcgctcacctttgcgtacggagccacgttggtggagggctgcgttttctcggccttggttggatgggcggtggaaaccatctggccgtcggcggtccaatcgacttcatcaatgcacacggcacggcggaaatcggtgccgccttccttgtcgccggtgtgataggtcacataccatttgtcgccgaactggagcaccgaggggtgcatcgtggtggccgagccagaaggcacgattacgccttggtacttccatgggccgagcgggctgtcggaagtggagtactggatgcaagcttgatagttcgattccacgcaggtggccgtgcccgaaccgggcttaccgccgtcgtacacgttgtaataggtatcgcccttacggaacacccacgccgcctcgaagaatcccttcgggccgttcgcgttgctgtccgcgtccttcatggtgtggaggttcggcgtggtgccatcagccttggtttccacctcggtgtatgaggtgcggccggttgtggcgtccttcttcatcttgatggcgagctgagtgccgaacgtaccaaagtgcaaatatccggtgccatcctcgtccacaaagaatgccggatcgatggtttcaatctgggtttgcgatgtggtgagcagcggcttgccgatggcatccttccacgggccgagcggactcttcgacttggccacgccgatggcgaacgggtcctgtccagccgcctcagaagccttgtccttcaccggcacgtagtagtagaaccaatcatcggaagtgtcgctcggggtgccgttatcgtcggctacgacttggccggcgtacgcgccatcgccggtggcccagctgaacaggtctgccttggcgatggtcttgtaatgtgtccatttgccttgattcaggacgtcttcatcggtgacgtatacgccccagtccttcatgttgaaggagccgtagtcgggcgaggcctcatcgtgaccggtgaagacgaagagtttgccgtcatagctcagcgcggatgcatctgcagagtagtagttctgcgaaagatcgttcggggtgtcaataccctcgttctgcccgatggggttgcgcatgtagctgggcagtgcgctattgtcgatttgggtgacggtgacatcaggattgttatacggcagttcgttatacgcgtgaccggcaacgctgggcgcgttgtcagcggtggctgaatcggcggccattgcggtcggcgcaagggcaaggcctgacagcaatgtcgctgcggcgacgagtccaccggccaccgcgcgaaccgattgcgcggatacatggaaactcatagtgctcctcattgagtgagtgaaaagagtaatgatgggtagaaggaaaaggctagagccccctctgtgagggggctcactcggcagaatgactccgttgcgggtcaggccgagtggcgagccgaaccgtggtcgccggactggcgacgcttcaggatggtcacgcctgcggcggtgagcagcacggcagccgcagcaactacggaaaccgcggcaccagtcggaggcacacgatcacccttgttgtccttatcatccttatcagtgtcggtcacaccaggctgctgggagccgggcttctgctcaaccttggtggcccaaaatgccttgtcaagggcatcctgtgcggcatcgacatcggcctgcttggcatccttgtcgtcgtacaccttctgagcggcggcaatctggctctgcagagcctgccatgcctcctcggtgtacttcgacttgtcagccttcttggcctgctcgatggaagcctcgagggactccttcttcaccgtttcggcggcgggcttctcttccaaggccttgacggccttgttcagcgaagcggacgcttcctggacggcggcctgagtgacctcaccgacctcaccgaccttgagcacaccttccgcagcctcgatggccttgttcaaggcctcgacactcttatccgtgtacttgccggaagcggcctcggctttggccgcatcgatggccgcctgcaacgtggacttctccacgtcggtggcgagcgcaacgagtgccttctggccgtcctcgagcttggtcacctgctcggcgacctgttctgcggtggcgttggcatcgtcgtacacagcctgggcagcgtcaatgatttgctggaactcagcccatgaagcggcggtgtagcggcttgcatcgaggccgttggctgtgtcaagagccgactcgagcgcggtcttgtcgaccggggtaggttcaggctcggtgccgtcaataccatgcacgccccactcggccacggcggccccgaaggtgctgctgccggtgtgcggagtgagcacgagtcgcagcgacttggtggcgaccggcttgaaggtcacagtgctccaacctttggcatcggtatccgcacgagaagccggcgagttacgcacaatggtgtaatcctcggtgggctcgacatccttccaagaaccatcctcggcgaggtactgaatcttccaagcgtccgggacttccagaccacccttcgaatcgtcagtctcagcgaagttggcccagaactgggcgcggctctggtcaacggtcacggactgaccgaagtcgtactgggcgtacatgccgtcctttgccttgccccaagaaccccagaccttgtcgttgacgttctgatcatccgtggtcggccaagtatcatcgacgactacgccgtcgttgagcttgccttcggccggtgaccaggtcgcctcggaatcaggcgaaatggtggtcttggtcgccttgccttcaatccaaccgaccaacggctcaggctcaggctcaggagtggaggaaccgttcgggtcggcaaccacgtggacagtgagcttggcagctgcggaagacgaaccgtcgtcgacggtaccagccacctcgtagtcaccaaccttggtcaggtcgatggccttgatgtcggcatccttccacgtgaccttgcggtcgtcgttgtatccgttcgggaacttcaccggaaccgtggcgggcaggtcgatggacttggcgttctggtagacggtctgctcaaccggctgcgcattacccacggtctgcaatgcggtatcggaacgagctgcgatgtgtgcaaccgtaccgctcagcgcaccagcgacgatgcccttgacatcgaatacggcatcggcggccagctgagcgtcggtcaccttatcccacgtgacggcgaggtcacggcgagaaccgtcggtgtatacggcgctcacggtggagggcagcttcagatcatcggccttggaaccggtctgcaccagtcggttgacttcgtccacgctcaccggctcgatggcgtacgcctcgaactcggaagcacccacgatggcgcccttcgggaagaccacgcgcagcttgtcggtttcgacggtgtcggcgaacttcacttcgttgccttcgttctgattgaccgtgtaggactggccgtcagccagcttcacatcctgccagttaccgtcagcgtcagcgtactggagcttccaagatgaggccatcggcacgccaccgccatcggtccagaagaagaccttggccttcttcagtggcaccttgccggcccacttcagttgcagccacggctccacaccagtgttgtcgccccagttgttccaggtctcgttcggcgtgttggtgtataccacctgaccgtcgatgaccttcttggcgttgtccttcggctggtagccgttggtgtagctggcagaggcgctcgactgcggggctacgttcacggtaccgtcagaggggatgccgtgaacggtgatttccttggagccttccttctcgccatcggaagcggtgagcttcagaacgtagtcgccttccttgttgaaggtgacggtggtgctggcagcagtatcgtccacgaacttcgcggtaccgccctcggggccggaaaccagctcccacttggtggtgacgtcgccttctgcgggcagaccgtcatccttcaccgtaccgacgagcttggcaccggatgaggtgctggaagacacgtaagcatccacctgcggagcctggttctcggaagtgccgtcagccttgataccggtgttgtaggcttcgatctccttgacaccgacggccatgccggcctgcggcgtgaaggtgacgcggatagtcgtggtctccaccggagtgaactggatacggttgtagttcgcgcccgcgtagttcggggtgcgcacctgatccgcaatcggggcccatgtgccgtcatccttctggtactccaacttgtagttggcgggctcggcatagccggagatggtctggctggacgagctctggtagaagtacaagcggaggtcgtcgatcttctgcttgccgtccttgaacttgatattgagcgtgtcggtcttgttctcagaacccttggtaccccagaacgattccatcacggtcttgccgtccaccgcgttcttggccgggtagttggtgtccttctcggcgtaggtggtaccggtcacgtccgcgtccttggccacattcgtggtggacttggaagcggagtcgacgttggcaccggacttggcgaacaggtcggtcacacgctggtcggcggtgaaggcaacctggttggcggccttgatatcagaaccagcggcattggtgatggttacgccggccttgtcggcatcctcaacggtgcccgtggacggatcgtaaatgaggtgtgcgagcttgtcggaagtgaaggcgagcttgccccccacgtacaggctgtagccagcaggtccaccatagtggctgccgtccttatcccacacgatggaaacatcttgaccgtggtagctcaggttgttcaccgtgaagtagttccagccggggatctcaatcgggttcagctcaatcttgttatcctcgcgcggcaccataccggctacgtcctcgaccatcgtccagttcgtggtgccgagctgggtgtggtggatccaggagcggtaggtgatcttgccgccgttctgtgcggcgtcaaggttcttgtcgaggttgttgatcacgccgtcaccgtttacatcgccgacgttgttgttatcctcgttccagaactcgttttgatcaaggtagttgttatcgccgccctgatagtgcgcgaacgccacccagtacagcagtttcttgaactgctcattggtgatgtaaccgttcttggctgcatcgtaattgcggatgccggctgaatagacctgcagcagcggctgtgcgttgataatggagaagttgttggaaccggggaagttcagcgccgccttgtccgcctggttggcggtgaagaacgggaagatcgggaactcgttggaatcctcgaacaggcgcagagccttgttgtaatcttcgttgccggtaggcatcaggccttcggagtacgggtagtagttattgatctccttgtacttggcgaaagcaccgtcgttcagccacttgtgcttgagcaggttgtcggacttgtcccacagttcagtggtgacttctttctggatcttgtcggcgatggcctgcatcttctcggcgttggcggtatcgccagcggccttgtaggcctgagcagccgcattggcgttggcccacatattggcggaaccatcggcgcgatccatgcgctggccggagcgacccggctcagagaaggaaacggcgtcggcatcgttaccggtcatcgaccaccaggaccagtcaatcaagctgttgtcattgttgttctggttgtcgttgttgtccggctcgctcttggaagcgagtagaccttgcacgtcctcggcaccctggtcggccagctcctcggccacggtggacggaccgccgtgcaccttgtaggagtcccagccggcgcgcgtgatgtactgcgtgtagctatggttccagttggccgggtcgcccggattgtcgtggtagtagtaatagcccgccttgctcttcttggcggtatcgccggcggaaagccaggtgccgtaggagtactcggggttgcggaaccacttggtgtccatcatgaacatgccggaggtgagcacgatttggttgttgtagccgagcacgccctcgatggaggtcgggtactggaaggtgttgccaggcatgttggcgtcgagcatgttgaaacggctcagccaccagcggtagaccacggtcttatcgatattgtcttccggagtgtccacgtagggagcgttatcgacccaccacttgttgtaggtggtcacggaatccttgtaggaggcggcagcatccttaaggtcgccggtgtaacgggcctcatattccttggtggagtcaggcagttcgttggcgatcaggccgagctgaatcttgacggtctgcggttcgttggccttgaggctcaacgtgctggtgagtttgccaccgctgacgatccagttggaaccgtcctggttgttggcggagaagcgcggataaatggtcgtcaggttgttcttgacgttcacgcggccagtaagttcggtggcaccatcagcaccctcggcggcgaacggcgaggccgtggtcagtgtgacatcgcggtcctgcgtgctttccacggtgaggttcgcaaccatcacgttgttgtaggtgatgtacttgacttccttgatcttgaggctcttgccaccggtctggaacagggaggtgaagtagctcggcgtctgcttgcgctgggaggcgtcttcgttaagggtctggtttgatccatcagcgtttacggtaacggtgaagccgctcctgctggtctggtcccagtaggcggtatcacccacaaaaccgagctgattaggcgtgtgcgtgtacatgtaggcggcgcgaccacgggtgaacaggtagttgttgccgtcggagccttcatacgagtaagcacccttgtcgttcgtgcctttaccagttggctgtgcaccagtacgggtgagaatcttatcgatccagaagtcatggtcggtgtcgatgccggccaggttcttcacgtcgttatcgaatgtctcctgcagatagctgacggcagggttatatgtggtgttgttcgccgccgtcttcatcggatcatcagatcccttgaacgacggatatgccacatccgcattcttgatgacgggcgcatcggctgcctgcgcggtgactgcaccgccggtggccagtgtggcgaccgctgcaaccgcgccgattgacgcaagccaccgctttcgtgttgattgatgcattcctgcttggacctctccgccccggtctttcgcgtcttcgctcaggctacgtcgcatctatgcgaccaggacttcttctgtggatgctgggccgcagagcccgttctccgtcagtttcctttattggctattgggttcaccggaatgagtatcttcagtgaatctggtgtgatatccgccatggatatcacggttggagcaattcaccgaagctgattccacatcataaccgagcgaatacggtttcgcaactttccctcagcgatatcaaccatcttatacaacaaaaacccggcaatttctcagttttcgcatttactttcgcattagagcattgctgcgtttcgccgtggcgcagtacctacggcgcgccgattcagcctcgctgaatcaggaaccaacaggctcccgctggcgggagctggctcgcaaagcgagactgagggtggcttacacggtaccgcttatgaccaccctcagtcgactccgccgacagctctcacagcgggagcatataattaaaaatctcctgcacgggtattaccccacacaggagacctcattccccggatgtgttttcggctccaatcgatactgacatccggcctatgccgtcatcgacttattgcagacgatggcggcataagtattattttgccggccagttgcgcgcaggccggcatatcgccgatatttatcgacgctggaagacacgcatctcgcctatctcgcggttggcccacgagtagtacggcaccaagcgcagcgtcgcgggctcacccgcacgcggttcgtcggcatccacgtacagcggcgcgtcatcctcgtcggcgtgctcgcgcactgccggcaaatcaacggtatcgactccacccagcaagtcggcctggaaagccacagcggcatccgcaccggtgacgccatcggccagacgatagttccacaaatcaccgggattatcgacctgttcggcgcagtagaccagcggtccgcgcatcacggccacctgaccggcatcggagcgcacgcgggagttggcgcgcacgaacttcacggacatgtcgagctcgagcgcaatctccaacgtatcgccggcgttgaccacaaggtatacgaagccgtcttccagcgaacccactgcgggcttgccgttcacggtcagcgtgtaggagccccgcgaccagccggggatgcgcagtccgaaacggaccgagctgtcagtggcgctggcgggcaggctcaccgtgtattccacatggccatcccacgggaagttcgaacgctgctcgaccgtcaggccggaagcgaattcggctgtgttggcgatgaactggtggctcagcacggtcttgccgccgtcgcgctcggtgtagatgtagcggtccacggaggcgatgagtcgggcgatgttggccgggcagcaggcgcagccgaaccagtcgacgcggtgggagagcacgtggtgacggtccgggttatccagtccgtcaggcgtggtctccagtgcattgacgtagtagtactgcttgccgtcgagcgagatgccggcaatggaaccgttgaacagttccttctccagcacgtcggcgtattcgcccttgggctcgaggtcgagcatctgctgggcgaacatgctcatagccacggaagcacaggtctcaccgtacatcgtgtcgttcggcagatcatagtcgtaggtgaacgactcgcccacgtgggtggaaccaatcgcgccggtgacatacatacgacgggtgacgatgttcttccagaaacgcttggcggtgtcgatcagtccccgatcgccgagcagtcggcccacatgggccacaccagtgcacaggtagccgacgcgcacggcgtggccatccgcggtctgctggtcgcgcacaggttcggcggcctggaagtaggtgggcttgtagaagccgaggtcggggaagatgttgtcgccgttcagggccttcagctgcttggtgtagaactgagggtcttggccgcgcacgtcgatgaggtattgggagagcgtcaggtaacgcttttcgccggtttcctcgtacagtttggcgagggcgagttcgatttccgggtggccgtcggcgccatgaatcttgccttcttcgggcccgaagttggcatccaggcagtcggccatcttcttggcgacttcaagggcctgctcgttgccggtcacctgatggtaggcgacggcggcttcgatgtagtgacccatcacatacatctcgtggctttgctgaatcaggctgaagcgcgggcggtcggcccatacgccggacttgatctggtacggagtgtccaagtagccgtccggctgctgagcgcgggcgatgagatcgaccgtgcgatcgcacagcgccttgagttcgggatccggatggtaggccagcgcataagcggcttcctcaagccacttgtagacgtcggaatcctggaacaccatgccgtggaattcgtcgtccaattcgccggcggcaaccttcagattggcgaccgcgtggcttttgctgtcagccagctggttaccggccgggtcgtcgggcactgtggtgtcgatttcgtcgttcatcacgccccactggtaggggatgacggattcgacaatctggtcgcgacgccgcttccagaacggggaagtgattgtaacgttcatgatcagcccttcacggctccagccataaagcccttgacgtagtacttctggagtgcgaggaacaggatggcgcagggaatcagcaggatcacgacgccggcctcagtggcaccgtagtcgataacacccatggtctgctgacgcatgttcaccatcgccagcggcagggtggacttggacgaagagctcaagtacagcggaatcatgaagttgttccatgcttcaaggaaggcgagcaggccgaccgtaaccatcgaaggcttgaccacaggcaccagaatcttgaacaaggcctggaggctgttgcagccgtcgaccatggcggcctcttccatgtccttcgggatcgcgtcaaatgcgttacgcatgatgaacgtgctcataggcagctggaacagggtgatgactaggccgacgcccagcaggctgtcgttcagaccgatgtccttgtaccagaccatcagcgggatcagcagcgaggcgtacggcaccatcaggatggacaaggtgaccatgaagccgaggttacggcccgggtagtcgaagcgggagaacgagtagccggccagtgtgcagacgaccacggagaacacgaccgcgaccagggtcacgattatcgagttgaacaggtacttgggcagaccttcctgataaccgaacagggtcaggtagttggccacgccccagcccttggactgggccgaaccggcctgcgggctgaacgagcagatgatgacccagaccagcgggctgatgaagatgatggcgagcagagcctcaaggattcgagcgatgacgcgcttccacaatggggtagtcataatgtgttacctcccctttctcacttggtgttgtcgcgcatgccgcgcatctggatggagttgatgatgaccagggccaccagcacgatcagcgagagcgccgcggccatacccagatccttcttggaatcgaaggcgaagttgtagatgagctgcaccacggtcatggtggagttgttcggaccacccttggtcagaatgaagaactgatcgaaggcgaggatcgagccggtcacgcagtagatcaggcacatcacgatggtcggcttcatcagcggcagggtgatcgagcggaagatacgccaggaaccggcaccgtccatgcgggccgcctcgtacagatcaccggggatggcctgcagaccgatcatcatcagcagcatgtagtagcccgagaatcgccagacaatcacgataatcgtggcccacagggccgactggccggtggccagcaccgaaccgccctcctgcatcaggcccaacgagctcagaatcttggtgacagggcccacctgcggggaatacagtgcgtagaacagcagggacgcggacgccaggcccgtcgcggacggcagcaggaagcaggtacgcagcacgttgttccacttcgagctctcctgcacgatcatggccatgcccaggcccaggaccagcaggaagaccgtgacgatcacggtgtactccaacgtgaaccagatcgagggccagaacaatttgttctcgaacaccttgacgaagttgtccgggaagttcacgccgcggttgccgcccagcaggctccaacgcgagcaggccatcaccaccagcagcacgatcggcacgaagaacaggacgacgatcatcaaccagtccggcagcgagtacaacaggccgcgacgcgtctcggccgccttcgccttggacttatgcacgggcaccgccccggcgctcttggaaacactcgacatgtttctctctcctttggggaataactgtgaaatggtaatcacggaatccgaatgcaatccgatgtcagggcttcgaggaaggaggactccgaagccccgccaacacaccgcattcaagaggtatgtaatgatgaaggaagaaaaggaatgaagaagaagatagaagttcaattatgtggttgagccggcccctgccctcacaaggaagggaccggctcaatctgttcagttgttattcagttattgctgtgatttgatgagcgatggtgaggagcatcaccaccgaatcactgggcagacaggacgtcggtgacggccttgttgtcggccttgaggtcaccggaaccccacacggcgttctgcacgagcagctgccacggggagccagcggcgttgaaggcttcattgaaggccggggacttcggggtctggccgttgccgtcgatgatcacggagttgatggtctggatgcgcgggtcagcgtcgttgtaagcggtcttcagggtctggatgttggaggcggtgtcgccccggtcagcgaaaacttccttctgagtgtcagactgcatcagccagtagaggaagttccaggcctgagcaacgtgcttggagtccttggagatacccatggcatcgccaccaaggaacgtggaggtcttgccttccttggtgcccgggatcggagcgacgccgacctcgaagcctccgtccttctcagcatcgaacagagcagtggtggaggtgttcgggtaaggcatgacaccgatcttgccgttcgcgaacggagcggtccaagtggcaccggtctcttccttggagcctgcgcccaaaccgttggtggtgttggccagttccttgtaagcgtccagaacgcccttcatggagtcgttgtccagagtggcctcggagccatccttgttcataacggattcaccgtcagcccacacggacgggaagaggtcgaagaccagagcaccaccggactgaccggcgaggtaggaaccggcaacgccatccttgttgagggcggcgaccttcttggcctgctcggtgaactcagcgatggacttcgggccctgctccgggtccaggccagcttccttgtacagggccttgttccagaccatcacggaaacatcggtgatgaacggcagggtgtactcggtgccgtccacggtgccggcctcaatgtggccctgctgcaggtcggccttgttgtccagaccgtcgatctgcttggtgatgtcagtgaagatgccctcggaagcccagtacggaatacggaccacgtcgccggcgaggatgtcaggcagagagtcggtctgcgaagcaccgccgaccttgccttccatatcgtcgttcgggatgatctcgagcttgacctggttcttgtggctcttgttgtaagcctcgaccacgttcttggcctgacgctccagcggggaacgggtccacagggtgatctcggtgccatcgtcggtgcccttggccgggatgccttcggcggtggcggtaccgccattgccggagccaccacaggcggccagcggaacaatcaacgcggcggcagcgatgccagcaagagtacgggtcagtttattgaaagacaccatgttcgcttctttctctatttatccgctcaactatgagaggcggtggcggacggtccgcctccttggtcttcgccctgctcgctcctttgctcggaacaggtaacactgcgaaagccttttctcaatataaacgaacatcgccatttttgcaaaaacgctttcgcactttcgcatattttcgcatatcgaacaggtttgatatgcattttgcgcgattgtttgactcaaacaaacacttatttttagcgctttcttacggcgtgtcgccaaaagccaacatattcgaacgtgaacacaacgctttctttcattctcttttcaatcgcacaaaaatgatcactgcgccacgccaaaaaatagacttgcgaaagttttcgcgtcatgtctacaatagaaaacaatacaaaggggtatcggtacaatcactactttcgcacgaaagagtgcagcaatatactgctgagaaagaaacgaggaatcgaggcattatggcccagacattgaccggacgcgcggcacggctcgaagacgttgccgctttggcgggagtctctttggccactgcgtccaaggcactgcacaacaagccccgcattagcgaagaaaccaagcagcgcgttctggacgccgcccgccagctcaactactcccccaacaaactcgcccaatccctggcccgcggcaccaccggcactatcggcctggtcacctccgatctgcagggccgtttctccacaccgattcttatcggcgcagagaacgagttgcgagcacaatcgacctcagtattgttggccaacgctcgtggcgacgccgcgctggaacgtcagcatgtcaagaaactgctgtccctcaaggtcgacggcctgctcatcgtgcagtgcgaaaccaacccccggcccacgcttggccatgactggggcgtgccactggtctacgtctacggcccctccaccgatatcgaagattgttcggtcacctgtgacaatgtggacgccgggcgcatggccatcaaccatctcatctcttgtggtcgccggcacattgccattatcggtggcgacgaaacctataccgccgccaccgaccgcaccaagggtgcggtcgaggcactggccgagctgggcatcgaaccggccgggccaatccggtacggcaagtgggacgaaggttggggccgcgccgccacccgtctgctgctcgatcagggcgtcacgttcgacgccgtggtctgtcaaaacgaccagctggccagaggctgcattgatgcgctcaagcagcagggcctgcgcattccggatgatgtcgctgttatcggccatgacaactggtctgtgctgacctccagctcgaggcccgcactgacgtcgatcgacaatgaaaccgagaccatcggccgccgcgcggcacgatacttggtcgatgccatcgaaggcaacccccatcacggtgtcgactacgtaccctgccgccttatccagcgcgaatccaccctcccgctggactgatatcactcgagaccctatcgcttcttggttttgcggccctttaagtagatgtcgatgacgatccatacgccaagggcgaaggccacgacgtagcccatgaagccgatgaccggaatgccgaagataatcggcttcatgccggcgtagtagacaatcgacgagccaacgaacaaaccgaccacaatcagggccatcgtcagacgattcgccatatccgaaagcagctggaacggctcttcggagccgaccagttccatgttgacgcgcaactgaccacgggtcagcatacgggccacggtcttgagttcggtcatggtgccgagcgtggcatgcaaagcctgatgcccctcaacgcccagcgacttgatctcgtctttggtggcgttcttcagcgatttcgacgtggcgatatggtcggagatgatttcgatcatattcacatcaggaatgaactcgtccagcaagccttcgagcgtaaccaacgcgcggccgacggtggtcaccgtactgggcacctcgatgttgtggcggccggccatctgcgtcagcgcggtcaggaaggcggcgatgtccagttcggccagatccacggtgccgaattccttgacgatcacgtccagatcagccagcagtgctgggtagtcctccggatcggcctcggtgccggcgaatcgcagcagcccctcggccagagcgggcgaatcctgtttggcgacggcgaaaatcatttctttgaggactgcacgggtgcgctggtcgagccgaccggtcataccgaggtcgataagtacgatctggccgccccggatgaggatattgccgggatgtgggtcggcgtggaagaagccgtcgtcgagaatctgtgtggcgtaattgtcgacgagcttggtgccgatctccttcaagtcataaccggcgtcgatgagctggcccgggtgggagacggagatgccgtcgatgtactccatgaccaccacatgctcggtgcacagttcggcgtacaccgtcgggcagtccatgtatttgaatcgggcggcgaaacgcttgaattcggcgagattgcgggcctcgatcagaaagtcagtctccgattcgaaggtgtcccacagctcctcgaccacgcccttcagatccacgatctgcgaggtgcgaatcaccttagtggcggccttggctatggagcgcatgatggagacgtcctgggccatgatttcgcgcacacccgggcgctgcactttaatggccacatcttcgccggttttcagcgtggcgcgatgcacttgcgccagtgaagcagagcccaacggcttgggatcgatatgcgcgaacacctcgtcggcgggacgcccgtattcggcggcaagcacatccaacaccgtggaatacggcatcgggtcggcgtcggcgcgcagtttggcgagttcgtcgcagaagctttgcggcagaatctcggagcgcatcgacagaatctggcccactttgacgaacgtggggccgagcgcctcgaacatgaggcgcatcttgaccggagtcaggccgtgcagcacgtcgaattgctcgacgattctggtgatctgccccagtcgtttgatcttgccacggcgcgtcagatggtagcgcgtggcgaaatcgttcctgcgtccgaacaatgccagcgtttcgtcggatacgctcggagtcgccttggtaacggtctgcttgagcgtgtccgacgtgtcgacggaccggttcgctgccgcctcacgttcggctttcacaggcgtcagaatagggtcgaccctgctggaaagcggggtcgaccctgattccggcgtagtgcgtgtgggcttggtcactcggccttgccctcgtcggcgggcttgtcggcggcgctggtgtcggctgcggcagcagctttgtcgccggcttcggcggcggccttcttggcgtcatccaccgtctcgctcaccttgcgcttgagctcggtgttcagcgccttgccctgctcgaccgtaatctcacccttcttgacgagttcgtcgacgagctcgctgctcttctcatatccggtggcaagggctccgatgcccgccagcaggaccttgcgcaggccatcacccagaagatcaaaatcagccatgatacccctccttcgaggtccgacatggcctggtgccatgtctcgtaccaccaagcctagcgcaaacaacagggcaatgtactagaccctcagactgatttcgactgatttttcgctgattggtacttaccgaggactcaccgagaattcaccgaggacgttcggcggcagccttgcgcgcgttggtggctacttgatcaagccgggcgagctccttggcttgttcgggggtctgatcggacgtatcgaacgtaccgtaacgacgagtcacggcggtttcgataaggaaatcgctgatggcggggtttttaggcagcaacgagccgtgcatgtaggtgccgatcacgttgtgcactcgcgcgccctcggtatggtcttcgccattgttgcctcggccgtcctgatcgacggtgccgagtggctgaacgccttcgcgcaggaaggtctggccggagtggttctcatagcccatcacatcgccgaactggtcggaatgctcaacaagattgccgatcatacgcacgttctggcccacggtataagcaccgataacgccgatgccgtccagacgggtgccgtccacggtttcaaagtactcgccgaacagctggtacaggccgcagatcatcagcatcggtgtaccgtctgcggcaagcgaacgcagcaggtcggcgcgatggtagaagtcgtcgatgattttcttctggccggtgtcttggccgccgcctcccagaataaggtccacctggtcgggccaatcgtcgccttgattgtactggtgaacgaccggttcgtaaccgtacagttccagacggcggcggatagtcagcacgttgccggaatcgccgtagatgttcatgtctttgggatacagggacaccacatcgattgttctggccatgtcacgttctccttgtcgatgtcttcccgctaaggggaagtcttattcctcaccatgtcctcctgcaggcgggaggtggcgcgcgggcgctagagggtggttacttgcccacgccagcgtcccgtacttcggtgatgcggcccagtacggcgcgggttttgagcatggcggtgtaggtgcagtagatgtgcttgcgtgtgccgggattggcgttgacgaatgcggtgaccgcctgttcgaggtcggtgttcgtatcggcgactggcacttggtcataccccaagcgcaatgccatgtcccaggcgcgcacgccggagaccatggcgacaccggacgcgcgcaaagaggtgaagtccacgtcccatagccagctcatgtcgcggccgtcggcatattcgtcgttgatggcgatcatggtgtccgcgttggccgggtcgaagctggcgagcgagaggcggaagcccatcgggttcttgaccagcagcagttcgaccggggaaccgttgacgtcgatgacctcgccacggccgaaagccggcgtgacgcgggaaacggcggcgatgagctcgtcggcggacacggcgcaggcgttggctgcggcggtggccttggatgcggcggcattgtcttgcatcaccgcacgtaccacggcgagcgcggcggccgcgttgtacaggttgtagacgccttcaagtttgacgtcggtggcgtagtcctggctgtccatctggaaggtggccttgtggtcgcccacggcggtaagtgtcacgtcggcggggagttctgccgtgcctgcggaagctcccctctccgaggggagctgtccgcgaagcggactgaggggagtactgactgaagggagcggcccggccataccttccaccgacacggtcgtggccatgtcgtcatcggacgggaaatagtggcgcaaatcgtcggcgaggccgaagtatcgcactgtggtgccagccggggccttcgcggcgagcgcggcgatacgcgggtcctcgcggttcagtaccacagtgccggtagtcgccgcagccacatggctgagcagtttggccgtggtgtcgatttcaccgaatcggtcaagctgatcgcgcatcacgttcagcagcaacgcataacggggcttgacctgcttgacgaagtggacggcgtacgcctcatcgagctcgagtacggcgatgtccgcgtccaatttgccgccgaaagtgacttcggtgagcagtgcggagaccacgccgcgcacgaagttcgagccggtcggattggtgaacaccttcaatcccagatcggagagcatcgaggcgaccatgcgggtggtggtggtcttgccgttcgtgccggacaccaataccacgccaagcggcaactgcccgagcgtacgggtcaggaagccggggtcaatcttttctacgactttgccgggcaaagccgaaccgccatgtttggtgacgcgggatgcaaaccgcacgaagcggcctgcggccacggtggcgaacgcataccacggtttgcgggtctgcaccacggacgattggtcttgcgaaacatcgcgtgaaacgttgcttgccatcatcacaccccctgattgctgttgtagtcctgcggcatgtccttgaatttggacgtggcaccgaggaaggcgaggtggaaggtttcggtcgggccgttacggtgcttggccatgatgatatcggcctcgccggggcggtcttccttgtcgtagaagtcagggcggtggaccaggaacaccacgtcggcgtcctgttcgattgagccggattcacgcaggtcggagagctgcggcttcttgtcgttacgcatttccgggccacggttcagctgggaaagggccacgaccggcacttcgagttccttggccaagagcttcagggcacgggagaattcggacacctcttgctgacgggattccacggccttgcccgaggtcatcagctgcaggtagtcgatgactacgagtttcagatcgttggtctgcttcagacgacggcatttcgcacggatctccatgaggctcatgttcgggctgtcgtcaatgaacagtggcgcattctgcatcttggtccagaactggttcagggtgttccagcgttcgggggtgatgtcgtcggcgcggcgcagggcggccatcggaatattggtttcggcggagataatacgctgagcgagctccaccttgctcatctccaagctgaagaccacggaagtcatgttgtggtgcaacgctgcggcgcgggcgaagtcgatgccgagcgtggacttacccatggccggacgtcctgcgacgacgaccatctgtccgggctgcaggccctgggtcacgtcgtcgatgtcgcggaatccggtcggcacgcccttgttgacgagaccctgctgcagtttgtccagctggtcgagcgcgtcgtggaccaccgggccgatggcggcatagtcctgacgcaccttgcccatcgacatctcgtagatctcggactgggcgaggttaaccacatcctcagcctgcgatccctcggcggaataaccgagctgggcgattttggtgccggcggcgatcacattgcgcaaaatggcccgctgatggacgatctccgcgtagtacatggcattggcggcggtcggtacggatgcgacgaggctgtgcagatagtccgcgccgccgaccttgtcgaggttgccatccgccaacagctggttggccacgagcaccacgtccaccggctgactggcggaaaacagatcgatgatcgcgttatagatcgtctgatgcttgggctggtagaaatcggtgacgtcaatggtctgcgaaacttcgccgatggcatccttactcatcagcatgccgccgagcacggccatttccgcgtcgtcatcgtgcgggggcactcggtcgaaaatcgggtcgccgaccgccgccgacgtctgcgcgccgccccggcccgcgcggtcgccacgatcgccacgatccgagccactgccgaacccattctgatacgagtgttcacttccttctgccatagccttcaagtataggaggtggcgtggcgagcggaagatatcgcacgactacgttcattaggtcgattcctcactcattaggtcactgtgcttggtaacaccacaaaccatgcgcttggaatggcggcattctgaggcgctcgatcaatatctctcaaagtccaccgacctaatgaatgcacaatcgacctaatgaacgcatgaaagtgcaagtcgtgccgaatcatcgcgcaccaatttcatcgttggttcaccttgcggtcagcgcggcgacacgctgaagcgtcaaatgtggatagaaaaaatagttatccacattttggggataagtctggggataatccactcatttatccacatattggggataacttggtggacaagctgaggataactttgtacggctgcactaggtgcttgcgcaacgtagctaagcatgatatgcgtgtgagcgtgcatagcaactccaccagcattcatcgccaaatcattgcgttggcgctaccgacttttgggcagctcatcgcagaaccgacttttatccttattgacaccgccatcgtcggtcacattggcgatgccgctttggccggactgtccatcggatcgaccatcatcctcacggcagtcggactatgcatattcctggcctactcgaccactgcgcaggtggcgcatctgctgggagcgggtcgtcgtcgcgagggactgcaggcaggcattgacggcctgtggctggccttgagcatcggcaccgtactgggattgggattgttcgcggctgccgagccattatgccgggcactgggcggtcagggcgaagtattggaacaagccgtgacctatacgcgcgcaatcgtgctgggtgcgccaggcatgctgatggtatatgcggcgaacggcattttccgaggattgcagaagattcgtatcacgctgatcgctgcggtgggcggcgcggtggtgaacacggcgcttgatgtgttgttcgttattgtgctgaattggggcattgccggctccggagtggcgacgctgatagctcagtggttcatggggctgttcctggtaatccccgccattctgtggtcccgggcggacggtgcgagtctgcggcctcgtttggccggtattgcggcagccgggggcgacggactgccattgttcattcgtacactggcgattcgcgcggcgatggtgaccacggtcgcctgtgccgcgcgcatgggtactgccgtgttggccgggtttcaggccgtgaactcctcttggaattttgcgatgaacatgctggattccgtgggcatcgccggccagacgctggtggccacaacgctgggcgctggcagcgtgcagcaggcgcggcggttgacgcgggcgaccgggcgtgtggggctggtcaccggcgcggtaatcggcacggcttttgctgtagtcggcctgttcgccgggcacttcttctcccctacgccaaatattcagacgttgattgccgttggcatggtgacgatgggcatcttcttcccactgcaaggctggatgatggcaatcgacggcattcttatcggcgcgcgcgactaccgctatctggcaggcacctgcacgctgaccgccgtggtgtatgtgacgctcatactcatactggccaatatggtgacgccggcgctgacgagcgacctgatgcgtaccgccgtgctctgggccgcgttcaacgtggtgctcatgggcgggcgcggcctgtccaacgggctgcgcgtgcgctcggacgcatggatgaagtaggtatcggccgcgcgaagtgctgggcgattccgtttacatcgcggcgcgggcggcggaatacatgccgcgcacgatttgttcgcgccacttggaccagccgtattgcttggtgatggtctcaccggcggtggcaccgagcgaggagccgtcggcccgggtcaggtcgaacagcatatccaacagcatcttgtcgtggtgcaagcggtcggccaactcctccgccacggccggatcataggggtccttacccgtggcaaattcggatagggtcaaatgctcacgcaccagcacggtggcccagtcgacgatgtccggcgcgtagcccatacgcttgagaatcaccggcacatggcgggcaccctcggcggcgtgatcggccacgaacgcgcgcttgccgatgtcatgggtaataccggccaacagcaacgccttgaaatgatcgtcatcataccgtcccccggacggtgtctcacgacccagacgcgacgtgacctccaccatatgccgatcgatggtgtaccggtgggcggccgaggcggacggacggttgcggacgccgagccattccggcatccatcgacccggaatgtccacgaagtcgatgctctcccacacttccataagattcggcccgcatgcaagcagacgaataaacagctcgcgcgattcgtcatcccactggttgtcgtgaatcgggcagtgcttcagattaaccaaggtagacgggttgatgggcaaaccgaattcgccggccgccacggccatacgcaacgccagcttggcatccttggcaggctcggcaccgggtgccaacaccaattcgccttcgtgcttggccacgccgggagccaccacgtcgaattgcggggcttcacgcttgccgccagagcgctgagagaacatctggaagaacgcgaatcgcggcttttcgtgggtcagcgaatgttcggcgcgggatgcggtggaatcaagcgagaaggagatgcgccggccgatacgggcaagcagtgtctgcaaatcgtcgatcgagtaggcggcacgctcgttttcgggccaagtcggatcggcgaggccaagcatggcagccactttggcctgatagggcgtcagcatcaggttggtgtccttgccggccaccagatggatgcagtcgcgtacgtcgagcagacgttccacggcttcgtcgtagatgccgtgcgggcggtcggccagccatgaggcggcgagcgcggagacgagcaccgcatcgcgcaaacccccacgggcctccttgatgtcgggctgattgacgtattggagccggccgaattcgtcgagtcgggctttggcagagtcgagcagttcgggcaggcgcttgcgggcggccttgcgccagcgttcgaggatggatgtggcggtggtggtaatcagagcggtgtcgccggcgatgggcttcacgtccagccagcccatggcggcgggaaggtcatggtcggtgacttcctcgcattgggcgcgcgtgcggatggagtggtcgaggtccagaccgctgtcccatagcgggtaccagagtttgttggccaactcgttgagctgctggtcgttcaacgtgcgaggctcgtagatgatgaccaagtcgaggtcggagctggggcccagttgaccacgtgccagcgagcctaccgcggcgaagccgatgccggagtcgggcacagggaaagagacatccttgcaggccgcattccacagctccgtgaggcattgcatggccagttccgtgcgggctttacgcttggtcgcaccattccggtagacaccatcgtcatccggctggctcatatccatgaatcgttgtttcaagccatctactgctgaagtcattgcttcatctttcattgccaaaaaggtccccgcacggcgtcaattcgcggcgtgcggggacctttcccatgcagtccatccccttctaggcatggacgtctgtgttatcagatcgcggcggaaccggtctcaccggtacgcacgcgggccacggagtccagcggagcgacccacaccttgccgtcaccgatggtgccggtgccggcggacttgatgatcacaccgaccagcgtctcggcatccgcgtcatcggacagcacttcaacgcgaatcttcggaatcaggtccacggtgtactcagcgccacggtagacctcggtgtggccgcgctgacggccgtagccgttggcctcggacacggtcagaccgtgcactccggcggccgcgagggcctccttgacgtcgtcgagcttatggggctggatgatagcggtgatgagcttcatctcacctcacctccttgagaacagagctggcagtaccagcaaaatcgtaagcacgttcgccctggtcggcaagatcgatgccgccgacttcctgagcttcggtgacgcgccaaccgatggtcttctccagggcgaaggcgatgatcgcggtgatcaccgcggagtagaggatggcgacgagagcgatgaccagctgaacgacgagctgcttccagtcgccaccagccagcagaccagtgccttcaccgaagaagccgatgaggacagtgccggtgaaaccaccaacgccatgcacgccgacgacgtcgagggagtcatcgtaaccgaacttgaacttgagaccgcaggccaggcaggtcagaacaccagcgatggcgcccatcacgatggcccacagcggggaaaccacatcggcggccggggtgatggcaaccaggccggcgaccatacccgaggcggcacccatagcggtgtagtggccggagcgaatcttctcggtgaagccccaagagagcatggcagcggcagtggcggcggaagtggagacccaagcgtagccagcggtgccgttggcagcgaaggcggaaccagcgttgaagccgaaccagccgaaccacagcaggaaggcgccgagcatcacgaacggcacgttgtgcgggcggaacggctgcgtgccgaagcccttacgcttgccgatgatgagcacgataatcagggcggcgactgcggcgttgatgtgcaccacggtaccacctgcgaaatcgtgggcggccgcgccgatagccttggagatggcgccgtcagcagacagcagaccaccgttccagaccatgtgggccataggagcgtagtcgaaggtaacccacagcgccacgaagatcatccaggtgctgtacttcacacgctcggcgatggcgccgcagatcaggccgacggtaatcatcgcgaaagcgacctggaaggcaacgtccacggaaaccgggtagttgttgtcgttcagaccggtggcggtgaacacgccgtcctgcgcgaccatggaatccttgagcaggaagccgctggccgggtcgccgaaaataccgccgatgtcggaaccggcgtatgcgatggaccaaccccacaaagtccaaataatcatggtgaccgacagcgcggccgcctcaagcatcagcatgttcagaacggccttggcacgaaccataccgccgtagaagaacgccacaccaggcgtcatgaggaaaaccaaggacgcggatgtcaggatccatgcggtgttaccggaatcaatcgctcccatgtctacctccctctctttcattcagggcaccgggggctttgtgcggccggcgtcttatttgtctctacaatgccgtcccccttatgggggctaacagtttgtcagttaaagccggtctcgttttggtttcgttacgccaagttacgcgattgttaagcgtggctggaagcgtacgtgcgaccactcgaggaaattttggcgcgattccaacggatatgacgaagccccgaccatgtttcgagcatgattcggggcttggtttataggtaagtcgcgcgttttgcgctctcacaacgtggacgttggcttacgcgagaatgccgtccacgaaaccttcaggatcgaaaggtgccaaatcgtccgggccttcgcccagaccgacgagcttgaccggcacgccgagctccttctgcacgctgatcacgatgccgcccttggcggaaccgtcaagcttggagagcaccacaccggtaatgccgatggcttcggcgaacaccttggcctgggccatgccgttttggccggtggtggcgtcgagcacgagcagcacctcgtccaccggcaggttcttttcggtgacgcggcgaatcttgccgagctcgtccatcaggttcgacttgttctgcagtcggccggcggtgtcgatgatgagcacgtccgcgttcgcttccttggccttggcggatgcctcgaaggcgacggatgccgggtcggcaccgtccttgtcggaacgcacgaccggaacgccgaccttggcgccccaggtttccaactggtcggcggccgccgcgcggaaggtatcggcggcgcccagcatgacctgcttgccttcggaaacaagcaggcgggaaagcttgcccgcggtggtggttttgccggtgccgttcacaccgaccatgatgacgacgctcggcttgttcgcgccgtccttgtcggcgttgagccggcggtcgatgtcagtgccgacgagcttgagcagtttgtctttcagcgccgcgcgcacttcggccggatcggactggcctgcgattcgggcgtcgttgcgtagttcctcgacgagctgttcgctggcttccgcgccaacatcggcgagcagaagggtgtcttcgacgtcttcccaatcggcttcggagagctgatccttcgcaagaatgttgaacagggccttgccgaacggattgccggatttcgacagccgcgccttaagacgctgcatgcgcgtgccggcggattcgggggtgtcatgaaccggttcgggcttggcttcggtggctggtgcaggagccgccgtttcggaagaggaagcttgagctgaggacttctgctgactttcagccggagctttttcagctgcatcaacattggaatcaacggacggcttcaccgtggaagaatcagatgcggccgactccgcttccgcagcaagacgggcgtcggccttggctttcgcggcttcggtggacttggccacggcagccttgcggctcttgccgaaccaccatccgccgatcaccagaattgccgcgatgacggcgacggcgacaatcgcaataatcacattcgtatccatggctccagcctaagaagcgcaacggacacaccggctccgccccgcggacgcaccacgaatgtccgattcgccagggggataaggtgctctgccatgcaaggcatcgataatgcgatcttgacttcgatacatctggtgacgtttttatagatcatgaagagtgattcttttgtcttccgctgtctgctttgaaggactgcctcctttctttagggaatttgcgtagcgaatcagactcctcgcgatgaggaagaccagaacgaatacggcgattacgcctaggtctcaatcaataatgcaatccatgtccagctcatgattcatcctttctctttctgtactcgtctatgagtattcgagccgtgtcgacgtcgtatctatcgtcaatggcgagactcttcaccaagaggatgaatggatcctccgtatcgttgtcgttcaaccgtattttttcgataagcctgtcaagccggatcctcatggtcgggtaggagacttgatacagctgggacatttgcttcagagatcctgacgatagcacgaagttcttgatgaaggccaaatcctcctccgtaaggctggccaaccattctggtagacgatccacatcaccccctttaataaaatttattatttattaaatatattaaagccgcgatgaagcattgtcaatatgacacacatgtccgattcaccagaatcggacgatacgtgggggcggacggtcagggagctatccacggggcgtgaaaaactggacagcatggccaatacatccagaatgacgtcgtatcagcggcgcgagcagctcatcgaaatcggtcgttcgctgttcgcgtcgaagggttttgaagcagtgagcgtggaggagatcgccgccaccgcaaaagtatcgaaacccatcgtatatgagcatttcggcggcaaagagggcctgtacgccgtcattgtggaccgtgagatgcgcgcgttgaccagtgtgctcaccgccgcgcttgacgatccgaccgtgcacccacgccagatcgtggaacgcaccgcactcgcactgctcacctatatcgaagaggacgccgagggattccaggtgctggcgcgcgactcgcccagcaccgaaccgtccggctcgttcagctcactgctgggagacatcgccgtgcgcgtcgaagacatcctttccgaaacgttcaaacggcagaaactctccaccaaaggcgtgccgtactatgcgcagatgctggtgggcatgaccgtgttcaccggccagtactgggccgaccggcccaaggtgagcaaggagcagctggccgcgtacatcgtggacctggcatggcatggcctgagccggctcgattccaagccgcagctgttgtttgaaggcgtcaaggcccggaaggaggccgagcgccgggccaagcgcgggatcgatgccgaaacaccggccccggacggcaaggcatcatcgcccttagagcagacggacctcgaccacacgctcagggaagattcagggttgcagaatgtgagttcaggggcacaggttgcgcaacactctgccgagtcgggagacgaagtgctacggtttgaacaggaaactgaacataacgactaaatatgtgaggacgtaagactttcatggccagcacggcaaagacgctcacctttgtgatccccgcatacaatatggagtcctatctcgaccgttgcgtgaactcgctgctttcggcgaacgacacccgcgacctcgaagtgctgattgtggacgacggttcgaaagacggcacgctggagtacgcgcgcaaactggaacgcaccaatccaggtgtcgtgcgcgcgattcaccaggagaacaaaggccacggcggcgcagtgaacaccggtatcacggcggcgaccggcatgtatgtcaaggtggtggatgcggatgattgggtcgacccgcaggccatcgacacggttctggccacgttgcgcgcgcaacgtgaggccagcgagccgatcgacatgctggtgaccaactatgtgtatgacaaagtgaccaagcgccacaagatcgtggtgaacttccgtcatgtgatggaggccggccgcgtgctcggctgggatgacctgggcaagttcggtctggcgcagtacatcatcatgcatgcgctcactttccgcacgcaggtggtgcgcgattccgggctgaagctgccggagcatacgttctacgtcgatttctattactcgtaccagccgttcccgtgggtgaagcgcatccagtatctcgacgtgccgttctaccactacttcatcgggcgcgagggtcagagcgtgcagaccgacgtgatgattaagcgtgtggatcagctgcggctcgtcaatcggctgatgaccgaggccacgcccgaacgtggtacggtgccggaggggctgtaccggtacatgattcacttcctgacgatcgaatcatgcgttacctcggcgttcctgattctctcgcgcgatccggccaactacgttaagaaaaccgagctgtgggatgcgattgacgcctattctccggccatcggcaaggatgtgcgctcgaagctgatgtcccgcgcgctcaatctgcctggtaaaaccggccgctggatcgtgcgcaacggctatctcatcgccgaacgcatcgtcggcttcaactgattcggattgcggctttgccctgctgacgcgttatcagcagggcatccctattacctccccagccgaggtcttgctactcggcccaacggtcggacattgcgaagctgttgtgcatcaggttgctggaggtgtatagcacgtcgttcagcagcttggttgtatgctcgcgcaggtagtcggccatctcgtcgttggccgcttcgagcacatccgccacgccctgcacatccttctcatcgccgtggccgccatcgagcggccatgcattcgtacccgtcgattcggcatcgcttcgagcaagcaactgctcatccgtgcgctcgatgagccggtgcccgaacgcgcgcacgccttccgcatagccctcgatgaaccggttcgtctcataccaatgcgcgtcggccacgacggcgatcaggcggttcgtccaatacaggttgccggtggagacttcgggcgtggtgtcgcgcaggtaggcaggcgtgtcgttgacgttcgcgtagaacggcgcggcggcggtgaacggaccggagccgaacgatacccacatcaccgtgcgattggccgccggcacatacgggcggacctgaatcgccaccatatggccggtgcgattcacgccgatcggacggtaacggtggcgcgattccgccgtgccggtcgtgccgtacgggtcgtacggcgtgccttcgaagtgcgaggacagcaggaaatcaacgtcttcgaggctcaccttgtcttccggcacgcggcaccacgggatgtcgtcggattcgggcgtgtagcgggcggccggcgaatcccagtcctcgctggggttgaggcggcgttgcatgtaccaggcacgcggcgtgttgtagatatggtccttcggcgtcgcggtgccgaaggccttgcgcgggttgaagcgggtgggaagggcaacggttgttccgaatccggcgctatgcacgtgacggccgttggaagagaccgacgttcccattgtgcggtcaaggtgatgcgtggccatgaactcgcgcaggtcggcgctgcataggtattcgcgctgctcgccgaacgcatcggcgaggtcgaagtcgtcgatgccgagctggttggggatcgtggcatagcagtcgtcgggcactcggcgggcgatccaatgatggccgccgatggtctcgacgtaccagatctcgtccgcatccgaaataatcacgccgttcgattcgtaggtgccgtaggtttcgagcagttcgcccaaccgcgcgacgccctcgcgcgcggtggtgacgtacggcagcacaagggtgatgatgtcttcctcaccgataccgccgggctgctcggcctgataatcggtgctgtccggcccgccgacagccggccgcaactcgaccatcgggtccgcaccgagcacgcgctcgttgacagcgatggtttcggtggcgctcatcgccacgttgtgttcgttggcaccggcttcggccagaatgccacgattattcagcacgttcggtgcgatggtgtaccggcaaggattgtccggtagttcgatttcgacatggctcagcacgctgcggtagtggcgcggctggtcgtcgggggcgacggcgacgaagcgcttgggatcgtaacggcccgagcccgaatcgtcatcgcgggcgatgatggtggaaccgtcgtaactggcatttttgccgacaagaatcgtggtgcatgacatggggcaccactctaggagctaggctggtcgaaacaaaaaatccttggaaccattgcgattccaaggatttgttgtgccccctgtgggattcgaacccacaacccacgacttaaaaggacgctgctctaaccgttgagctaaaggggcaactcttctaaaatacacaccgttttgggatatttcaactacggcgttgcgtacacgtttgcgtacgcgattggcccaacgcacggcacagcacacgcaatgtggcccaaatcgcagcccaaatcgcatatcgcctttagcgatagatagccgccggcggctacccttgtacattatgagtgaatcccccaattggagcaatcccctgcgcgactcgcgcgacctcagactgccccgtatcgccggcccgtgcagcctcgtcattttcggtgtcacgggcgatctggcacaaaagaaactgctgccggccgtctacgacctggcgaaccgtggcctactgccgccgagcttcggcctgaccggcttcgcccgccgagactggacacaggagcggttcatcgaattcgtcaaggccgccgtccgggcgcattgccgtacgccgttcaaggagtcgacttggcgcaatctggccgccggcatccgcttcgtgcagggtacgttcgacgatccggaggccttcgagcgtctgagcgccaccgtgcaggagcttgaccgcgaccgcggcacgcagggtaaccatgccttctacatgtcggtgccgccgcgcgccttcccgcaggttgccaagcagttggccgcctccggcctgtcgcgctcgtccgagggcgcatggcgccgcgtgatcatcgagaagccgttcggccatgatctggccagcgccaaggaactcgacagcgtggtatccgaagtgttcgacccgagctccgtgttccgcatcgaccactacctcggcaaggaaaccgtgcagaacctgctggccctgcgtttcgccaacgccatgtacgagccgatctggaacgccaactatgtggaccacgtgcagatcacgatggccgaggacatcggcatcggcggccgcgccggctattacgacggcatcggcgccgcacgcgacgtcatccagaaccacctgcttcagctcatggctctgaccgccatggaggagccggtgagcttcaccgccaaggacctgaccgccgaaaagaccaaggtgctttccgccgtgcgcctgcccaaggacctcgccgccaacaccgcgcgcggtcagtacgccaagggctggcagggctcgcacgaagtggtcggctacttggaagaaaaaggcatcgaccccaagagcaccactgaaacgtacgccgccatccgcctcgatatcgacacccgccgctgggctggcgtgccgttctacctgcgttgcggcaagcgcctcggcaagcgtgtaaccgaaatcgccgtggcgttcaagcgcgccccgcatctgccgttcgagcagaccgccgtgcgcgaactcggcaagaacgccatcgtgattcgcgtgcagcccgacgagggcgttaccatgcgcttcggagccaaggtgccgggcggctccaccatggaggtccgtgacgtgaacatggacttcagctacggccgctccttcaccgagaactcgccggaagcctatgagcgactgattctggacgtgctgctcggtgatccgccgttgttcccgaccaccgaagaggtgaacctcagctgggagatcctcgatccgattgaacaattctggtccacgcttggccagccgcaggcctaccgcgccggtacgtggggtccggcacaggccgacgaaatgctgacgcgcgacggccgccactggaggatgccatgatcatcgatatgccgaacacccgcacccgcgagattgcgcacaaaatcgaacagctgcacgaggagcgcggcgaatcggcgaccggccgcgtgctgacgctactcatcgccaccgaggacgcggacctagagcatgcgctggaaatcgcgaactcggccagccgtgagcacccgtgccgcgtgattgccgtagtaccggatgccaatcctgccgatcagtccggcgaaggcgaaccgaacgagaccgaagtggccgccgaggtgagcgcgaatcgcgataatccggccgtcgatttgaccgacggcccgaacgatccgaacgattccaatctgaacgcccaagtgcgattcggcgcggacgccggtgccggtgagattatcatcttgcgtccgcgcggtggccttatcaaccacccggatacgctggttatcccgctgcttgtgccggatgcgcctgtagtggcgtggtggccgaccacaccgccgtcgaacccggccaaggatctgatgggtgcgatggcccgcagtcgcatcaccgacgcgctgcactccaataatccggaggccacgatcgagcgtttgcgccgcaattggacaccggaagacatcgacttgtcctggacacgactgaccgtctggcgcgcaatgctcgcctcgatgctcgatcagccgccgcacctgcccatcaccgccgtgaaggtgaccggcaaggccgacttcctgcctctggaaatgctgtgcgcatggctgcgtctgaaactcggcgtaccagtcgaaactgagttcgtgcccgacgcgcaggccgtgaccggcgtgtacctgacccgtgaggacggtgtgatctcactggaacgcccgtatgaggaccaagcgctgatctcgctgcccggccagactccgcaggaagtgtccgtgccgatgcgcaccatcgaggactgtctgaccgaggaactgcgccgcatcgatcccgatgagatctacgccgaggtcatcaacgaaggctgggatctgattcgtcactgaagtcggtagaaccgttgccacagcggcgttggcatgagttcggcaattgtggtcgagccatgccaacgccgttgctcatcgtttcctacctcatgcgatgccgaagctcatgaccgcggagtaataaagtgacgtatgcgatgtcgcacaatgtacattgtgttgtcaactgacaacacatttcattgctgcaaatggctggattcccggcatgccacccgtattatgcgttgtcaactgacaacacaatccacattgcaaagtacgacacataccccatataaggaccatacatggcaactcgaaaactcattgtgtatccgaataaagatctgatgattcaggctggcgcgcaacgttttgtcttggcgctactcgatttgctcgccgaacgattgcctgatggcacgcatcgcacacgtgtggatgtggcgctgtctggcggttcggccgcacagccgttgggtttggcgctgaacgatccactggctgatgcggttgattggtcacgcgtgcatttctggtggagcgacgaacgttttgtgccggcttacgacaccgatcgcaatgctctggaggcccgtcgcctgctgcttgaccagctggtggcggatggcaagctgcctgaatcgaatattcatgagatggcggccgatacccgttcagccgatgacatcgccgatgtgatggatcaggccgatagtgatgacgcttccgttcgcgccgccgccgatgccgcgaatgatgcgctgctggacgatgccgcgagcgactatgagcgcgagttggtgaatgaattggggccggaaccggtcatcgatctgatgattctcggcatgggaccggacggtcactatgcgtcgctgttcccgggtcatgatgaggtcaaggttaccgataggctcaccgtgggtgtgaaccactcccccaagatgccgccgttgcgcgtctcgttgaccgcgccgctgattgcccgctcgcgccgtacatggttcttcgccgccggtgccggcaaagccgaatcgctggcccatgtcttcgagcggcccaacaacccggattacccgtcctcctacgccaacggagtggacgagttcacctggttctccaccgaagaaaccgtcaccgagttgtgatggcgcctcctgtgggccggaccctgaatgaggggcccggcccacagattgtcgcagacgctcaagcctgctgttcctcgggctggccttcctgcgcccagagggtgtggaacacgccgggcttgtcgacgcggccgtaggtgtgggcaccgaagaagtcacgctgggactgggtcagggcggtgggcagacgcttggagcgcagaccatcgtagtacgccagggagctggagaacaccggggtcgggataccggcctccacggcacgcacgattacacgacgccatgcatcctgcgattcgccgatgatcttctcgaagtacggatcgaacaacagggaagccggcaaattatcgcccttgaaggcctcggtgatgcggtcgagcaggaactgggcgcgaataatgcagccgccacgccaaatgcgggccacttcggacaggttgatatcccagccgtattccttagcaccgtcctgaatctcgttcaggccctgagcataggccacgaccttggaagcgaacagggccttgcgcacgtcctcgacgaacgcggccttgtcttctccggccagatcgatggtcttgttcgggccagccagaccttctttctgagcgtcttcacgcagctcaccgtgcgaagacagtgcacgagtgaacacggcttcaccgatagcagccacaggagaaccaaattccagaccagcctgcacggtccaagtaccagtacccttcatgccggcatgatccacgaccacgtccacgaacggcttgccggtctcggcatccttgtggtgcagaatctcagcggtgatctcgatcaggtaggagtcaaggtcgcccttgttccattcagcgaacacgtcgccaatctcctcggtatccatgccgagtccacggcgcagaatgtcatacgcctcaccaatcacctgcatatcggcatactcgatgccgttgtgcaccatcttgacaaagtgaccggcaccatcggtgccgatgtgggtcacgcacggttcgccgttcaccttggcggcgatggactgaagaatcgggcccaaggtcttccaggattccacagtgccaccaggcatcagagacgggccgttgagcgcgccttcctcaccaccggacacgccgcaacccacgaagtggaagcccttggcacgtacttccttctcacgcttgatggtgtccttgaagaaggagttgccaccgtcgacgatgatgtcgcccggttcgaacacctcttccagctgcgcgatagttgcgtcggtcggagcaccggccttgaccatgatgatggcggtacgcggacgcttcagggacgcggcgaattcctcgagcgtttcggccggcacgaagttgccttcggcgccatgctcgttcatgagcttctcggtacgcgagtagtgacggttgaacaacgccaccgtgttgccatggtgcgccagattacgcgccagattggagcccatcgtggccagtccaatcacaccaatgtttgctgtagcttcggccatgtgccttgcctttcgtttgattgtcccatcgtcatcacgcgcgtcacaaaacagcgcatcagcggagggaatcattccttcaacgctcgaaagtgtatcccacttaccacccacacgcgaaggctgtcttaggttctacgcaccttctgcccgcgaagcgtaattacttgccagccattcacatacgcccggccttggaagggtcgatatgcatggtctggaagcgattggccatgtaagcgtcgctgtagcgttcgctgaaccacatcgcgaccggtgaatcctgcggctggccggccatgcgcccataccagcaatccaaggccatcagcgtgaaggcaatgtcgatcaccatcagcaccgtgcataccgcagtcagcgaataccgtactttccatggaatgcgattaatcagagccagcagtcgcggcaacagccacttgacccacaccacaccaatcagtccccagaagaacatgaattggcccgaagtacgtccgtcgatggacagccaacggccggtgtaatcccacgcggtaataccgaacgccacttccatgaaccagctggtgcagtattcgaacgcgccgccgatcaccgccgaagcgcagaagatcaagaacggattcgccttccacaggcgattcaggcacacggttaccaataccgcaccacagccgtaaatcggcgagaacgggccccacagcaaacccgcgcggtcctgaagttcaccgttatacagcgccatatggtagatcgtctccataatcaggccacccaccgaagcgatggtaaacagccagaagatattgaagaagtccagtgcaatatagcccttgccggattggtcgcggcccagcatgccggccgccaccgccgattcataatcatcgcgatcgtccatgcgtttgagcgcgcgctgcaaacggcgttcctcgctcagggagggatcggcggtcaccgaaatcacgacgagaataatcatctgaatcagcggcagcagcaggttgaagccaaggccggtcagggccagcgacagcatgccgtcggccaacgtcaacggcatcagcacgtaggtccagcgcgcggcataccggcgatgattgcgcagcagcatcacgccgaacacaatcaggcatgcggcactgactaccagcaccaccgcatgaatcgcggacaggatgaaagtcaggctcatcgcatcgacgtgcacatgaccatccagaatctcgcgcacggcatagaggatggaaatcaccataatcggcaatgtggcgagtccgtccagcagcacgaccgcgccatagatgcgcgccagaatcggtaaccgcttggcgttcaggttcaagccggcgtcgtccagttcgacggccaccagatcagccacgactgcggactcggcgtcacggttctcccgcggcttgccaggggtagtggccgtgccatcgtccttgaattcaaccatggtttcctccccacatagcgtccccttacactatcacccgattgcagttttgccgaacttgatggatagccggtacatgtctgtctacattgccggacaccgagcccgctcgctttcaggaaacatccaaaaaccatccagaaatcttgtcaataagttccagaacgcctttcgctccagccaaggcactgatggccagtccggcaccggcagcagctccggcacaggttctgatacttccggtaactccaactccgaccagtcatccagccagaacgagcagtcggccattgatggccaatccggcaccatcgaaagctgatacaacggtttacccatggggcggtagctctctcatgaggcggtaattaccccatggggcggttagcccaaaaccgcattccgcggaataaagccattttaagccaccgccccatgggaattttaccgccccatgggccacttaccacccaatgaaggttttaccgccccatggagggcagcctcacaccaacacacacagcacacccggccacacagcaccccagccacaaaaaattaggcacactgcccagcgacacacgataagccgctgggcagcggcgttattccgccaaaaccatcatcaatcaccccaataatctccggcagccgtattacgctactacaaccgtagcgctacgattaacgtatcgctacggaaaacgtagcaatcaagcaacaccaagctccggaggtatcagtgggcaatatcttcaaggtcctcaaacgcgacttcctgcgcctgttcaaggtgccggccgcatgggtgatcctgttcggcatggtgtttatcccgccactgtattcgtggtacaacatcgtcggcttctgggacccgtacggcaataccaaaggcatcaccgtcgccatcgccaacaatgacgacggcaccgacaacgcgctcatcggcaagcaaaacctcggcgatcaaatcgtcaagcagctgaaaagcaacgaccagctcggctggaccttcgtcaccgaagccgaggccatggaccaggtggaatccggcaaggcatacgcagccatcatcatccccaaagacttttccgacgatctcgccggcgtggtgaccggcggcaagagtcggcccactctggagtattacgtcaacgaaaaagccagcgccatcgcccccaaagtcaccgacgtaggcgcgtccactgtggaccgcacggtcaattccacattcgtctccaccgtatccgaagtacttaccgaagtcatcaatacggttggcggcaaagccatcagcaccgaagacaccaccaaagccaaggccctcacggcccttgccgaggcctccggcgacgtgcagcacacacgcagcaccatcgccaagctcaccaccaaactcaccgataccccggagcagacacgcaccgcgcgtcaggcgctggacgacgcgcgcgcacttggcatcgacaccgcggaaggcctggccggtgtctccaccctgatcggcactacccagaccaacctgaacggcttcgtcacctccacgtccgaagcacttgaccaaggctcaagcctgctgagccaagccgcagcacaggccaaccaaagcgtgggcacggtagccggaaccatcagcgccgccaatcagcaggtagacggactgatcaatacggcggaagacatcaaccaagcgaacgccgacatcatcgaccaactcaaagggctgccgaacgccgatcgagaaccgctgcaatccgccattgccacactggaaagccacaatagcgagcttgccggcgcactgggcaacctcgatagcctgaacaccactatcggcaacgcctccacagacaccgccggattggcgcagcatctcaataccgccacccaaaccacggtgcgcgaggccaataccgctcgcggcaccatcatctccggcgccattcctcagctcaacaccggcctcaacaccctcagctcgaccgccaacactctgtcgaccggcatcacgtcgcaaggctcactcatcgatcagtcgaagagcaccctcgatcaactcgacaaagccgcctccaccacggtgaccgccctgcacgacaccgataaggcgctggccggcgtgcaaaccaagctcgatacgctgaccaccgacatcaaagccctgagcatctccagttcactcagttccctgatcggcaccgacggcaaactggatgccgccacaatcgccgacttcatgctctcccccactgttatcagcgaacgggccgtctacccggtcgcctcctatggttccggcatggcaccgctgttcaccaccctgtctttgtgggtgggcgcgttcgtgctcgtggtcattcccaaactcgaaaccgacgacgagggcatcgacgatctcacgccaacccaaggctatctcggccgtttcctgctgctggccacgctggccgccgtccaaggcctggtcacggccatcggcgatcttgtcatcggcattcaatgcgcgagcgccccggtgtttctgctcacctgcgtcatcacctcactggtgtatatgtcggtgattttcgccctctccaccacgttcatgcacgtgggcaaaggcgtgtgcgtggcgctggtcattctgcaggtgccgggcgcctccggcctgtacccgattgaaatgatgcccgcgttcttccgcgccatctatccgctgctgccgttcacctattcgattgacgcaatgcgtgaaaccatcggcggcttctacgacggcctctggttcgcctatatcggcaaattgctggttttcgcggttctggcctttgtgcttggcctcggcgcccggccgaaactggccaatctcaaccgcctgttcgcgcgggaaatcaaggaaagcgacatgattatcggcgagccggtgcacctgcctggcagcgaataccgtgtcactcaggccattgcggcactggccgaccgcgacgaataccgtcatgccatcgaacgtcgggccgccaaattcgcctaccagtatccccggctgctgctgggtgcgcttatcgccggattcatggtgccggccgcgctcattatcgtgtttgtgctgaccaccagcgagaaaatcgtggtcatgggcacatggctggcatgggtgctcatcatcatgggcttcctgatggtcgtggaattcatgcgcgattccatccgccgccaaaccgagctcggcaacctttccgacgagtcgatccgcgccatgctgtacgggcataaggccaagcgtcgcgacacctccgccgaacgccacgaagaagcggacccgagcgccgccgttaccgcaatcatccccactattccgccgaccaaggaaggcaggcacgcacgatgaacaccatgtggaaactgtttaccggcgacatcaaacgcctgaccagcaacgtggtctccatcatcatcgtgatcggcttggtgatgattcccggcctgttcacctggttcaacgtggccgcatgctgggacccgttctcgaatatgaagaacctgaaattcgcggtggcgaatgtggatgaggggtatcgttccgacctgatcccgatgaaagtcacggtcggtgatcaggtggtgaacgcgctgcgcgccaacagtcagctcgattggacgatcacgtccaaagccgatgccgtcgagggcgcacgatccggcaaatactacgcggccatcgtaattccgaagtcgttcagcaaagacatgatgaccttcttctccgacgatgtgcagcatgccgaactgacctattaccgcaacgagaagaagaacgcgctggcaccgaatctgctcaacgagggcacggacgaggtggcggcggaaatcaacaccacgttcgccaagaccatcacttcggcagggctggaaatcgcgtcttcgctggccgatcagctgtccaagcccgaagccaaagagcaactgaataccttcaacgccaatatcgccgatttcgccacacggcttgacgatacggcggatttgcttggcacatacagcgcattgaccgatacggccggcgccttgcttgacacctcgaactcgctgatcactcaggtttcctctgccgccaaacaaggaggcaaggatctcgccagcgccaagcagggagtcaccgacgtggtcggagccctgggcaccaccgctgacgcgatgagcagctcactggacgcgagcgcctccagtttcggcgcggtgtccgattccatagacaagctgtattccgacgcgaatgatggtgccaccacggccgccgacgaattggaccgtcaagccacggccattggcaagcagacggagaaatacactgaaattcgcaacacgttggccggcatactgggcaacgactcatccatcatcacggcgattgaccgttcaatcgcacggcagaacaggctgcggcaagcgctgaatacagcggcgaccaatattcgccaaggtaatcaggacgcgcaggatcagcatgcgcaggtcaaggatctggccgatcaagcgcagaacagtatcgccaatatcaagtcggatttcacggccacggtgaaaccgcaaatcgactccctgtcgtccaccgtctctgacgcctccggcatactgagttccggcgccacccagttggactccacgctcggcgacctgaaaaggacttccgacgacgccagcgatatgctcggcgacgctcgcaccaccttgggcaaggtgtccggcaaactgcgttccgccggtgccgaactggcttcgttcaacagcacactgagcgacgcactaaacagtggcgatatgagcatggtcaaagaggtgctgggcaatgatcccgaaacgctggccagtacgttggccgcgccggtgcagctcaggcgcaaggccgtatttccggtggcgaatttcggttcgtcgatggcgccgttctacacgctgctgccgttgtgggtgggcgcgctgctgatggtggtgacgctgaaaaccaccgtgtctcgccggacgcgcaaagcattgggcgagccgcggccgcatcggctcttccttgggcattacggggtgttcgcgctgattgcgctgctgcaatccacggtgtcgctcggcggcgatctgctgttcctgcgcgtgcaggccgtgcatccgctgctgtttatgttgtccggatggctggcctcgctagtgttctcgttcttcacctatacgatggtggtgagtttcggcaatgtgggtaaggcaatcggcgtgcttatgctcatcgtgcagatttcgggtgcgaacgccgcctacccggtgcagatgttgcccgacttcatcgccaaagtcagtccgttcttgccactcacccatacggtgacgatgatgcgtgcggccatcgccggcatctacgacatggattactggcgggccgccggaatgctgctggcgttcgtgccgccgctgctgttgcttgggctgttgctcaggaagccactggtgcggttcaaccagtggtatgtggccaaagtcgagagcactaaagtgctgggctagtaggtattatccgggggttgcctacaaacggcatggacttaccaccctcagtctggctttgccagtcagctcccgccaacgggagcgtacgggagcatatttcgaagagaagagatgacggagatgacaggtacgacggcgacaccgcgcggtgagcgcacgcgcgaggcgacggatcgcaagctcatgcgagccacgctgcagattgcggtggaccgcggcatcagcggcgtgaccatcgaggaggtggcccggcgctccggcgtggccaaaaccacgatttaccgtcgataccataatgccgacgagctgctgcgcgagatcagcgcgatgtatctggccatcccggattccggcccagtgcccagccccacgcgtgagcatttcacgcaactattgcagcgattggtcgattgggtgcgcgacaacgacatcgacgtcaagcgcgtgggcattgtattgtccagtgaggccgagttcttccagcacatcgtcgaccaggtggtgaccccgtggctggagcgtgtgggggcgttcctcaagcagggagtcgcgcagggcgtgtttcgcgaggacgttgacgagaagttgctgttgtccacgattatcgggtctttggtggcgtatgaggccatcgagggcaaagcgatggacgacgacaccgcctgggcctcgcgcatggccgatctgctgtggccagcattgctgaagtagcggtcttactcctgaatcgaagcctcctggcgggcgacttcgagggctttgttgaaggcgtcggaggtccagctggcaccggcgaccttgtccactttgagtcccttcaggggcttgccgtccactacgccgttgatggctttggcgaagtcgtcctgatggttcttggaaatcgtggtgaacgggtgcccaatgattttgacggtctcgacgttgccgtccttgatggtcagatggacgtcgatggaatcctcgccgaccgggccgtactggccgttgatcgagtagttgccgtccttgtagttgccggtgtcctttttgtcggacgtggtggtggacgggtcgttgtgcgatgagccggaatcggagccgtcggagctatcggagctatcggagccgttcgactgggattgcgactgctcttcctgcgacttctcggtctcgcccgagttgccggcgtacgcatcgtccatcggcgtggccttggattcgccgcacccggccagcagcgcgccagccacgaccagtccggccgccgccaatgtcgcggatttcttcaacgtattcttttcggtcatattcacgctccttaagccccctctgacgagggggctgtcagcgaagctgactgggggagagaccatcagcttgccatgtattcctcacatactgctcgatgcccctgacggccctactcctcgccgccggttttcgcggccttggtggggtcagcgaaaccaatggcggtctcgccgttctgcgcgccctcgacctgtgcacccgtggaggcgggcttgccgccggccgcctcgtaggccttgcgcgcatcctcgtcattccacttctcaccgacgagcacgccatggttgagcatgatctcgcgctgcgcgcagctggcgacaagcgcatcgtgggtgaccacgataatcgtggtgccctgctcgtgcagcttgcggaacaggtcgagcacgattttctcgttcttctcgtcgaggttgccggtgggctcatcggccagaatcagcttcgggtcgttgatcagcgcgcgggccacgcacacgcgctgctgctcgccgccggagagctggccgggcaggtggtgggcgcggtccttcaggccgaccttttccagcgcctccatggcctgcttctcatcgaccaccgaatggtagtactgggccaccatcacgttttccacggcggtcaggtgcggcaccagatagaacttctggaacaccagtccgatgaggttcttgcgcacgtcggccagctgcgtggcgttcaggtcctccagcttgcggccttccagcttcacggagcccttggagggcgtgtccatgcagccgatcatgttcatcagcgtggtcttgcctgagccggaggagccgacgatggcgagccattcgccttccggcacggtcaaattgaggtcgtccacggcatgcaggtcgccgtagatcttcgagatgtggtcgagttcaagtagcatgacgtttctctttctttattcttcgcgaagcacgacggcggggtcgatgcgggtggcgcggtggacgggcgggatggaggcgacgatggcgaccagcgcgctgaacagcacggagatcagcgccagccaccagttgaatccgatggagcgttcgaacaccgccacgcacagccaactggcgagtccgtagccgattgcggtgccgatgaggccgccgatcaggccgtagagcgatgattcgatgtagaactcggtgccgatggcacgcgagctggcaccgagggccttgcgcaggccgatctcgttgcgtcgctgcgagacgatcgagctgattgtggtgccgacgccgacgagcgtcagcaccagcaccaccaacgagacgatccagaacagcgtctgcagcatggtgatgatgcgggtgtcggaggcggtgatcttggtgacctgctgcgccttgacgtgcatggaggtcatgtcgttgatgctggacaccaggcccgcgagatcgctggcgccggccgaatactcgatgacgtccacgccgcgcgtgatgccggtgagcttgttgacgtcggcgttggtggcgtagatgatcgagtcttcgctgccgccggtgtccacgatgccggccacgcggaattcggtgccggaggtgtccatgatgtcgctggaaacgcggccgtctttggtttgctggtcgatcgaggagttcgacgaagtgccgttggtgctggcgttatcggatgcacggtagccgatggtgatggcggagccgattctcagaccgatggcgtcggcgatgtcacgtccgaccagcaccttgccgtcggtcggccacgagccgtcgaccacccagtgatggttgaggttcttgacctgcgccgcattcacgccggccatcacgtacggcgaggcgttgacgcgcacgttctcgtagcggtaagtggcgtatttcgcggaacccttggccttgaccatttcagtggtgtgctgcaccatcgccttgtcgatgccggccttgccgtcggcattggtcgattcggtgggtgtgacaatcaggttcgcgccgtacgcacgcatctcctcgttcatctgctgcggcacggcgaggcagatcatcgccaggcagaacagtgtggccgcgccgaccagcgacgccaccacagccatcaccgcgcgcgaacgccggcggaacacggcgctgaacagcattctgaagaacataccggtgttggtcatcggtttcctccttccacacctacgtagataaactcagcggccatggagcacctccgcgggcttgagattcagaatcgaacgaatcgaggaggcggacgccagcagcacggtgacagccagcagcacgaacaccagcacgaacaccatcggccgcatcgtgatgccggaaccgaataccacccggcctatcagctgggccacgccggaaccaagcaacgcgcccacaatcgcgcccagcagcgagattgccgccgtttcggccagcatcaggcgggataccgcggcatcggtggcaccgagcgccttgagcagcgccagctcgccagaccgttcgccgatcgaggcgaccatcaggttggccacggccacggctgcggcgatcaggctcagcacggtcatcagaatcatcacggcctgcgtcttctgcagcacattgccctgcaacgcggcgacctgacgcacctgcttggccaccgcgcccggaatcacctcttcgatctggtaggcgatcgagctcgggtaggcggtgcagtaccaggtctcccattcctcctggctcagcgcggccgggttcgcggcggccttacgggccaggtcgttctccggcgtggtcagggccttgacctcgatcttgtcgaccgaatcgggcaggtcggcgagcacctgggccgtggaggaggcgatgtagagcgagccgttgtcctcgtcgccggaatcgtagacgccggtgagcttgattttctgctcgttcttcttgcccgaggcggtggtcttgttgagggtgatggtgtcgccggtggtcacaccgagttcggaggccagcgtcttgccgatcacgccctgatcggaatcgtccttgggccacttgccgtccagctgccaccacgagcgcatgccttccacgcccacgacggtggtctcgccggtggagatcttgaggtccttgttgaaccacgtgccgacgaccggcacgttggcaccgttcaccgtggcgtggatgttgagctgcggcgcgaagttggtgatgttgaacgaccagaagatcgtcttgatcttggccgcgtccgactccttcagaaaggcggtcgggtcgctggtggacgccgcgccgcccgactcggtgttgtacaggtcggaaacgaccgcgtccgccttgggctgcacggtgatgttcgaaccgtaggtggacagctcggcgttgagcttgtcgcccacgtcgaacacgacgcccagcatcgatacggacacggtcgccgacaggcatacggtcagcgcgataagcaggcgccggcgcagctgtcgggtgaacgagcgagtaatcatacgcagaaagaacatgattcttgtctcctgcctgactcactggaagtgggcgctcagcgcgtccagatccgtagtctgaatggtgatcttgccgtggccggtcttgtacgggaatggtatcgggttgcagccacccttgaagccgatggtcgccaggttgatggccacctcgcacttcttgcagatgatcttgccgtccttctcgtagtagccggcgtcgccgcagttctcgcaggcgtccaggccgatgccgtacgcgccaccgttctttcggatgatgatgaagcgcatgacggtgccgtccttggccttgtattcgaaacggtgcaggtggccgtcctcgacctggctgaagggaatggtggccacgccgtccttgagcgagtaggcttccggcggcgaaagagtgatggtctgatgggtcgcggcgacgccgacggtgagggtcagcgtgacgccgatcatggccacgaggctccagacggcggaggccacggcgcggcggcggaacgccttgtgcttgcggccgatggcttcgttcgcgccggtcagcggtatacggaagccggccaccacggaggcgacggccggaatcaggaacacgaacgcctgggccatgatcatccagtcgttgtggttgatcgaccaggcgagggccacgaatcccgtgtggcctatcgggaaaccgcgtgcctgcaggatctgcatgacaccggtcaggtgccggacgaacagaatcaccagcaccgcgagaacggcggcggtgaacgaggcacgcaccgcggtcgaacgcatcgtgcggaagatcacggccacgatgatcgacatggccaggcccagcgcgaagccgagcgcgcgcagcagcatgtcggacgtgaagatcgggtcgccgggctccacccagatggtcagctgcaggatcacgtccggcagcgcgtagaacagggtgagtgcgatgtcgatggcggccacggcgttcgcaatgtgcatgaacaccttgtgctgctgccaattggtggtgatgcggcgtgcgaacaccaccacgacgatggtgaggatgtcggcaatgatcgcgcaccacagcaccggatagttgacgaacgtgcgctggttgatcacggccgaggcgcgcaggccggcgaatgtgatagcggcgatcaggccgacggtcaggccgatgagacgccaatgcgagcttatcggcttatctcgcccctcgccgaccgtgagcatcacgctcaggctcatcaccagcaatgcgggggccaaggtgcccggcatcactgccacgaattgttcaagcattcgcgtcctttctctgttcatcttaggctcccctccctgaggggagctgtccgcaaagcggactgaggggagtttttagaccgtcctaagaattatctccctaaagcggcgtaaagccccctctgacgagggggctgtctgcttagtcaatcaccactgacgcggggtgtagtcccagttgtcgaaggtgacctcgatgggctcggtccagaacttgtggttcttgacaccggtctccgggtcaacgtggagcatccagccgttcttctcaggggactcgatggagagcttgagctggtaggtgccagccttgtcgagcttgacgttggcgccgtagtgcgggccgtcggaggcgttcatctgcatgaaggtaccggaggtggcctggccgccctcgacttccttgccggtggacttgtcgatgatggtgtagttcacagtaaggtcagggacgaagtcgcccttgccgtagccgtagtcggtgccttcctgggaggcgtggatgtcggcttccaggtggaaggaagcgtcagcagccttcagacccatggaagcagggtacatgtcgatgggctggaagtagacggcacccacggtcagcgggccagcggccttgtcctgctccttggcggtgccggaggggccgaccgggacctcttcgaagccggaggtctcagtcggggcgtcggccttcttggagtcgtctttcttggcggtgtcggaggagctggtcgaggacttggtatcggaagcgttgttggtggaaccgcaagcagccatcgaaacagccatggagccggcgagcagcacgccgagcagagcggcaagcttcttgttcttcatcatttctcttattccttctgttgtggtgaatggattattcacgacttatctgtttttagttgtggcggcgtgggctggaatcgcttccattgccatgtcgcaagttgtgttgcgcgagatggtcgcaccgggcgttgtgctacgcctgcgcgctctcctcgtcagccttcgcgtccgacttgctcgcaccggccgcaagccgggccttggccttacgctgtttggcaaagccgaccacgaacagcgcgatgacggcgatggctgccagtacctgggcgatgatgcattcggcgtacgggtagaatccgagccagtcgttggtgggaacgcccggcaggtagttggcgggcagcaggtcgccctcgatgagcgcgtgcacgccgccgccggcgaagacaaccaccagcacggacatgaggatcgaggtgaccaggaagaacgggccaatcggaatctttacggaggtgaagcgaatcaccaggaagatgatcacgagcaccacggcggcggcgagtgcgccgaccaccatgccatgcgtatcctggctcatcgtgtagatggactggtagaagatcacggtttcggcgccctcacggaacacggcgaggaagctcagcatggcgagcgaaatcaccgtgcgggaagccaccttctcgccggattcgacctgcgaggagacagaggccaccgcggcttcggtcttttccctgatgtagcggttccacgcttccaccgaggacttgttgagcatccagttgctggtccacagcagcatgcacatggcgacgagcgcgcacacgccttccatgatctcctgcagcgggccggagccgccgaacgcgagcatgaagatgaccgccacgatgcctgcgccggccagaccggcgagcacgcccacgtagatccatttggtgaagcgcttgttgccggacttgacgaggtaggccaccacagcggcgaccacgagcagggcctcgagaccctcgcggatcagaatcaggaacgcctggccgaccgagctggtgatgaacttgaggaagccaccctcctcatcggccgcgccgccgtcgagcttggcggcatcggtggccagcatgttcttcaggtcgtcgatgtacttcttgacttcggaagcaggcttgccggtgttcatcgaggagcggcacagcttgaactggtattccacctgggagacgcggttgccgctgatggcgctcagcacggtcttctcgaagccgagcttctcgtagtgctggtagtaggcgtcgttcacgagcgtggcgcccttggcggcgtcgccaccctcataggccttgtaggcgttgtccaggatcggaagcatcgcatccgcgacttccttccaagtcttggccgtttcctcggtgcgcttcttcttggcgtcgagctccttgcgctccttggcgatctgcttctggaggtcttcggagtactgcttcgggttggcgaggctggtgttggcgtcgagctgctgggccgtggcgtcgaggtcggcggtcaggtcgttgaccttctgggtaagctgatcggcctggtctgacgtgaacacctggctttgcaggtcctggaaggcctgctgctgcgcggtctgcttgtctgcgccgatggtgtcgctcaccactttgttgaagttggacgtcacgtagacggtggtgtatgcagccccgaaatcggacttggcacccattgggttgccgtccttgtattccttaaggccttcctgcaactgcgcttcgacggccttggcaacgtcggcccaggtcgcgtaatcgacgctggtggtgtcgtcgctcttgacggtggcagcagtggcagtggttgccggcgtcacggcgaacgcggactgcggaatgatggcggaggggaggaaggtcgcggcgatcatcgcaaacagaaaaacgatgaccgcaaatgcacgagccgagaccgtggccgactgcagacgaccggtgctgcccgacttcgcgcgcacgcgagaaacggcaacgcgcgtatcacgttcccgcatcgtgttcatttcagcggactgcgcgcaggcgcgacgaaccatgctgaattcctctcacttcaagtactcgaatggtccaaaaacaactatgaactctatagaaaaaaattcttgaacaacagtcttgattttttgacgggtgcgaggtaatagaaggcgttttagtgcttttcaaccccgcaattatttcactatctgagataactatgctcagagaggatggctttcccggaatgtgaacggcaacaccacaaaaagcggcaacgtgaggaataccggaatcggataccaaaatagtgccatgggtgaggcatacagcgacagcaccgtgaatgccagcaagccgtaagcggccagtgcggggccgtagcgtcgtcgcgcaggccgcaccgccagcgcaagaccagcagccagcggaatccacgtgacgtacagggccatcgaagtcagcggattgcctttgcgaacaccgacatgaccatccgaacgcacccaccgatgaatcgcccgcaatatgtttttctgccattgcggcttgtcggaggtacccctcagcggcgcaaggtcatgttcgatggcggcaagtcgttcggccgccacggtatcggcatcgccgtcggaagtatgcttccaagcaccttcagacaggaaagacgcccattgcctgagatagctaggcgtgaacaggtagtcggaatcagtggggtacgcgaaattgacgcgcgggtcccaccatccgcgagtcaccccggcataggccgtggcatattcaaccggatgcgcgaggccgagctgcacccagacctgcagggccgcgagttgttgcgccgcggttggcctagggtgctcgcgcagagtgcggaaggtctcatcggtgcggtgcgggttgatgccggcggcggcccagtcgaggtccatgatcgcgttcagtcgccgccgctgaatcttgtctatcgcactgggatcatcgtgcgcgagccgggccacgggctgggtgaccaggccccacacctcacgtccgggcgatcgattcgcatgcgtggcggccgcgcttaatggcgtccacacgccctgcgccacaacgatggcaaccgcaagacacgcaaacgcacgacgccgcgcgcctttgggcgtacagacaacgagcaaacagcagccggcgcatagcacgattatgagcgccgtccgcttggaggcgatggtggcgaacagcaggatgacgaacgcgaatgccaccgggcggcgagccagtaccgagccgcgcgtcagacaagcctccacgaacagcacggccaacggcagatagaacacggcatgcaacgagtccttgcccatcgtggtgattgcgccgaccaccacatagttggtggcaagatagacgaggccgagaccgatgagccagcgcggcgagccgattttgcggatgtagcacagcagaagcgcgcacccggcggcgagtagaaccgcttgggtcacggtgtacagggcctgcccgatcagaggggagccgagtgcgctgccgatatgccagaacaggccgaacgtgagcgtatcaaacagcggatgctgggtgtagtagtggtgcagaccggacgattgcagatattgggcaagcgtatcgtcgcgcatcgaacccggccaggtgagtatgagccacggcagccaggcgatagcgagtgtgagcaggtaagggaggaatcgcgcgcgcagcgatgtggataacgtggtcgggcggcgggccgtgagccaactaaggatcgcggatatgctgcggtacgtctttgagtgtttcttcgattggcgcgaccggccgccatgtgctgcggttacgtcggccgctgtcccctcgttcatggctcaacagcctaggcgcgattgcgggcgcgcgccgggcgaacatcgaaaattcacctggacacggtgatttctttaccgggggttgtgtaggtgcgcgcgggtgtgtgggccctgcacaagcatgcggtccttgtgcgggtgttgcgcgggactttccagtgagtctttcactcgcagtgatcattcttcacatccgcgtcgcgacacgcgccacgccgaagcgtgcacttatccgaaacctgtggtaacttattcgagttgcctgcggaacacagttcaactgcgcactgcaaagcatggaggattcgcctagtggtctatggcgcacgcttggaaagcgtgttggtgtaacagcctcacgagttcgaatctcgtatcctccgctagcagggctttcgaagaaattcgaaagcccttttcttttgccgaaaacagcttcctttcaacgattccgaacggcttggactgtcggaataggggttataggccaaaatgtgtgtccggcggtctagtcgttcgactgccattcgacccgtgtgtggaactcgttccagtcgatgccggtgccgtatcttgcggggatgccgaacgtctcgtactggccttgcgggctcctttcccatgcctgccggtagaggcgctcgagtcgttcgtcggtcatcgcgttggccgcgagccacgcgtcggtctcgggatgcgccgtgtgctggtggcaccaccagcagatcgccttcagccgtctgaccagccgcagtccgcggtggcggcgcagcatgtcgcgcaggcgcgcgttccatgattcgacgaggttgttggtggacggcaccgggccgacggacgcgagcccctcgtcgaggaacgtgaacaggtggccctcgcggatgcgtctgcggatcatgcgccgtaccttgacgagcctttggtgcatgtcgttcacgccgccgtcggcgtattcgctcttctcgtcgaggaacgaggcgaagtcctgctcccactggttgtaggagaccagccattcggccgcgccgcccgcgtccccgacgcggggcagggacagggccacccggcgcagccgtccgcccgcctcgagtctgggccgcctgccggtcagctcgaggatgttggcctgcacgtggaacaggcaccgctggatcctcgtatccggccacgtggccttcgcggccttgaggacgccgcccccgccgtcgcacacgagcacgtcgggcggcgcgatgcgcgccatcaggcactgccatgccgccgctttctcgcttttggcgacgtgccagccgatcacgtgcccgccggccaccgcgatcaggaccaccgcgtcgcggtgcaggtggatgccgtccacatgcaccacatgatgcacctcgtccaccaggggcacgggcggccacaggccccacatgagctcgcaccggcggcgcagcgtgcgtgccggcagccggtgctcggcctgcgactgcttcgagaacagccaatccagaccgcaccgcagatcacgggcgctgttgtcgcgcgactgggtgcgtgagctcccgcagccggcgttccggcaccgccacctgatccgtcccgagctcgtccttccgttccgcttcatcggctcgccgcacacggcgcaacaaggtgtgttcatccacccaatctgccacgccaactcgaaagtcactcaaccgttgtgccgcaaggcctgaccggccattccggacacacattctggccgacctcgagttccccgcccatacaactcgaacaggaggaacgcccaccgccacaaaggaacacaagccaaaacggacacacattttggcctataaccctgggccatctgattcgtatgcggcacgccgtatggtggattctgatatttctattgcatgtttgactattttctgatattgagagcgaagcgaacccatcatgaccacacagcatcctgacactccggaaaccggcattactcccggcggcacatcaggtgccttccgtgacgtgctatccaaggaccatgcccgccgtggtaagccgccgctgcactttgtggatatgacgcccgagcagcgcatcgagaaagcggccgaactcggattgccgaagttccgagtcaagcagctcgccaaccattactttggccatttcgatgtgaatgccgccgaattcactgattttccggcagccaagcgcagcgaggccgccgccgcgtttttcccgcagctcatcaccgaggtgacccgccaagtggcggacgaaggcaccaccatcaagaccttgtggaagctgttcgacggctccctcatcgaatcggtgcttatgcgatacccgacccgcaccacgctgtgcatttcctcgcaggtcggctgcggcatgggctgcccgttctgcgccaccggcaagcttggcctgacccgtaacatgtccaccggtgaaataatcgaacaggtgcgtgtggccgccaaaatgatgcgtgacggcgaagtggccgggggagagggccgcctgagcaacatcgtgttcatgggcatgggcgagccgatgggcaactacaactccgtgctgtccgccgtacgacagatttccgccatgcctcccgaaggcttcggcatttccgcgcgcaacatcaccgtatccacggtgggcgtggtgcccggcatcaagaagctcactgccgaaggcattcccgtgcgtctggccgtttccctgcatgcccccagcgacgaactgcgtgacgagctggtgccgatgaacaagcgtttcaacaccacgcaggtgttggatgccgcgcacgattattggctggcctccaagcgccgcgtcagtatcgaatacgcgctgatgcgcggcatcaacgaccaggccgagcatgcgcagttgctggccaagaggcttaaccattacggcgacaactgggcccacgtcaacccgattccgctcaaccccatcgagggctcgaagtggaccgcctccaagccgggagacgaacagcggttcctggagatcctgcaccgcgcgggcatcaccgccacactgcgtgacacccgcggccaggacattgacggtgcctgcgggcagttggccgctaaggagcggtagttacttcagcgcatccttgattgcgtccacgaagtagtccaaatcagcgggcttgcgggacgtgatgagcttgaagccgttggcgtcgtccacgtgcagctgctcgtcgacgtaatggccgcccgcgttctcgatatcggcggcgatataacggcagggcgcggcggccttgagatcgcgcagcgggcgcgtcagctcggattctcatattccagaaacgggtgcggcgcatgtaacgggcggtaggtagtctgaaggactgtaatgcaaagccgaacaggggagtgaagcatgtcgttggcggtacgagtcatcccgtgcctggacgttgacgccggtcgcgtggtgaagggtgtgcatttcgaaaacctcaaggatgcgggcgacccggtggagctggcggccgaatactatcgtcagggcgccgacgagatcaccttcctggatgtgaccgcatccagctcccaccgcaacacgatgattgacgtggtctcccgcaccgccgaacaggtgttcattccgatgactgtgggcggcggcgtacgcacgcccgaggacgtcgactcgctgctgcgctgcggtgcagacaaggtcggtgtcaacacggcggccatcaatgacccgtcgcttatcagccgcgtggccgaccgtttcggcaaccaggtgctggtgctctccgtggacgcccgccgcgaaaagggcgagcaacacacgcaatccggcttcgaggtcaccacgatgggcggccgcaaatccaccggcattgatgccatctggtgggtcaagcgcgccgagcagcttggcgccggcgagattctgcttaactcgatggacgccgacggtaccaaggaaggctttgatctcgagatgattcgcgccgtgcgcaaggaagtcaagattccgatcatcgcctccggcggtgccggcaaggtcgaggacttcccgcccgccatcgaagcaggtgccgacgcggtgctggccgcatccgtattccattacggcatcctgaccatcgccgatgtcaaggcggaactcaagaagcacggctacaccgttcgctaaacgaatacaccttgctcccgctggacgaacaatccagtggattgttcgtagcagtgcgctatgcacatgtcgcacataatccgggagctgtcagcgaagctgactgagggtggtccacataaggaagataggtatgacagacactacatacgacaattccactgaactcgatccccgtattgccgcacgcctgaagcgtgacgccaagggcctggtcgctgccgtcatccagcagtacgacacacacgaggtgctgatggtcggctacatgaacgacgaggcattacgccgcacgctgaccaccggccgcgtgaccttctggtcccggtcccgtcaggaatactggcgcaagggtgatacctccggccatgtgcaatacgtcaagggcgtgtccctggattgcgacggagacgcactgctcgtcgaagtagaccaagtcggtgccgcctgccacaccggcaagcgcagctgcttcctcgaaggcggccccctgtccgtggtcgaaggccatcgcccggccgagcagtagaacgggcttccctgactgggggaagccgaacgaccgcgtactacgaaacaagacatcgagttgtaagtaaaggagcgaatatgagcgaatgcagcgtcaaacacctgaagtggggcgccacctggcccagtcgcggccagttccacgaactggccgacgccggctatcgtgtgattccgatcgtgcgccgtctgctcgccgactcgctcaccccggtcggcttctacgagcgtctcgccggcggccgatccggcaccttcatcctcgaatcggcggaatacggcggcacgtggagccgttacagcttcatcggcgtcaactcgatggcccagctgcgctccaacaacggtcaggccgactggctgggcaaggtcccggttggtgtgccagtcaccggtgacgtggtcgaagtcgctcacgccacgttgaagactctgaaggccccgcatgtggaaggcctgccgaacctgaccagcggtctggtcggcacggtcggctgggatgccatccgccactgggaaccgaccctgcgcgccgaagctccggacgagaccggccagcctgagaccgtgctcgccctggccaccgatatcgccgtggtcgaccacgtatccggttcggtgtggctcatcgccaacgcggtgaacgtggatgataaatccacccgcgccgacgtcgcctacaacgaggccgtcgctcgactcgaccagatgcagcacgatgccgccaccccggctccgggcgagtcccgcgtcaacatcttggacgaaacggtcgcccagcctgagctgcgcttccgcaccgagaaaagccactacgagcaggccgtcgaacgcgccaagcagcacatcgtcgacggcgacgtgtttcaggtggtcatctcccagcgtctcgacatcgattcgcctgccgacccgttcgacgtgtaccgtgtgttgcgcacgctgaacccgagcccgtacatgtatttcatggcgttgaccgatgctcagggccgcgacttcaacgtgatcggctccagcccggaaaccctcatcaaggtggacaacggccacgcgatgaccttcccgattgccggatcccgccctcgcggcgccacccctgaggaagacgagaaattcgccaaggaattgcttgccgatccgaaggaacgcagcgagcacatcatgctcgtcgacctgtcccgcaacgacctgagcaaggtgtgcgtgccgcagtccgtggaagtcgtgcagctcatggacatcaagcgtttcagccacatcatgcacatctgctcgacggtcaccggcaaggtcgacccctcgctgaccgcattcgatgtgttcaagtccgcgttcccggccggcacgctttccggcgcgccaaagccgcgcgcagtcgaaatcatcgacgagttggaaccggccgaccgcggcatctacggcggcaccgtcggctacttcgatctctctggcaacatggacatggccatcgccatccgcaccgcgttcctgcgcgaccatgaggcgagcgtgcaggccggtgccggcattgtgctcgactccgtgcccgctaccgaatggcaggagacgcgcaacaaggccgaggccagcgtcgaatccatccagatcgccgcccagctgcgcgaactgtaacgttcaacgcatagcgatgcccctgctgacaactgctgtcagcaggggcataacaatatgcgtatcagtgggtttcgcccatgatgtcggtggcgtcggttccggtgctcacagcggcttcgatggcggcttcgatgccgcgcgccatggtcgcgatttccatggtcggcgtgccgttcggcttgcccacgccctgcgcggtcgcatacggcacatgaatgaagccgcccttgacgccggggaatttgcggtcaatcagatacaacacgttatacatgatgctgttgcacacatacgtgcctgccgtatacgacatgaatgcgggaatcccgtggtcattgatgttcctgaccatggccttgaccggcaacgtggcgaaatacgcggtgtcgccgtcctcacgcaacggcgtatcgaacggctgctcgccatcattatcgggaatacgcgcctcggccaaattaatggccactttctccacggtcagagccgaacggccaccagcctgaccaatgcacagcacatagtcaggctgctcgcgcaccatggcttcctcaaccacggtcgcactgcgcgtgaacaccgtcggaatctccagtttcaccactgtcgcaccggcgatttcatccggcaacagcttgactgcctcgaatgcggggttaaccggctcgccgccgaacggatcgaatccggtcaccagaatcttgctcatcattagctccttatttcacggattgttgtggtatttggacaacgaggttattgcgcgatcagcatatagacgatctgcaccacaatcatcaccaatgcgggcagcacctgcttcttaatcacgcccatgcggtccttcatatcgagcatcgcgacgggcacgatgttgaagttggcggccatcggcgtgcacagcgtgccgcagtagccacaggtcagcgccagaatgccaatcaccgccgggtccgcaccgtaggcgagcacgaatggcgcgccaatgcccacggtcattacggtaatcgcggcgaaggcattgcccatgatcatcgtgaacagcatcatgcccacaccgaatacgatgatgcccagcgtgacgttgcccttcggaataatgccgccgaccagcgtggcgatcacgtcgccgacacctgcggctgtgaaaatcgcgccgagactggccagcagcatcggcagcatgcagagcgcacccatggcagacaacaggcgttccgaatcgttgaggaatacgaccggcttgttgtcatgcgagaacgcgaacagaatcacggcggcaatcatcacaccgatgcagcagccggtcagggcgctgacgctgggaatcagggcgccgataatggcgaacacgcccagacacagggcgggaatgaagatgcgcatgccgatgcgctggaagttcgcggccacttcggcggtgctgggagcgctcgaatcggatgccgagcccttacgcacttggcggaagatggcgggaatgaccatgatgataatgagcacgccgtccgcaatggccggaatccaacggccgaacgcgatgacgataccgagcgccgtccagaacacgaaagtgccgtagcgggccttgttggttttatcgagtaggttgcgtacgcccgcatacacggacatgaaacccatgaaaatatagaagaactcgaggattttcgtgccaacggtcacgctggggtccatgaagaacgacatatcaggcctccttgccggtggtggtagcggtggcggcctgagcggcggcttcggcaccgtagtacttcttgcgcagtcgtgtgtccttgatgatgtaatagacggcggtgaccgccacggcaatcaccgcgacaggaatctcgataatggccatgcgcaacagttcgacgtcataacccagcggcttcaacgtggactgtacgagcagcgcaccggccgtacccacgaacagcacctggccaaagaaccatgcgacgttctccatgccggaagccatgcccttgagctcttccacatactcgtcgttcggctcgtgaccggacgctgcaatcgcacccaccgccatcggcatgatgaccggacgcacgaacccggccacgccaccaaaactcacgttgaacgcggcgaacacgagacgcatcacaccatacagggcgatcaccataccgggcgtcgcattcttcactttgccgatcagctgcgcggctgcggttttcagaccgttgcgctccaatgtgccggtgaccagcaacacgatgatgaaaaccgccatgctgcggttcgagacgaacgacgtacccaacgtggtcaggaagccgtcgacgccaatgccgccgaccagcgcagtcaccacagccgccacgataatgatcagaatcgcatcaagtttgagggcgaaacccacaatcacgatcacgattcccaataacacgagataatttggttccatgtgggaaatccttcctatactgcacacgcattgcgccgcaagcgtgcccggatatggatagtgtacgacggaaatcacgattcaactgtcttatcgcgcacattgcaggtattacatgagcctacgggcatataagcgtatggacgcatgagcgtcggctgagcccggtcggcatggtgttcgctatgatggacagtcggactttggtaagagacagtattcgtaacaggcaagtaggttattcatggctattgaggtgcagggacttgaaattcagatcggcgcgcgcacgctgcttcaccccaccaacttccatgtggccaagggagacaagatcggtctggtgggccgcaacggcgccggcaagacaacgctgacccgcgtgatcaccggcgacatgctgcccaccgccggcaaggtgcgcgtctccggcaagctcggctacctgccgcaggacacgcacgcctccgatcccacgcagaccgcgctcgaccgcatgatgagcgcgcgtgacatcgccaccatcatcagccgcattcgcaaggccgaaaaggatatgaccgacccggatccggacgtgatgagcaaggccatgacccggtacgacaaggccatgcaggacttcgacaaggctggcggctacgcggcccagtccgaggcgatttccatggccgcctcgctcggcctgccgcaggaggtcatggagcagcagctcggcacgctctccggtggccagcgccgccgcatcgagctggcgcgcatcctgttctccaacgccgacacccttattctcgacgagccgaccaaccacttggatgccgattccatcgaatggctgcgcggctacttgaagaagtacgagggtggcttcctggtcatctcccactccaccgaactgctggacgaagtggtgaacaaggtctggcatctggatgcgcagctcggccagatcgacatgtattcgctcggctggaaggcctacctgcaccagcgcgtggtggacgaggagcgccgccgccgcgaacgcgaagtggccgagaagaaggccgaccgtctcatgaagcaaggcattcggctgcacgccaaggccaccaaggccgtggcagcgcagaacatgatgcgccgcgccgaaaagctgctggaaaacacctccgaggcgcagaaggccgagaaggtggcggacatccgtttccccgagcccgcgccctgcggccgcacgccgatcatggccaaggacatctccaaggcctacggttccaacatcgtgttcgccggcgtgaacctggccatcgacaagggctcgcgtgtggtgatcctcggctacaacggtgccggcaagaccaccacgctgcgcctgctggcccacatcgaggagccggacaccggttccgtggaatacggtcacggctgcaagatcggctacttcgcgcaggagcacgacaccttggatctgaacgccaccgtgttggagaacctgcagcatgtggcgcccgagctcgacaacacgcaggcccgttcgattctcggctcgttcctgttctccggcgatgacgcgatgaaaccggcccatgtgctttccggcggtgagaagacccgtctggccttggccacgctggtcacctcgcgagccaatgtgctgctgctcgacgagcccaccaacaacctcgatcccgcctcccgtgaggagattctgaaggccattgccaagtatgagggcgccatcgtgctcgtcacccacgatgagggcgccgtcgaggcgctcaaccccgagcgcgtgctcctcatgcccgacggcgacgaagacctctggaatgattcgtacctcgaactcgtagccgaagaatagtcctaccgtggccccccctaccgggagctgtcagcaaagaacgggttaaccctaggctcccctcgctgaggggagtctcgcaagcatgcaaaggaatcaaccatgccaaccacaacaggccagaagatcgccatcgtcaccggcagcgcgctgggtttgggctacgagctcgccagccaactcatcgccaagggctggctggtggccggcatcgacttcaacgccgaacgtcaggccgagctgagcgcgcagtggccagccgaatcctaccgcgccttcgtaggcgacatcaccgacgaagcgtttgtcaaggaatccgtggcgagcatcgccgcgctcggccacatcgacctgctcatcaacaacgccggccagccttcgttcaaggtgcccaccgcctatgaagccgctgacattgacaaatgcctcaaggggctcaaaggcatgattctgtggacggtggaaaccctcaaggcctgtggagagcgcgacgtgaaaatcgcccagatcatgagcaccgccgccacgcgcggcaacgcgaacgaaagcgtgtactgcgccaccaagtggggcgagaagggctataccaagagtctgcaggccgcatacaagggcaccagcgtcaaggtggtcgccgtctatccgggcggcatcgacaccgccttctaccgtgatagccacgactacgtctccgaagccaagcagcacaccttcatgcagcccggtccgctggccgaagtcatcctcttcaacctgatcaacgaggccaacctcaccgtcaccgacatcgagatcaaccgcaacagctgagctggcaggttatacacatatccaccgattcggccgagctggttgcgcgcagaagttggttatgccatcgtgagttgtatccgtgaataacgcggttcacggatacaaccattgggggatggcatggagtcctatgcatacaacacgttcttcacacttgatgaggcgcgagacctcgcccagaaaacactggaacaatgccgtgccagatcgatgcgcacttcacaggagctttgcttcagccatggcaccaggctacagcttgctggcatgacggccacgctgaattacaagcccaactatgaccccaacaaactgcacgttacggtgtccggggctgaaagattgtcgaatcttaccgaaacgcaatgccattattggggccatggcattgaccagacgatgattgatgatcttatcgccgtggtttcagtggaacaggcgctgtgtcagatcgcacagttcgtcgatgtggaaagtatggtcattgccttggattgggccacctgccgtaatgagcatttgaaacagacaacgaaagacaagatatcgttgttcctcaccgatataggtaggttccccggtatcagattatttcgcaaagcgctctcgttgtgcagagagaacaccgattcgccgcaggaaagcatccttcgccttgaatcggtaaaacgtggattacccgaattggaggtgaatgctccgatatacctcccattgcagaacaaagaagtgattgtggacatggtgtatccgaatgatcatgtgattctggaatacgacggacggtaccactatgaccgaaaccgatgggaaggagatatcgagaaaaggaacaacctctccttcgcgggctataagacttttcccgccacaagaagaacgttcgctaccacgcagaatctggatgaatacttcagaatcgttggaagtgcaattgcggaataccgcaataccgggtcattttcacaatgagatatgaccggacgcattcattaggtcgattcttcattcattaggtcggtgagctctgacagtcaccactggaatggtgccattccaacaccgacaatcgcagcctcatgacctaatgaatgaagaatcgacctaatgaatgattggaagcgttccgcgcaacgttatggcacccgcaagaagccggaacccggaatatgtctgttatcgtgggggccaagcaacaggtgaaggattgagtatgcacatcggtgacgatgagtttgaacgggccattgaacaggtgttggatgatttgcctgaacggtttgcgcgggtgctggagaatgtcggcatcgtcgttgcggacgagcccaatgagcgcgaactggccacaatgagcaatccgtgcggtgagctgctcggactgtatgagggcatacccatcacgaagcgaaccacgggctacagcggcgtgatgccggacgtcatcaccctgttcaaggggtcgcatgaacgcgtatgctcaacacgggccgagctacgccaacagattcgcaaaaccgtgttgcacgagatcggccattatttcggcttcgatgacgagtatctgcactcgcacggctactgaagcgctgctgtttcactagcggggagccgtcataccgccgtatgttgccagatctactgcaagtggtgcaacgcacggatgatggcgcaacggtcctcggtggttccctcgttggcgcacatggtgtgcgtaccaacgcggattgcgcaaggtctcggtgccggtggcctcatccgtggcgacgagcgtgtgcagatcgttggcgtactggaaatgcaggtggctgagcagcccgccctcggcgaacgccttgcgcgaaggcagagggttgatggccagcagccagcggaacgggctgtcttcggcggccgggcttgaagccagggccgcaatccggtgccgatacggttccaagtcaaacgcccgcaatcccatggcggccacgcagccgggggagagggacaggaattcatcggcctcgtaatcctgcacgatatgtccgccgtcgaataccacgtaccggtcggccacgccgttgagccatgcgagtcggtgatgaaacagggcagcatcatcgtgacgcccacggccagcgcggagaccacatgcagccacggcagtcccagggcatcggggtcgagcattcccagcgcggtgagtacggcataggtcacgccgaagttcaacgcggttcgccatcgggcggccgccagcaggggcaacaggaacagcacgaccatgacgatttgcgtggcgagccctacatggaagaacagcatgaggttcgccaccagcagaaggaagagtctcgcgcgcggatcgagcgtccggcgggcaggaagatggagccgaagccgctggtgaacagggtgctcaccagtgtggcgatgcacaccatcacgaagtacagggccgcaaacacgccgatggtgatgaggtcggagacctccagtttgccggatttggcgggcttgttgagctggtcagaggtttcggcgggcgtgttcggtgcggtcacgatgttttccgtttcgtatgcattgacaatattcctctcgccaatctaacgatgatttcccgcaaggcaatagactgtctgtgatttttgcgtgcgaaacaatagagctcccctctttgaaggggagcctgagtgttccatcaaaaccgaatgctcgcccggaactcgccttcggccggttggccgagttccagcctggctcccatcgcctcgcatgccgcactggcgatggacaggccgagccccacgccgggcacggcgctgatacgcgagttctcgccgcgatggaacggttgggtcagctcgttcagatcgtccggcagcatctcatccgtggtgttcgtgacggtcagacggggtccgcttccatcctcatccgatacgacggttacgtcgatcgacccatcatccgtgttgtgcacgacggcattgcgcagcaggttgccgaccgccagttccagcaacgccgggtcggcggcgatgagaaacatgtccgcgtcgccgccggccttgttcacggttatggtgatgcgacgcttggtggcggcatcgtcgatatccgcaagggagttgccgacgcatccgtacaaatctgtggatgtgcgtgccgttgatgcgggactcatctgtgtcacatcgcccgcctgcttgccgccgatggtcccgctttgaatacgggacaaggtcagcagcgcctgcaccagttgcgcgccgcgccgattggcatccagtgcgcgctgtaccgacggtcgcacatcctcggggaaccgcccctgggccaacggcgcgtccagattggtctccaccgcggcaatcggcgtgcgtagctcgtgcgaggcattggacacgaaccgccgctccgcttcggatgcggcctgaatccggtcgagcatgccgttgatggcgtcaccgagctgcgtgacttcggaggattggccggcagctcgaccgtccgtgcggctgtccgtgctatgatcccaatcctcggtcccgcgtctgcccgcacgccggaactggggcctacggcgagatggcggcccattcacgtcgatgcgcgtatcaagtttggccgggtccaatgccgccgcctgcgcgctgatggaggtcagttgccgggacatgcgcgaggtgaccagccagatgatcagaatgctggtgatcccgaagaacacgaagatgatggccgcgctgatgcgcaatccggtggcgatgttgtcctggttccacacggagacgccatacggggtgttgatggtatacgacccgtccttgccccattccacctgatagtcaccgtcgcccatatcgccgccgacgctggatgttccagtgatatcgttcagacctgtgccgcttccccgggaaaacattcgcgggtcggaatccgggcgtttgccggtgccggaaccgctgtgctggctttcgacctgcatctcagggtttttggcggtgaccgtcgtggcgtacgtgaacatgctgttgaccacaatggtctgcacgagggtcgccgatcccatggcgatgaggaacacgagactgatggccaacgtcagtttggcgcggaatgatttgggccgcagtttgccggcaagcgcctgtatacgacctgatgctttcgccgtgttcgtcgccttcattgcagccggtatccttccccgcgtgtcgagacgatggcctcgcgatcggcgagtttgcgccgtagcgaatagatggtggttttgatcacgtcggtcgggtcggcggcggtcggctcatcccaaaccgcatcgtagagttcgtgcgcggtcacgtatccgccttccgcacgcatgagctccagcaatatgccgtactccttgggtgtgagtttgacgagcgtgcgcccgtggtcgcggaacacgagccggcgtgtggaatcgagggtgatggcgccgcgcgtgagcacggctgcggtcgcgttgctggtcccgctgcgccgttgcagggcgcggatacgggccagcagttcgggataggcgaacggtttggtcaggtaatcgtcggcccctaggtccagcccgctcacgcggtcgctgacctcggcggcggccgtcagcatgattacggccacgggaatgcggttcgcggcgacggtggccatcaccgcgtcaccggacaataccggcagatcacggtcgagcagcatgatgtccacgttcgtgccggcaaggatcttcaacgcttcgacgccggtggttgccagactggtcgcgtacccctcgtagcgcagcgcgtcgtccaacgcggcggccagttcgcggtcgtcctcgacgatcagaatccgcatcatgtccccttccgagccttcccgaaccaatggcatcacccaacattttcccgattctacggtaaggcgaaagtaatccgtccgcttaccgacgctccacggtgagggcgattggatggaagtcgtcacaatcgactcacggaatggagacggtaatgtccactactcatacgcgcctggtacggcgaatcgcaatgcttacgtccgcactctcgctggcttcgatgctgggcgcctgctcgtcaccgctggcggcagtcggaacaggctcaggtgccgacgatcggtccgatgcgacgaccaccaccgacgccacggcgaagcgattcgccgcctgcctgaccggcaaaggattcgacgcgcgtacggctgctggcgtgtcgtccggctccggctcgggcaaacaagccccgaccaaaaacgcggtcgcactgcgcatgatcggcaccgacggcaagccggtcgcctcccaaggcaacagcctcagcgcatccgacgacggcccgcaactctacccgaacgctgcctacacgtcgatggaagacgacagcacctgggtggtgttcaaggacgccaaggcgctcgccggctcaccctacggatccaaacagcgggaatacgccgactgcgaggccaagaaccccgacttcacccagcccattccggacatggggccgcaacaccagtattccggggaagacaagcaggcggcgctcgcctacgcccaggccgcgcgtaagaagggcttcgactgggtcaaggacccggacgccgatacgcccacctcaatcacgattcccggcaccgtaagcgaatccgaactgcgccgattcctcaaggaatgcccgaccgatggcgcgaacatctcctatgccttcgctggcaccaccgaggaattcggctatgactacaacaaagtcctctccgaattcacctccggcagcgcgtccaccgaagccgcgccccagcaatgagacggccatccgataacggacaaaggagcaatcatgacacggacggaagcgcgcagattcgggaaacaccgcagaatcgtgacgatgattatcgcggcgatcgccgtgatcggactggccgcggtgtgcgtggcggtgaggccgtggacgttggccgggcacgtcaccgcgaccgggcagactggccgatcgcagcaggtggatgtgtccacgctgcgcacgcaggaggtgaccaagggcgtgctcaacgccgagacccggctcggcgcgagtctgcaatacgatgacgcctccgatttcgcggccgcttccggcacaatcacccaactgccggtggccggcaaacagatcaacaccggcgaacaggtgtacgagatggacggcgcgcccgtgccgctgttccatggcgaccgcccgttctggcggacgatcggcgatggcgtctccgacggcccggacgtcacgcaactggagcagaacctgcaggaactcggattctacggcggcgaggtcggaccgcatttcaactggctgacccgcgaggcgatccggcaatggcagcgctcgctcggcctgaccggcgacgcggtcaccggcacattcgacccgaatacggtggccctggccgcggccgcaccaatccgcatcacggcggtgaacgcgaaactcggccaatcacaggtcagcccggcaagctatacgggcgtcaccctgcatgcgcaggccacgttgaccgccacgcaggcggcgatgttcaaagccggagacaaggcgcaggtcgtgctgccggacaacaccaccgtcgaaacgacgctcgcctcggtcgatcagggcgggcagaagaccggcgacaacgggcaagccacacagccatcggcgcgcatcgacttcccggaccagtcgcaggtggcggctttcgggccgacggccgtgcaagtcatcatcccgaacgccgatgcctcgaccggggaggcgctgatcgtgccggtgaccgcactgatcgccagcgccggcagcgcgtatgcggtcgaagcggtacgcggcggcaagttggtgcgtgtgccggtgtcaatcgggctggtgtccgacgcgcaagtgcaaatcaccaagtccgacggcctcaaggcgggagacaaggtggtggtctcatgaacgacatcgagtttgcccccgctggcccagagcatggggcattgctgacgttggagcatgtgacgaaggcgtttccaggcaaggacgggagcgtgctggagatattgcatgatacgtcactggccatcgatcgcagcgagctcgtggccatcgtcgggccgtccggctcgggcaaaagcacgctgctgtcgttactgggcacgctggacatgccgacttcgggaatattgcgatacgacggcggggatgtgaatgcgatgggtgagcggcagcgcagcgtcctgcgggccgcgcgcatcggcttcgtgttccagcagttccatctgatcgccaccgtatccgccttggagaacgtgatgacaggcctgcaatacacaaccctgccgcgcggcgaacgtcggcaacgggccgccgaggcgttggaacaggtcggattggggaaccgcctgcatcaccggccggcccagttgtcgggcggcgaacagcagcgtgtggccatcgcccgcgccctggccaaacggccggacatcatcttcgccgacgagccgaccggcgcgctggactgcgaaaccggccacaccgtcgtcgacctgctgctcacggcggccgattccggcgcaagcctggtcatggtcacccacgaccagaccatcgccgcacgtttccccaggcgtctgcacatccaagacggcctagtcaccgaactcgacaagccgaatcaagccccctctgacgaggggctgtcagccaaaggctgactgggggagagatatgagtgaacgtactcctatgagtaaaccaatacgcacgcgaattgcggatttgatgcatgcggcttgggttggggccgccgggcgggcgtcccgcacggtgctggcatcgctgggcatcgcgcttggcgtggccgcatatgtggcgttgtccggcatcgccgcatcgaaccaggcagcgctcctcgcccaactcgacgcgcttggcgcgaatctgtcggtggtcgcccccggcgtggacgccgcccagcagaaggttccgctgccggattacgcgcccacaaccatcgcccgtcagccgcaggtcgaacgggtcggtgtcttcgacaccgcgccagagaaggtgcagatcttcaagaacgggctgtgccccaaaaccaacggcaacgcgctggccctcgccatcatgcggcccggcgcactcgacgccgtcggagcaagcctcgcccaaggtcatggcatcgacgcgaacaacgagcacctgcccgtcgccgtgctcggctcggacgccgcctaccggctcggcgtcaacgagcccggcgaccgcatcctcatcgacaacgcatggtacggcgtcatcggcatcctgaaccccacgccgcaggctgaaagcctgaacgccgccgtcatcatcggcgagcaatgggcgctcggccggtaccccgaccagaccgacaccatcggacggatcagcgccatctacgtgcgcaccacgcccggcgacgccgaaggcacccgccgcacgctcgcccacgccgccaacccggccggcggcaacgtgtccgtcaccgcgtccgccgacctatccaaagcgcgcaacaccaccaacgattcactgaccacgctcggcctgatgatcggcgtgatcgcgctggccgtgggcggcatgagcatcgccaacatgatgattgtcaccgtgatggaacgtcgcggcgaaatcggcctgagacgcgcgctcggcgccacgcccggcaacatccgcatgcaattcgtcaccgaagcggccctcctgtccacactcggcggattcgccggcatcgcgctcggcgccggcgctgccatcggcgtcgccgccagtgccggccagccgatcgccctcgactggacctccctgccgctcgcctgggccgccgccatcctggtcggcatcctcgccggcctctacccggcctcccgcgccgcccgtctcaccccgaccgaggccctgcgcggcgaataggggcgacggctggagtgaacgatcaccatgagtgcgcagcctcaatgtcacttttactgcacatgatgacatgtgcagtaaaagtgacatattggtgctgggcgggagagagcacgcgtggcgcggacggggtgtggttcgcggctatcggctagtatggtgcggtcacgacagagggaggcatgctgtggccgatgtgatgcgggagctggaacggctgcgaccggtgtatgagacgggcgtcctgcggttgctgttgcgccagaacgcgatgctgtacgtgtctctgctgcgttccacgttcgacccgctcaccggcgagctgccgcgcgagaccgtggaggagcggttcgcgcaaagtctgaacgctctggccgacgccggcgaatatgcgccgcgcgaggaccagaccttcgccgaggccgcccatcagatcctcgccgacctgacccgtgaaggcgaaggcgactacgcctggctcgccaactcgcatgatgcggccacacaccgattcctctaccgtttgacggcccgcgcccaccgcgccatcgaggcactgagcaggctcgaagacgaatcacgcgccctgtccggcgcgcaggccaacagcatcatcatggaaatcgaacacgcgcgcatgcagctgaccgccgaccccggcgagcgcatcaaactcctcaaccgtgaaatcaaggaacgcaagcacgagatcaaacgcatccaacagggcaagcagcacgccacgctgagcgaagcccaggtggaggacgtgatcgccgtgatccacaacacgctgcgcggcgtacccatcgacctgcgcgaactcgtgctcgacgagcgggacaacggcgacgccttgcgccggcgcatgcagaccggcgacatcagcgtggacgagaacctgacccgctaccacgacgaataccgccgctcgttcagcgaatcggacagcggccgccgcttcgaggacgccttccaggtgatcatcaccgacgagggccgccagcaaatcgacgaagccctgcgcgccatcgccaaaaccccgtatctggccggcgaatccggcgtgctgctcggccagatccgcgacgaactggcccgcatctacgacggcatcgaagccgtgcgccgccagatgcgcgtctccgacgaggcgatcagccggctcgtgcgccagcaaaccgacactcgctaccgtacgatgctcacccgcttgaaccgactgtacgcgcgcctcaacgcggatgcgaaaacccatatgggagacgcctcgcgcccgtacgacacggccaccgcggacgcgctgttcgcgccattgccgatgcgcccggccaaatccatgacccgcgccaccgcacccggcctgagcgacctcgccgccgaagccccgcaggcgactccggtggccgatctgcgggatatggtcaacagcggcggcccccgattcctgcgcatggtcagcctcatccggcgcaacccggtgaccgttgacaggtccgatgacagggccaacgcaacccttgtggacatcgccgccagcttcaaccggctgcccgaaagcgaacgccgcgaaagcgagatcgtcggcttcctgggtgggctgggagccgtaagcggcagcgccatcgccgacgagccgtccactgacggcgtcggcatcgacagcgccatcgccaccgagccggccccggcgcagcgcggcgataccgcgacttggcattgcgtatcgatcgacggcgagccccggcactggatcactagaccggtgctggccgacatggacgagctgaacatcattgtggaggaaggatgaccgtggccgaggaacacgaggagcacatggacaacgccaacccgtacgccctgttcgaaggcgacaccggcgacatgccggccgaggcacgcatggccgccatcgccctcaaacgcgaccgctatatcagcgggcccacctacgacaccgtgctcgacaaccgcgacgtcgtcgtacgctccctgaacaacgacctgctcgacttggtgatcaacgaacgctaccgcatcatgtacgccacgcccgtggccggcgacgacgtgaccctgcgctcgctcaaaacccgtgtcagcctcaaacgcgaggaggccgcgctgctcgccttcctgcgcatccgcgtcctcgaatacgagaacgtgcacgccgaccccgccgactggctcgtcagctttgaggagatccgcgccgcgctcgccaccggcgccggttacctggcagcccgcaatgacgaggaaggcgtggcaaagcagatcggcgccatcgtctccgcgatgatcacctacgggtatttggcgcgcctggacgacgaagccatgtaccagatcacgccgctcgtgcccgtggtgctcgaccgcgaactggccgacacctggctcgacgtcgcggaacacggcgacggcgacacggaagatgacgatgacgatgagaagggagccgaatgatgcaggcgacagacgtgcagatgatcgcggaccggtggatgctggaatcccgccgactcatcaactggggctcctatgagggctaccacgaattccgcccctccacggaccacaagctgccggtgaccctgctcgccggcgccagcgaatccggcaaatccacgctggtcgacgcgcagatctccctgctgtacccgaccggcacgccgttcaacaaggcctcgaactccggccgctccgaacgcagcgactacacctacctgcgcggcatggtcggcgtgggcagcaccgaaaccggcgacgagccgctctacctgcgcggtcgcgacgagaacggcgcgccgcaacccgtgtggggcgccatcgtggacacctatcgcaaccagaccaccggccaggtgctttcctgcgccaaattcctctacctgatgcccggcgacggccgcggcgacgtgcgccgccagtacgtggtctggggcaagcccgtggaccccaggcgcatggaccaataccgtgacgccccgttcacaccagcccagctcaaagccacctaccccgactgcctcacattccccagcgccgaagcgttccacacacacatctggagcgcaatgggcctgagcgaggccgcctgccgactgctgcacaagatccagtccgccgacgcgccctcccggctcgacgacatcttcaaacaaggcgtgctcggcgtgcccgaagccctggacctggcccgcaccacggtcgaggactatgaacgttacgacgagaacttccacgccatggacgagaagacccgccgcatggacacgctgcgcggcatccaacaggcctacggcgaatacgccgccgcacgcggcaaggcccgcgccttcgaaccggtcaagccggccgtcgacggaacggtgccggccgtgctgcgcgactgggcattggcccgcatgcgcggcgaagtcgccgtccaactgcccgccgaccgcgccgaacaacagaacagcgaggcggaagccaagctgctgcgccgccgaaccgaagacctgcgcacccgcctcgacatgatccgagaccagatgcagggtctggacggcggcaacctgacccgactcgaactcgaactcgaccaggcccgccgcaccctcgaagacgtgcaagccaaccgaacacgaatcgaacaaacgttcgcatccatcggcgagacgctgcccggcaacgaacagtcctggaacgaacgccgcatcaacgccgtgaacttcaaacgcgaatacaacaaacgagacggcgaatgcgaggaagccctcaccgccgccatcaacgcacgggccggcgcacgcggcgacctcgaacgactgcaacgcgacttcgaccggcaacgctcccagcgcacccgcatctcccagcagatggacgaaacccgcgccatgctctgccgcgccaccggactcgcccccgccgaactgccgtacgtggccgaactcatggacgtgaacgaacacgaggaagactggcgtctcgccatgaacgtcgcctacgcgcccatcgcccagaccatcctcgtcgacaagcgccacgaacagggcttcgccgccaaagtcagcaccatcgacccgcgcaccatgccccgacgcacctggcagttcgtggacaccgcacgccactacgacgacaccggcgcgcacgcgaacatactcaccggagaacaggacggcgactggctgtccggcaaactgcgctaccgcgacgactcgcccttcgccgactggctgcgctcgcagacccaggacgaacgattcgacgccctatgcgtcaccgccatcgacgacaccgaccgcaccaaccgtcaggtgcaggccgacggtcagatcaaatccggcgcacgcggccagcacggcaccaaagaccgcgcccaggtcatcggattcgtcaacgaaacctacctcaacgcgctcgcagcgcaggtcgacgccgcccgcaacgcgctcagccaagccgacaccgactacacggccgccaaaacacagtccgataacctccaccgcgaactcgaactggccaaccagctcgcctacacgtcctgggaacgcatcgacatcgccggcgtgcaacggaccatcacggacacgcaggacgccatcgcatccatcaaaaatgatcccaaactcgccgaactcgccaaacagcgcgacgaactgaacgccgaactcgaccgtgtggaacgccagcgcatcggatccgaccaggccgcggcccgcgccggcagcgccgtcgaagcggcgctcatctggctgcgcgaccatgccgacaccggcacgacggacgccgccggtgccaccgtcgacaatgacgatgacgccgcttccggcccgctgccggacgaagtcacggcggcgctcgccgaatcctacgacaaccgattcgccgggctggcggacgcggccatgcgcgcgcacatgatcatcggcgcgggcgcggcaggaacgcaggcgccgggggagagcttccccggacgcaccatcgccggcatcggcaaggacatggcctcccgcatcaacctgctgaacggccaggccgacgccgcacgcaccggcgtcgaatcgaaaatgagcacctacatcgcgctctacgcggccgacgatgattcgctgaccgccagcgtggaggactaccggtactatctcgacgaactcgccagcctcacccagctggccgcggttgccgccaccgacgccgaataccggcgctgcctcgaacagctgctcaggagcttcctgaccatcaaacgcgccatcgacacggatgccagcgacatccacgaccagcttgaccgcatcaacgccatgctcaagggccaacagttcggccccaagcacggcagcctgtccctgcacgcggacgtgcgccgtcccgagcgcaccttctgggcgcagctcatccgcgtcatcggcaccctgaacgattggaaatccgccgacgtcaacgattccgacgcctcgcgcaaggctttcgcggcctgcgcgccgatggtcgggctgctgcgcgccgaactcgcgcaggtcaaggacacgaacggcgtgaaaagctacggcgcccgcaacctcgacccgcgctgccgctcgtccttctacgccatcgtgcatcatgccgacggtccggacgaacgcatcacctccaccggcggccgttcgggcggcgccttgcaggagctcacctcgttcgtatacggcgcggcgctcatctacctgcttggcggcggcctgaccagcgagccctcgtacaccacgctgttcctcgacgaggcgctcatcaaggccgacggccgttacacgcagcgcgccctcacggtgctgccgcgcctcggattccaggtcatcgtctccgccccggaaagcaagaccggtgaaatcctcgaggtctccaccaaggcctacgtgacctacaaggaccccgacaccggcctcacctccctgcgcgaggccgtgctgcatcagaatgacatggacgatgaatcatcgtcggatatattgaaggatgacggggttgccgaatgagcaatcccggcgtcgccggtattaagacgattcggttcgactcgacgatgttcgaaagcaggtgatgggaactatggccggcatgaaagacatcgctgcgatcaccacatgcgtgaagaaacatatgcgttcacatatgtacgacatcgaaccggcatggccatttcccgtgccggtgggattgccggaccaagcatttttggaaaccaatgcgattgcagtgcatgacaacaacaatgagatacggcaatgggcaagcaagaatggttgcgaaatcataaccaagcatcgcaccataggcacctctgtcgagttgatctccaaagtcgtcgttcctgacgaatcaatagccatgcgtgtggttggtcgtacgctggcggcggaatatcgcgaagcgcaccgtcgcacagattccactgacaggattcagcggcaaatggctgaatgagtcaaaaaccaatcgtcgtaaggccatttgccgactgctcggtgtcgaaacgttgggtctgtcaaaacggccgaccgaactgcggttccgttatctcgatccgggccacgacgattttggtaccgatcgtactgaacgcagcgcgaagattgctatgcgggagcctaagccgacgcccggccttcaatcggcggagcgacgtctttatgaacgactgtgtgctgacaaaaccatcgcttatcggcgtatcgaacaggaacgcattcccatgcgtgatgcagttgacgaattacgcaagcttggcatccccgtggagtccattgaagattttgtcccggttcgaacatcaatcgtttgacggacgtaccggggcagaatccgttgtcccggtttgtgatttcgggtgtttttcgcgaaccgggacatgttgtgttgccccggtatgggcgtcaatcgtttgatgcgagaatcgggacaacatggcgattctgagattggctttattccgccgtttccgttcgcgttttatgtggttcgtggaaactggaatgtcctggttctcgaaaacaggccaaaatcacgaaccgggacagcgggttttgccccgatgcggacgtcaaacgattgacatgtgaaccggggcaaatcagaggaggagaggtcttcgggatagagcttgactggggctgggcgcacggttgatgtcgcgtgggccggctcttgcgtttcggtccactgatggtccggaattttgcatactatggttcggttttccggcctgacacgccatcgaacaagcgttcgaatttggtcgtgtgttcgggtatccttgggacagatttggcgcgcgcataaccgtgcgcgcgggaacggtgagatggaaggtggggtgtggctgtggcggcaacgcggactggcgcaaggcgcgcaacaagcgcaaagggcgcgaaaaccagcaagggcaagaacggtgaggtcatcgtcgaaaaggtgatgaccagcgactccttcctgagccgggaaatcaaaaaggcgccgctgatcgaacacgatggttcgctggtagctgatatctcgcacatcccgaacgatctcaagatcacgattcagggtgcgcgcgaacacaacctcaagaatgtcgacctggcgattccacgcaaccgtatggtcgtgttcaccggcctgtccggttccggcaaatcctcgctcgcatttgacaccctgttcgccgaaggccagcgacgctacgtcgaatccctgtccgcctacgcccgccagttcctgggtcagatggacaagcccgatgttgacttcatcgagggcctgagcccggccgtctccatcgatcagaagaccaccaaccgcaacccgcgttcgaccgtcggcaccatcaccgaaatctacgattacctgcgactcctcttcgcccgcaccggcatcccgcactgccccgaatgcggcgagcccgtcgcctcccagaccccgcagcagatcgtcgacacgctgctcggctacccggagcgcactcgattccagattctctcgcccgtggtcaagggccgcaagggcgagttcgtggacatgatcgagctgctgcgctccgacggctacgcccgcgcgctcatcgacggcgagatgacacagctgtccgacgacatcaaactcaccaagcagaagaagcacaccatcgaggtcgtggtcgaccgactcgtggtcaaggacggtatccgccaacgtttgactgattcggtggaaaccgccctcaagctcgccaacggcagcatcgtcatcgacttcgtggacgaggaggaaggcagcccggcccgccgccagccgttctccgaacaccgcagctgcccgaacgggcacacgctcgaactcgatgaggtcgagccgcgcaccttctccttcaacgccccctacggtgcctgccccgcctgcaccggtctcggcttcaaactggaaatcgacccggacctcatcatctccgacccggacaagtcactggccgacggcgtcatcgaaccgtggagcggcaccaagatgacctcccagtactacggccacatcctcgaaggcttggccaaggaaatgggcttctccatgaagaccccttggaaggacctgccggacgacgtcaagcacgacatcctctacggccacgacttcaaggtcaacgtctcctaccgcaatcgctggggacgcctgcgtgaatactccaccggtttcgaaggcgtgatccgcacgctcatgcgacgccacgacgaaaccgattcgcagtccatgcgcgaatactacgagtcgtacatgcgcgaagtgccctgccaggtctgccacggacgtcgtctgaagcccgaggtgctctctgtcaccgtggacggcaaatccatcttcgacgtatgtgacatgcccgtcgtacgcgaactcgcctggatcaacggcctgaaactcgaaggctcggcacagctgatcgccggcgaagtgctcaaggagatcaaggcccgactcggcttcctgaacgacgtcggcctcgactacctgaccctctcgcgcgcggccgccaccctgtccggcggagaagcgcagcgcatccgactcgccacgcagatcggctccggcctggtcggcgtcatgtacgtgctcgacgagccgtccatcggcctgcaccagcgcgacaacgaacgcctcatcgaaaccctgcaccacctgcgcgatctcggcaacacgctgatcgtcgtcgaacacgacgaggacacgatacgccgcgccgactgggtggtcgacatcggccccggcgccggcgaacacggcggcgaagtcatctactccggccccgccaagcacctcatcgaagccaagcgctccatcaccggcgactacatcgcccaccggcgagagatcgccgtaccctccaagcgccgcaagatccacaagacccaggtgctcaaagtcgtgggtgcccgcgagaacaacctcaagaacatcgacgtgagcttcccgctcggcgtgctcaccgtggtcaccggcgtctccggctccggcaaatcctcgctggtcaacacgatcctctacccggtgctcgccgacaagctcaacggtgcacgcatcgtacccggccgccacaggcgcgtggaaggcgtggaccaggtgcgcaaggtgatccacgtcgaccagaacccgatcggccgcacgccgagatccaaccccgccacctacaccggtgtgtgggacaagatccgcacccttttcgccaagactcccgaagcccaggtgcgcggctacggccccggccgcttcagtttcaacgtcaaaggcggccgatgcgaggcctgccacggcgacggcacgctgaagatcgaaatgaacttcctgcccgacgtctacgtggactgcgaggtctgccacggcaaacgatacaaccgcgagacccttgaagtcacgtacaacggcaagaccgtggccgacatcctcaacatgcccatcgaggaggccgccgacttcttcaaggcgtacaccggcatctcccgatacctgaagaccctcgtggacgtcggcctcggctacatccgactcggccagcccgcacccaccctgtccggcggcgaatcgcagcgcgtcaagcttgccaccgagctgcagcgccgatccgacggcaaaaccgtgtacatcctcgacgagccgaccactggcctgcacttcgaagacgtgaacaagctgctcaaggtgctgcagtccctggtggacaagggcaatacggtcatcgtcatcgaacataatctggatgtgatcaaggaggccgactggctgatcgatctcggtccggagggtggcgacggaggcggcaccatcgtcacgcagggcacgcccgaacaggttgccgaatgcgaagcctcatggaccggcaagttcctgaagcccatgctttagccttccattgctgctgacctcgggtgggtgggagtggtatgttgctggacatgctccgggccgctcaggccaagtctttacggtccggcaacacacaccccaacccacccaatccctgatgattggttttgcttaatagcgaggaggattatgacgaacgatattgagcggcatagtccggatgagtggcggaagaccgcggcggcgttaatgccggaaagcgtagctgtgggcgccggggaaacgacggcgaaggtgaatgcgaatggggcacctttgctgggggattctcgcgacctgttccgacccaagacctcggatattcccgccaaacccggtgtgtacaaatggcgcgacggggaagggcgcgtcatttatgtgggcaaggcgaagaacctgcgcaacaggctcaccaattatttccagccgctgtatctgctgcatccgcgcacgcagaccatggtgctgaccgcacgcagtctggagtggacggttgtcgccaccgaactggaatcactgacgttggaatacacgtggatcaaggaattcgacccacggttcaacgtgcagttccgcgacgacaagacctatccgtatctcgcggtcagcacgggggagcgaattccgcgcgtgtgggtcacgcggtcgcgcaaacggcgggatacccggtatttcggcccctatgccaaagtgtgggaattgcggcacagtcttgaccggttgctgcgcacgttcccggtacgcacctgcaccaccaacgtattccacaaggcgcaactgaccggacggccatgcctgttcgcctccatcggcaaatgctccgcaccctgcgtgaaccgtatcgaagcggacgaacaccggcggctgtgcgaacagctggtcggcgtgatgaccggacgactcggacggccatacatcgcccagttgacccgcgacatgaaagaggccagcgccgaactcgaattcgagaaagccgcccgactgcgcgaccagatccaaatgctggaaaccgtggtgcaacagaacgccgtcgtcttcgaccaggatgtggacgcggacgtgttcggcttcgccagcgacgagctcgaagcctcggtgcacgccttttatgtgcgcgccggctctattcgcggcgaacgcaactggagcgtcgaacgagttgaggacatcgatgacgccgacttgatggccgaccttctggtgcaggtgtattcggacgccgccggggacaatcacccccagtcggccgcgaccatctccaccaatcgcgaggccatcggctccacacagaccatcacggccacggacgctgtggcacgcgcccaggccacccgagaacgcaacacccgtcaggagaccaccggacgcgcggacctgctggcacccatcgcaccggtaccgcgcgaaatcatcgtgcccgtcgaaccggctcgccgcgaggaactcgaaggctggctgaccaatctgcgcgggggcgcggtgaccatccgcgtggcttcgcgaggcgacaagaagcagcttatggaccgcgccaacgagaacgccagccaagcactgcaacgcagcaagatgagccgcatctccgacatgggcgcacgcacccaggccatgaacgatgtggccaaggcattgggactcgcgcaagccccgctgcgcatcgaatgctacgacatttcgaacactgtgggcggtgccttccaagtggcctccatggtggtgttcgaagacgcgatcgccaagaaatccgaataccgacgctttgccgtccgaggcaaggacggcaaaggcgcggtggatgatctgtccgcgctttacgagacgctcacccgccgcttcaggcacggcaacatcgccggcgactccggcgaaagcatcgacgcggaacagcgcgcggcctcggccgccggcaagatgaccactgccgtggcggcggagacaatcgttgcgaacggtaacgacaatggtgagggcggttccgacatcagtggcagggggcacgcggtgccggtcggagtgcagaacgatgcacgggagtcctcgcccgacatcgtccagcagaacacaaaccggcatcactttgcctacacgccgaacctggtggtggtcgacggcggtaagccacaggtcatggccgccgccaaggcgcttgaggactgtggcgtgatcgacgtggccgtctgcggactggccaaacgcttggaagaggtgtgggtgccggacgacgactatccgatcatcctcaaacgccagtccgaaggcatgtatctgctgcagcgtgtacgcgacgaatcccaccgcttcgccatcacctaccaccgccaacagcggcgcaaaggcgccctgcgcagcgcgctcgacgagattcccggcatcggcgaaagctaccagaagcggctgctcaaccacttcggctcggtcaaagccatgcgcgaagccagtgtcgaggacttcgagaaggtcaaaggcatcggccacgccaaagccaaagcgctgtacaacgcgctgcacgagcagtgagccggcccggtccagcagcccagagtgaattttcggttgcggggcctgtggttgacatattcgaagcaaagtgtcggctagcatggaaacagacatcaaggaggggatatggccaatcatcgttgcgctgtactcggcaaacccgtcgcgcactcattgtcgcccgtgctccacaacgcggcttatcgttcgctgaaactcgacgattggctgtacgacaagcacgaggtgggggaagacgacctcgacgctttcctcaaaggccttggttcgacgtgggctggcctgagcctgaccatgccgttgaagaagaccatccaaccgtacggtgttccggaaaatctgtgggccaaggaactgaaggtggcgaataccgcggtattcgactggagtgtggctaccgatgattccgcttggccgaacggcaagccgggcatcaagctgtacaacaccgatgtcatcggcatccaactcgccttcgaccacgccaatcgcgaactcggcgaacaccacaccgcatcgagaagcggcgccgcgttgatcctcggcaatggcaacaccgccacttcggcgttggccgcatgctgcatgatgcccgaaatcggccatatcatcgtcgccgcccgccaccctgggaaaaacaccgggcttaaaccagtggccgaaaagttcgtcaacgtgcataacccgtacagcgaaatcgaattaggcgacgatcaggccctgctcgaggcagcccgcaacgccacctatgtcatcaacacgattcccggacatgcggccgacaacgtcgcggatgccctcaccaatgccggaaccgagccattctccggactgctgctggacgtggtctacgatccacgccccaccaagctcatggaagcctggcgcgctcatggcggtcacgccatcggcggcgaagaaatgctgctgtaccaagctctcgtacaggtattgctgatgaccggtatctgggatgacgacccgcccagcgatgccgaccagcgtctgcaggacaccaccaccgaagacgaccagctggagatcgcgatgcgcaaagctcttgaggaggcgttgtaatgagtcaacagacaacaatccgcgataccggcgaggcggccgccacgaatgcgccggcgaattccgcgacatccacatcgactccggacaaccagccgaccccgcttgatgccttcgaggtgctgctcatcaccggtatgtccggcgcaggccgctctcatgccgctgactgcgtggaagacatgggatggtatgtggtcgacaacctgcctcccaaactgcttatcccgcttgtcgacatgatgaccacctccggttccggatcggggtcgggcgtccacaagcttgccgccgtcatcgatgtgcgctccagctatttcgacgagctggccgccgtgctcggccatctggatgatctcggcgtcaaaacccatattctgttcctcgacgccagcaacgaagtgctcatcaagcgctatgaatccgtgcgccgcccgcacccgctgcagcacggcaaccgactgatcgacggcatccttgaggaacgtcacctgctggaagacctcaaggagcgagccgactgggtcattgacaccagctccctgagcatccaccagctgtccaccaaactctacgagacgatgctcggttccggccccaccaccgtggcggtacacatcttcagcttcggcttcaaatacggcatgcccatcgacgccgatttcgtggccgatgtgcgttttctgcccaacccgttctgggttcccaacctgcgcgagcttaccgggcacgacaagccggtcgccgactacgtgctttccagcaagggagccaaggaatttctcgacgcttatgagaaagctatcgagattgcgttggaaggatacgcccaggaagacaagcactatgtaaccatcgccgtcggctgcaccggtggtcagcaccggtcggtggcgatgagcgaagagctggctcgccgcttacgcgcacatgggctcaacgtaaccgtttccgcgagagaacagcataagcgtcactcatcgtaagcaggcgtcgagcggtcatcgggcaagcgttcggtgaccacactgcgagaaagcaaagcccataatacgtatcaaacgggttcgcttgtccaccagattaggtatcacagaaagccgatggcttccgaccgtatgacagcagataacggcacgaagcgcctgaagcattgagaagaacgggactgtaggaggtagatcttggctcttctggacgatgtcaaaagcgagttggcggcctttgaaggcgattcgccagccgcgatcaaggcccaagctgcggccatgatccgttttggcggcggtcttcgaccggtacagaatacatacgttatccaagccgtattcacctcgcttgacgttgcagaatggctgaagaacacgttgaggaacacgttcgggcatgaagccgaggtcaaccacctcacccgtcagaccccgaacggccctgtcgagacctacgtggtgctcgtcacccgcaacgtagtggccttggctttgcagaccggactggtcgaccgccgcaagcagcaggtccgtggactgccgtctgaagtggtcaacggatccatcgcccaaatcaaagcagcatggcgcggcgccttcatggcccgtggcttcctatccgatcccggtaaggccagcttcctggaaatcgcttgccccacggaagaggccgccatggccctgtgtggcgtggcccgtcgtctcggcatccaggccaagcatcgcacgctgcgcagctccgagcgcgtgaccctcaaggatcccgacgccatcgaacgcatgctcaagctcatgggcgccacccgttcggcccgcgaatggaccggcaagcgctccgacggcgaggcccgcggcaaggccaaccgtctggccaacttcgatgacgccaatatgcgccgttccgccaaggctgccgccgaagccagcgaaaaagtgcagcatgccttcgaagtgctcggcgataacattccggacaacctccgtcaagccggccagctgcgcatcgatcacgtggacaagagcctcgaggagcttggcaagatcgccgaaccgcaaatcaccaaggatgcgattgccggccgaattcgccgactgcttcagcttgccgagaaaacggagaaggctcgcgcagccgaaggcaagtaacccgacaacgacgtaacaaaacaccgcattcagtcagtaggcgaatgcggtgttttgttccggaatgcctgtaatatgcaaagtggcaaaattggccactttgacgtgcgattcgtcaaggaaaggatattcatgaagacactcaaggaccttggagatctcaagggcaagcgcgttctggttcgcgctgatttcaatgttccgctggacggcaccaccatcaccgatgacggtcgaatcaaggctgctctgccgaccatcaagaccctgcgcgaagaaggcgccaaggtcatcctcatggcccaccttggccgcccgaagggcaaggtcgttcctgagctgagcctggccccggttgccgcccgcctcggcgagctgctcggcaccaacgtgccgctggccaaggacacctacggcgaggacgctcaggccaaggtcgccgccatgaacgatggcgatgttgtgctgcttgagaacgttcgcttcaacccggaggagacctctaaggacgccgacgaacgcgccgcttacgccaagaagatcgccgccctcggcgaggccttcgtttccgatggcttcggcgtggtccaccgcgcccagggctccaactacgacgttgccgccgatctgccggccgccgcaggcctgctggtcgagaaggaagtcaaggccctgtccaaggccaccgagaacccggagcgtccgttcaccgtggtgctcggcggttccaaggtctccgacaagctcggcgtcatcgagaacctgctcgacaaggccaaccgtctggtcatcggcggcggcatggtgttcaccttcctcaaggccaagggctacgaggtcggcacctccctgcttgaagaggaccagcttgagaaggtcaagggctacatcgagaccgccgagaagaacggcgttgagctcgtgctgccgaccgacgtcgccgtgaacgccggcttcccggccggtgacaccccggttgctccggaagtcgttgccgccgacgccatcccggccgacaagatgggtctggacattggcccggagtcccagaagctcttccacgacaagatcgtcgactccaagaccgtcgtgtggaacggcccgatgggcgtgttcgaggttcctgagttcgcctccggcaccaaggccgtggcccagggtctggtcgacgccaccgcagccggtgcgttcaccatcgtcggtggcggcgactccgcctccgccgtgcgcaacctcggcttcccggaggacggcttctcccacatctccaccggtggcggcgcttccctcgagttcctcgaaggcaaggagctccctggtctgaaggtgcttgagtaatccattttctagctcccctccttgaggggagctacgtattttttagagggggaacatatggcgtccaaacgcattccgttggtggccggcaactggaagatgaatttcgaccatcttgaagccacttacttcgtgcagaagctggtatggctgttgcgtgacgctcgctttgacttcaaacgctgcgaagtcgcgcttttcccctcgttcacgtcattgcgcagcgtacaggtgctggtcgaagccgacaagctccatgtcgcctacggcgcacaatccgtttccgtgaccacccaaggtgccttcaccggcgatgtgtccgcggacatgatcgcccatctcggctgctcgtacgtcatcgtcggccactccgaacgccgcaaataccatcctgaagatgacgccaatatcgtcgatcaggtacgtgccgtgctcgccgccggcatgcagccgattttgtgcgtcggcgaaagcttcgaggaacgacgtcaaggcattgaactcgatttcgccgtgggccaggtacgagacgtcacccgcgatctcaacgaagaacaagccgccgaactcatcgtggcctacgaacctgtctgggccattggcaccggcatggtggccactccgcaatccgcccaggatgccgcaaacgccatccgcaacgatttgaagaccacttttggcacgaaggtatccgatagcgtacgtatcctgtacggcggatcggtcacctcgaaaaacgcggcggaactcatttcccaacccgacgtcgacggcttcctgatcggaggggcggccctggatgttgaggaactcgccaaaatcgctcgactggcactgaaatccacgaaatcacggaactaataccacggttttcccgtgtgtgcgctatgctggtcaacagtccaatcaatccggaggtaccctgtgaccgctcttaagatcacgctgcaagtcatcgtcgtgctgctcagcttcgtgctgaccctgctcatccttatgcacaagggcaagggcggcggtttgtccgacatgttcggcggcggtctgacccagaacgccggtacttccggtgtcgccgaaaagaacctgaaccgttggaccgttatcatcgctctggtgtgggtggccttgattatcggcctcgacatgatgaccaagttcaacctcggctgatcggcttgcacgccatatagacttgtcgctcgcgacccatgaccgttaccgtcggtcatgggtcgtatgcgttctatcgagtattacgaaaggacatcaccatggtcactatgaaccgcaacaaagtcgttatcgtcggcaccggccaggtcggtgccaccgccgccttcggcatcgtcacgcacggcctgtgcaatgagctcgtgctcatcgaccgctccgccgccaaagccctgggggaggcccgcgacctcgatgacggcagcgaattccaggaccgccacgtcaaggtgcgcgccggcgactacgccgactgcaaggacgcggacatcgtcgtcatcaccgtgggccgcaagccgccggccaactccaaccgcatggccgaactcggcttcaccgtgggccttgtgggcgaagtggtcgacaacgtcatggcctccggcttcgacggcgtgatcgtcatggtctccaacccggtcgatgtgatggcctggtatgcctggaaacgttccggcctgccgcgcacccaggtgctgggcaccggcaccgcgctcgacacctcgcgtctcaagaccatcatcggcgaagagaccggcctcgacccgcgtaacgtgggcggcttcgtgatgggcgagcacggcgactcccagttcaccgcatggtccaccgtctcgctcggcggcaagccattcgcccgcttcctggccgacaaccaagaccgtttcgcctccgtgtccaccaccgaaatcgaagagaagacccgcacccgtggcgatgagatcgtcgcggccaagggcggtaccaacttcggcatcgcctccaccgtggccggcatcgtgcagaccatcctgtgggacgaacgccgcatcgtacccgtctccaccctgctgaacggcgaatacggcgaacatgacgtgttcctcggcgtccccactgaactgcgcgccaatggtgccaacgagatcgtcgaactcgatctgagcgaggacgagcaggccaaattgcaccattccgccgaactcgtgcgtgaacactgcgaggggctgctgtgattctcgacgccatcacaccgaaacaaccccgactgctggtcgccgacctcgacggtacgttgctgcacgacgccgaggtattcgaggaccggttcatcacccagcgcagcatcgacaccatcaaccgcgcgcacgatgccggactgaaattcgccatcgccaccgcgcggccggtgagtaccggcctccagttcgccgaaaaactgccggtggacgccgtaatctatctgaacggtgccctcatcgatttcgacccggcccactccgacttcgacctgctcacctcaggtgccacgccggccgatgagaaccatttgatcaagattggcttctcctcacggcgtgcctgcgaagtctgtctgttcctgctcgatcgcatgcccggcctgaagctcggcatcgtgatgaacgacgtgcgctacaccaacttcgatgtgcgcgtgtattggaaaacacaggccttccaatacacgaacttccacgacgtgcccgaaggcgtggcggataagatcaccatcttccccgagcctgaacagtggaacgagctgcgtgcgctgattccgccggacttcgacatctccattagcgaaggcgtgatgtggatgctcatgaacccgcaggccaacaaggagcacgcgctgcacctgctgtgcgaacgactggacgtgccgctcgaacagaccgccgccttcggcgacgacctcatcgatatcaacatgatgagcgaatccggccggggtgtggccgtggccaacgcgaaccccaaggtgttgtctatcgccgacgagatctgcccgcccaacaacgaggacggcgtcgcccaatggattgaagcgcagttgggctgaaccggccgagactcgagaacacgccaaaattgaacttgtgttgaaccgggagtatgctttgaactgttgttcaaaagataaattgaactcccggttggaggcataaggatatgagcgtatcggtgtttgcggaacgtctgcgcaatgcgatgaacagtaggggattgaagcaggtcgatttggtgcacgccgccgaacatcgtggcgtaaagatgggcaagagccatatcagccaatacgtggccggcaagaccatgccccgcgaggacgtgctcgaattcctggccagcgaactggacgttgacgcgaactggctgcgcggcgaggaatccaccccgcaattgaactcggacgcttccaacagcgtcacggacggcgaacacgccgccacgccgcttgccacgggcaccgccaagcccctgacggacagcgagattcccgtgggccgccgccgtaccttcggcaaatcgcacaagctcgacaacgtgctctacgacgtgcgcggcccggtcgccgacgaggcgatgcgcatggaggccaacggcacccacatcctgaaattgaacatcggcaatccagcacccttcggcttccgcacgccggacgaagtcgtctatgacatggcccaccagctcaccgacaccgaaggctactcgccgtccaagggcctgttctccgcgcgcaaggccatcatgcagtacgcgcagctgaagaacatcccgaacgtcaccatcgacgacatctacaccggcaacggcgtcagcgagctcatcaacctgtccatgtccgcgctgctcgacaccggcgacgaagtgctcgtgccctccccggactacccgctgtggaccgcctgcgtgaacctggccggcggcaccgccgtgcactacctgtgcgacgaacagtccgaatggtatccggacatcgatgacatccgctccaagatcaccagcaacaccaaggcgattgtcatcatcaacccgaacaaccccaccggcgcactttacccaaaggaagtgctccagcagatcgtcgacatcgcgcgtgaacaccagctcatcatcttctccgacgaaatctacgatcgcctcgtcatggacggcctgcagcacatctccatcgcctcgatggccccggacctgttctgcgtgaccttctccggcctgtcgaaatcgcacatgatcgccggctaccgcatcggctggatgatcctgtccggcaacaagcgtatcgccaaggactacatcgagggcctcaacatgctcgccaacatgcgcatgtgctcgaacgtgcccgcccagtccgtggtgcagaccgcgctcggcggccaccagagcgtcaacgactacatcgtgccgggcggccgcgtgcacgaccagcgtgacctcgtttacgacatgctcaaccagattcccggcatcaccgccgtcaagccgaaggccgcgttctacatcttcccgaagatcgacgtcaaacgcttcaacatccactcggacgagcagttcgcgctcgacctgctgcatgacaagcacatcctcatcagccacggcggcgcgttcaactggcatcgccccgaccacttccgcgtggtgtacctgccgcgcatgggcatgctgcacgaaaccatgggggagctcgccgacttcttcagctactactggcagagctgatccttggtacaggcgaacacgatcgatgccgggctgggcaccaaaccggtgccccgtctggccctgaccatgtcggtccccaccatcgtggcgcaggcggcgaacgccttgtacacgatcatcgaccgactgttcatctggcacatccccgaagtgggcaacgcggcgatgaccggcgtgggcatctgcttcccgattctgctggccgtcaccgccttcgcctcgctgatcggcgcaggcggcgcgccgcgcgcctccattgaacttgggcgcggcaacttcaagaaagccgaacgcatcctcggcaccagcgccgcgttcctcatcgccatagccctgaccctcaccgtgctgctgcagttggcgaaaccactgtggccatggtctccgtactcatcggcaccggcatatccatccttcttgaccccgtgttcattttcgtgttcggatggggcgtcaggggagcggccgccgcgaacgtgctcgccacattccccggcttcttcgcctcatggttcacctcggaacagacggtcatcgacatcgtgacccgcatgatgccgattttcgtctgcggctggggtatcttcggcatccagatgggcgcgcaatgcgcactcgtcggcatgggccaggccaaacagtcggtgttcttggccatcttccgcaagatcatcctgctcgtgccgctcgcgctgctgctgccgcactggatcggcgtcaacggcatcttcatcgccgaacccatctccgacgccacctccggcatcgtggccggcttcctgttctatgccacctaccgcaagattcggcgagatatggtctagactcctgattcaatggatgtgccgtctcatgcgttgcgaaacacgggacggatagaatgcctcgcaaaacgggtgcccgttgtttcgtgatatgaaggagattttatgccggtggtgtcgcgtcgtgcgcagccaacgtgatggccataattgccgaaagcagggagaacaatggcagcacgcacaacacgacggtcagcagtcccaaagcttcacggccgatgcaataagcgacaagacctgcattgtcaattgccgatagcgctgggcagaaatcggtgtgtctaccagtgttgtagctgtaggtaaagaacgtgagacctgaccagaacagggcaacgggaacagagccgatggcgcgaaaagccctgtactcccgcaacggtcagacagagaatcgcgacaacactcagcgcagtcaccgtcataaaccacagtggtgaggtgacgcagactccataatcgtcagttgcttggcccgagagatagtaggtcattctgccaatcgccggacagttcggatgcagcatcataccgccccaaatgcgctcatatagtggtgtatagtggtgcgaacgatacaccggcaccgctgagcgtcgcaacaaccgccatcaccgaccgaccgccagactccggcacagaccgggaagaactaccgtcgcggagcatcggcgataccaatggcaacaccgaggatagccgggaccacccagccgagctggtattgctgcaagggcagcatggccagcgtcgtgtccagccagccgatggagccgccgaagacggtgatcaggctggagatgcaggtggcgaaggagtcgatgcccaccagcagcacggtccagaagtagacatgcgggaatcgcgcgccaagcgacttgtgggtcagcgccagcagcaccagcacgatggcgatcggatacagtgcggacaacaccggcacggaaaccttgatgatcgcgcttagcccggcgttggacacgatgaaactgaacacggtgaagatgacctgccaggtgcggtagctcaacgttctccctgcaacggtctggaaccgagtgtggaagtaggtggcgcaggtaccgatcagtccggtgcatacgttgaggcaggcgatgacgaagacgataccgaggaacgcggtaccgaacgcgccgaacagggacgaggtgagattggtgagcacggtcgcgcccgtgtctttggcgggatcgatggtggcgatggcgccggacaccacgcccacgtagctcagtgcgccgtagatcacgatcagcagcacaccggtgccgagtccggcatacgcggtctccttctgcacttgcgattcgtcatcgacctgctgggtgcggatattcgcggaaatcacgatgccgaaatagagcgcggcgagcagatccatggtctggtagccgtcgaggaagccacgtgcaatctggtttgtggagtagtcgcccatcggtttggccggggtaccgataccgtggattaggcaggcgatgaacaggatggcaatcagcaccagcagcaacggtcccatgaatcggccgagcactttggagagtttttcgggatgctgggcgaacaggaacgccagtgtgaagaacacgagcgagtagatgagttgggccagccagccgtaggaggacggcacgaaaggcgccaccatcatttcgaacgaggtggtcgccgtacgcggaatcgcaaagcaggggccgatggtgagcatgatcgccaagccgaggaacagggcgaatttgggggagacccggccggcgagtttgtcgaagccaccggcgaaggtgaccgccagcacgccgagaatcggcaggccgaccgcggagacgatgaagccgatggccgccggtatggtcgcggaaccggcctgagctccgacaaacggcgggaagatcaggttgcccgctccgaagaacatcgaaaagaaggtaaaggtcatcaccaaccgctggcgtgcgacaagtttgttcattacggttcggcctttctctcatgtgctcgtactactgtagcaacaaacgtaagaagccccgaccggttggggtcggagcttctgtgagctaatcagttaatgcgcgaaatgcgcatcagctaataatctcaggcgttcacgcggtcgatgccggactggacgtcagccagcacggaatcccaggacttgatgaaggcggcgacaccgtcggcctccagcttgtcagtgacgtccttgaggttgatacccagctcagccagcttgttgatgacggcgtgggactcctcgtaggtgccctcgatggacggagcgccgttgccgtggtcggccagagcgttcagggtcttctccggcatggtgttgacgatgtgcttggcaacgagctcgtcaacgtacttgcagtcggagtaggcggcgttcttggtaccggtggaggcccacagcggacgctgaaccttggcacccttggcagccaggtcggcccaacgcggatcctcggcaaacttcttctcgaagagctcgtaagccaggcgagcgttggccacagcggccttgccctccagagccttggcctcgtcggagccgttggcttccagcagcttgtcgacagcggtgtccacgcgggagacgaagaaggaagcgacggagccgatgtgcttcaggtcgtggccgttggcgtcagcctgggcgatgccctcgatgaaggcgtcgatgacctgctcgtagcgctcgagcgagaagatcagggtgacgttgacggagatacccttggccagggtggcggtgatggccggcaggccttcgagggttgccggaatcttgatcatggcgttcggacggttgaccttctcccagagttccacagcctgcttggcggtgttctcggtgtcgtgggccagacgcgggtcgacctcgatggagacgcggccgtcgacgaagtcggtagcctcagcgatctcgcggaagatgtcggtggcgttgcgcacgtcggtggtggtgagctcgcggacagcggtctcaacgtcaaccttgccgagctccttgagctgagcgtcgtacgggccgacctggctcagggccttctggaagatggacgggttggtggtaacgccgaccacgttcttgttggcgatgaggtcctgcagggagccggactcaatgcgggagcgggacaggtcgtccagccagatggaaacgccgttgtcggacgtacgctgagttgcttcagtcatttattttctccttggattcaagccctaggctcccctctcctgggagaggggagctgtccgcaacgcggactgaggggagtgggctcaagcattgctcccctcagtcaagctttcgcctgacagctcccctcagggaggggagccaacaattattgaattattgcttagttgctcacttggcggcttcgacttcggcgatggaggccttggcggcttccaccacgtgctcggcggtgatgccgaggtcgatcatgttctgagcgccgtcaccctgcaggccgaactgctcgatggagacaggcttgccgtaggaaccgaggtacttgtaccacggcatggcaacgccggcctcgacggagacacgagccttgacagcggccggaagcacagcctccttgtactcggcgtcctgctcctcgaaccattccatggacggcacggacacgacgcgagccttgacgccctcgccggccagggtcttggcggcagccacagcccactggacctcggaaccggaagccatgaggatgacgtccggagtaccctcggtgtcgaccaggatgtaagcgcccttcttgacaccgtccttggccttggcagcggtctcggcaagaaccgggacaccctgacgggtcagaaccatggcgccaggcagggtgttcttcttctcgaagaagtaacggtaagcctcggcggtctcgaaggcgtcggccgggcgaatgacctcaagctgaggaatcgcgcggaaggaagcaaggtgctcaaccggctggtgggtcgggccgtcctcgccgacggcgacggagtcgtgggaccagatgtacaggttcgggatctgcatgagggcggccagacgaacggcggaacgctcgtagtcggagaacatgaagaaggtgccgccgaacggacgggtgtgggaacccagcaggatgccgttggtgatgcagcccatggtgaactcgcgcacgccgaagtgcagctggcgaccgaactcgttgcagttcggccactgcttggtggcgcactcggccggggcgaaggtggcagcgcccttgaggtcggtcttgttggagccaccgaggtcggcggagccgccccagagttccggcatgacggcggcgatggcgttgagcacggagccggaggcgccacgagtggcgacacccttgccgacttcgaaggtggcctcaaggtcgtcaagggccttgtcgaagccttccggcagttcgccggccttcagacggtcgtacagggcggccttgtccgggttggccttgcgccaggcgtcgaacttctcgtcccaggccttgtgggcctccaggccgcgatcggcgaccttgcgggcgtgggccagggcttcttcgtcgacgtggaaggactcctccggatcgtagccgaggagtttcttgaggccggcgacggcctcggcgcccagcttggagccgtgggaggacgggtcgttggtcttgcccggggtcggccaggcgatcagggagtggaccttgatgagcttcggctggtccggggcggcggcttcggccttggcgatgacgtcggccagaccctcgatgtcctccttgtaggagccgtcgggctggatgaagctgaactcgtcggtgtaccagccgtaggcctggaagcgcttgagtacgtcctcggccagcaccaggttggtgtcgccttcgatctggatgcggttggcgtcgaagatcacggtcaggttgccgagcttctggttggcggccagggaagcggcctcgccggagatgccctcctcgatgtcgccttcaccacagatggcccaaatcttgtggtagaacggggaatcttccttcggggtctccgggtcaagcagaccgcgctggaaacgctcgccgtaggcaaagccgatggcggaggcgaagccctggcccagagggccggtggtcatttcgatgcccggggtcaggccgtactccgggtggcccggggtgcgggtggcagcgccgccacggaagttcttaaggtcgtccagggtcacgccgtagccggagaagtacagctggacgtactgggtgagggaggcatggccaccggaaaggatgaagcgatcgcggccttcccagttgggatcattcggatcgtgcttgatgaagtgctggtacagcgtgtaggcgacgggcgccagggagacgggggagccggggtggccggagcctgccttctcaaccgcgtcagccgaaaggaccttcgccatcttgatggcgcgctcgtcgagctcggtctccttgaattcggtcatggattactttccttccaattggtcgggccgcgtatccggcttgtgccgggcgcttgacgccctcacattgcgattaccatgctagcgtcggtttgcgacgttgcggtgcaattttggcgtgttttggtagtttgtgttctgttagcgttcacagtgaacattgctacgctgcaaacgaacgcattagcactcaagcctaaggagtgctaatacaatgttctaaggtgaagtgcgccacctgcacgtggcggagccaagaaagaggcaatatttctgggttcccgcgtgtcgcggcgtggcgaaccgaccgtcggggtacgccctgagtgaaccgtgactgatatgaatatgtatgcatatataaggaggcgcgcatgacgcaatcaagacgcatgctggtgctgcgcgccgtggtggaggattacatccgttctcaggagcccgtgggctccacttcgctgacgcgcgaccatgatctcggcgtcagttcggccaccatccgtaacgacatgtccgctctggaggatgaaggatatctgattcagccgcacacttcggccggtcgtgtgcccaccgaaaagggctatcgatactttgtggaccgacttgctaccgtggtgccgctcagcgaggcgcagcgccgcggcatcaacagcttcctgtccggatcggtgagtctcaaggacgcgctgcagcgttcggcacgactgttgtccgaaatcaccggtcaagtggccatagtcacctcgccatcgctggccaaggccacattgcggcacgtggagatggtgcccgttgccatgaccacgttgctcgcggtggtgattaccgacaccggccgcgtggcccagcacggcctgaccatcgcatccatgcccgccgtggacgagatcaaccggctctccaacaccgtcaacgaacaatgtgtcggactgtccctatcgaaatccgcggagaccgtgcgatccatcgccgccagcgccggctacgagtcggtgcgcggcgtggccgacgcgctggccgacgccttcgaatcgatggcattggacgaacgcgcggacgaactgtacatgtccggcacctcgcacctggcccactcccggtccctggccgatctggccccgctcttcgacgcgctggaagaacaggtcgtgctgatgaagctcatgagcaacctgagcgaggagacgaatgcatccggcgtgggcgtggccatcggctccgaaatgcacacccccggcctactgcatgcctccgtggtcagcagtggctatgggcgcagcggtgcggcgggcgaaccggcggggaacgatcccgtaggcgaacccgaaaccgaatccgagacggagagccagacgaacgacacggaacccatcgccttcgtcggctccatagggccgacccacatggactatgcggccactatggccgccgtcagggccgtagccagatatttgaccgccttcctctccgagggccggacccaagactgaccgccgtctgtggcacaatgacccgcagaccaaacgaacacaaaggatcaatcaagtggcagattattacgagacgctgggtgtggaacgcggcgccagtgacgacgagatcaagaaggcataccgcaagctcagccgtaagtaccaccccgacatcgcgggccctgaattcgaggacaagttcaaggaagtgaacaacgcctacgatgtgctgtccaatccggacaagcgccgtatgtatgattcgggcgtcgacccgaacgatccgaacgccggtgccggcggcttctccggggcgggcttcggcgatatgagcgacgtgttctccacgttcttcggttccgcgttcggtggtggctcacagggcccggtgccgcgtacccagcccggccgcgacgccctggcctccgcgtccatcgacctgaagaccgccgtgttcggcggcaccgcgcacgtcaagatcagcacgttctccctgtgccaggagtgcggcggctccggcgcccagagcggcgcacagccggtcacctgccccgactgccacggccagggattcatgcagaaggtcgtgcgcaccatgctcggccagatgatgacctccgccccctgcgaacgttgcgagggccacggtaccatcatcaagaacccgtgccccagctgcatgggccacggccgtgtgcgtaccacacgtaccgtgggcgtcaccgtgcccgccggcatcaacgacaacgcgcgtctacgtttggccaaccagggcgaagtgggtgagggcggcggcgctgccggcgacctgtacatcgacattcgcatcaaggcggataagcagttcacccgcgatggcgacgacctgcactgctggattcaggtgccgatgagctgggccgtgctcggccacgatctgtccattgacacgttcgatggtgagaagaccgtgtccatcccggccggctgccagcctgaggacactgtgacgcttaagggactgggcgtcacgaacatccgcaacaaggacgagcgcggcaacctcatcgcccacgtcaatgtgctgattcccaccaagctcaacgaaaccgagcgcggcctcatcgaacagttcgccgcctcgcacgattcaggcgccacgcacgtctcccaggcatcccgtccacaggctggccaaaagaaaggcttcttcagcaagttgaaggacgcactgagctgagaacgggttggaaaatggccgctttgccttgcgggagtagggctgagcggcttttctcgttttaaccggttttaacggtttttaacctgtttttacggaaaatgtgggcaaaatgtgggcagaaatcgagcccgcgaagccctctgccacaacgcgaaatcggccccgtccggcagcagtccagctcgatttgagctgtctgcgatgccgggcggggccgaattttgaatcagggtgatgagcgcgcacgcgccgcccacaccgccgaaaccggctagaaacgtctgaaacacattgcatctccttaaaaaatcagttttgcaaaggcccccgcccgagctcgaagaccatgcgcatggcatggctcgcacttgggcgggggtcgttcgttcgggggtcgggatgttccgccgagcgtcagtcggcggaacatccgtatgtcaggccgtgagcttggccttggccgtggacgcgccgatgagcgcgccgaccaacaggccgagcgcgttgagcacggtcaccgtcaggtcggtgcccggccagccggccgcctgacccacggtctgcgcgaacaccgcgagcgcgggcagggcgatgaggcccacccacttgagcaccgcgtacacggtgtcgggcagccagtacggatgattggcggtttcgttcatgatctttcctttcagtatgtcaatacctcacccggatagatgaggttgggattgccgctgcggtatccgtggagctgtgtccactggacgccgagctgcgatgcgatggcggacagcgtatcgccggagcgaacggtcaccgtccgcgagggaggcgcgttgctcgcggtgcttacgctgccgccgccgttgtagcgcacgacctgtccgggccagatgcggttgatgttgccgctgggcacgctccacgccgttaacgggtagaggccggttcgggtcgcgatggcgctgattgtgtctccggctcgcactgtcaccgcagtaccgccgctaccggaggactgctgcgtggacgacgtgccgccgaagcgctggttgacgatggcctgcacgcggtcatacgttccgctgccgtaggcggtgtcgaggttcgtgcgccgctgcggtaggttgccgtactcgcctcgaatcaccgcggtcgccagagcatcccagtcgatattgctcggactcggagtcggtgcgggagtggtggtgttcgtggacgaggagccggaaccggtgccgctcgggttggcgtacttacgccacgcggtcttgtctcctcggaacacgttgaggtcgaggtagccggaatagccgggcagcacaccagtggaggtgtactggcgcatggcctcgccgtaggctcccaacttccacggatgggactggtagcccgtcgggagtgtgttcgcatactgggcgacccacaggcccgagcctgccgctcgagcgccggcgacctgaccgagtgcggacgccgaaacgtagaccatcggaatgacgccggcggtctgctgctttactcggttgacccaacaggtgggccacgccgagttgccccactgcgcgttctggtccgactcccaatcgaggatgagcacggccttacgcacatagcctgcggagtgcttaaggaagtagtcggcctcggcgttgcagtcgccgcctccggcgtagtggtagatgccgatttccttgccggtcgcctgagcgttcgcgatctgcgcgttggcgttcgggttgacgtagccggtgccctgcgtggtcttgacgatggcgaagtcggcggtcacgcgcgacgtgatgtcggatggctgccagccggaaacgtcgacgccctgcatgtcggcgaacgcgactccgacgcccatggacagcgtcgcgaggacggcgacgaccgtggtggcgagtcgcctcaaccatcgtttgacgcggccggggccgttgcagttgttggtttcgcccatatctctctttcctttcgttcggtggatatggatatggaaaagcccggcatcgaagcgatgccgggcaaatcaatgaagagcctgctgatggccggggcgggccatgcgcgcattgcggatgtcgtcgatcatccgtgtgcgcgtcgggctcattgcaacgtggccgaaccggccgacaggatctcgttgttgtccgatgaccggcagtcgacaacgatgacgacccgtcccgccgcgccgtcaatcgtcatatcccgaaagcatgcgccgggctcccttcctggatggttattcgttgaagtagccgcagatcggcatgctgatgcggccgcagacagccacgctcatcggcccgccgatggcgatgggatggtagacggagaagttcccattcgtgcccatgaagctgatgttctggaattgcgcccacaggtagtatttcgcgtccgacgggttgtcgagccggtcgtccgacgaacgcgagaagaccttgagcgggatgggttgcaggacattgttgacataccattcatggatgatccacgtttccacgcgctcgtggatgccgtcgcgctgcatcggatacggtttgacgaacaacggcaggtcgagcccgtacacctcggtgatcccgccctggtcgtcatggctcgcggtgaacgagaacctcttgatctcgtcgacctccagcttgaccttcacgaaattgaaaagcacgttgaccatgccgctggccgggtcgacgctccagttcagataatccttctcgggcgcgggactgtccttgtacggcaaagcaagctggccggcgtcatccccgaccatcgtgctcgccctttcgacggcgcccatgagggcgggcgcgggcgaccacacgccgtccctcaagccgcccaggacgagctgggcgatggcctcgtgcccccggtcgttcgggtggagcgtgtcgtcctggctcaggtcgaagttgaacagcagccacaggtgactgttcgtgaacacgtggaacccgttaagctgcaaatgcttggcgcactcgttgaacatgggcgcgtagttgggcatgcgggccggattgcccctgtggcgcacgtttgcggcgcacaggccagagaagccgatgaacgcggcgttcggatacatgctcttcacggtccggcaccatgagtcgatgcgcgaaccgtagtcgcctgtatgccagtcgttcgtgctgccgttgacgaacacgaggctgaccgcgtcatggtcgtagcccgtgtcggcctcggcacgggtcaactggcccgggtatccgttggaggactgcatgttgagccatccggtgccgccgacgccgtagttgtgcgccgtcaaacccaattcgcgggccacgatcgcccaccagttcctgcttgtcgccgaagcgctcacggtcatgctgtccccgaacacgaccatgtgccgcgccggatgcaaagccgcgtgcgtcttcgaagccgcgtcttggatgtatgcggcgaccgcctcgtcggccgggaccgcgttgacgcccggcaggccctgcgggccgcgttcgccctgcaagccgcggggacccggctggggcagcgcctcgatcaaatcgacgatctgctcgctcatgccgccaccgtccaatcaatccggcgggcggcgtgggctaggcttgggaggctaagcccccccccgatcgcatcctgtgtgttcactgtcgtctcctcgctgccttggccgaccaccgcgtcgcggtagtaggccgtgttggaatccacgcaccggctgaacaggcgcgtgtacgcgcgcgccatgccgatgtagccggcgcgcgtggggtgtccggcgttcattgtcgtgaaggtcgggctcttgaagaacgggtcgtctctcgggtccatgaacggcaggcccagccgttcggcgatgtccttgaccgcgtcggcgtacgcgccgaccaagccgccccccatagccgctgtgggcggggcgatgagcgtgtgcgcggcgaggggcgcgtgcgcctggcagcggcgcacgatcgcgctgtaatacccgtagaacgtgttcgcgggcgtgctggttgcgttcgcgacgatgtcggcggggccgcccaggcgcgcctgcggtttgagcccgtcccaccggccgttcatataatcgctgtcatagctgtcgttgatgccccaacagtagaagtacgcgtccgagggcgtcgcatccagcacgcgctggaggttgtcgttgaaataggtgcgcgtcatgctgccgccgacgccgaagttcgacgccgtgacgccgtcgcgttcggcgaccgtctgtggccacgggcgggcgaactcgttatgccactggccggaggagttggcgatgccgccctgcgtgtagctgtcgcccaggcaggcgatggtgcggaacatgccgaagtcgacgtattcgccggccgacatctggtcgagcacgtcctggctgccgccgatctgcgtccacccggcccacgttgaatccggggccccgtggatgctcctcgtccacaccccgcccttctcggacacgtacagctgggagcgcagcttgccttccagtttgcccgtcatgtacgtgtcgttggtcacgccgagcgtgatgagccaaccgctctgcgcggcgggcaggtggagcatcgtcgtgtcggagaccatgagcacgctgttcctgggcacggtgtccgcgtcggcgaaatcaccctgcgccgtcatgaccagcccgccgttcaccaccgggttcgacagcgccccgacggccgtgtccgtccacccggcccacgtcgaatccggggccccgtggatcgaccgaaacattactcttccgtcatagtcgaaggccgtctgatatttcagacgatcgttgtgaccgggcaatccgaaggtctgcacccacgtgggcagattcaagccggcgggcaagtgcgcgaccttctgattgtcgaccaagaccagcgtgttcgccctaaacgtgtcgaggtcgtcccacggggcctcgggatcctggttgcatgccacgtgcccgtcgatgcccgtcggggcgaccatcgcgcgatcgtagaggccgcgcgcctgccggcgtaccgactcgcccgccgttgcggccgtgacaccgtcccagccggcgcgcacgtcgcgcaactccttgccctcgtcgccgccgccgctgccggacgcggacaggacgtccacgcgcgactccaacgccgacacgcggccagccactccattggccagaccggaggccgccatgcgcccggcctcccatccggccgccgaacccgcgccggccgcgaccgccgccgtgtccgacgagacgggcatgcccgtctcgaccaaatccacgatctgctcaaccataatcaattcctccgattcgatcagtcgctcaaagtgaaataaccccaggcgagcgtgcgcaccacgccgccgcccggagaactgaccacgaccttccattggccgtgcctgcgctgccgccacacgtcatccgcgaacgccgacggcggaatataggcgaccgcgaacccatccgcggtcatctccccgcacgcggtcgaataccagcgctcgaagttgtccggcgaccataattcgacccgcccgctccacgcggacaggtccaccggccggatctcgccggaatccacgtatcgccgtcgccaacgggcgcccaatcgctccgagtcgcccctgatcagtcgcacgtccagacgcccgaccctcctgcccacagtcgccatacgtgtttctcccgtctattcgagcgccggcttggagccgggcacgtagccttccacatagctcgagatcgacccgaactgcacgttgcaccagttcagcagtacgctcgtgttccgcgcctgcttctgcaagtcggcggtcaccgtctgcagggacgccaccgtttcgccctgctggcccacgatcgattccaactgcttctgctgcgactgcagggacgcctgctgctggcggagctggtcctgctggccggcgagcgcgtcctgctgctgcttgagttgctgctgctgggattcgagcattttctgctgccgctgcagctggtcgagcatctgctgctggatggcctgcatcagggcctgccccttcgtcacgtcctccagcttcgacgtgatgttcgagagctccgtgccggtcggacggttcgcctcccttttctcggcctcgcgccgcctggactcccgcagggagcgcgacagccagtccccgccgcccgacgcgaccacacgcgtcagatccgcgatcggctggtccaaaggctctccctggtcctcgcgcaccgacgcctcgatggactccgcgagcagcgcgtgcccgtcgtcgttcggcagccttcccgacgagcacagcgcggggtcgctgccgcacaccttccacaacccgtcgcacacgagcgcgcccgcgtccccggcgcccaggcggatcgcggtccacacgagctccatgcgttcgagcgcggcgtcgtccaagccggtcaggcagcccggcgcgacgccggccaccacgcgggccccgggccatgccttcgccgccgcgcggacggcggcggccgtggcggagcgcatgctgccgagcgaatcgtaggagtccgtgatgccggccatgaggaacacatacgtcacgccggccaatgcgagtttcgaggccgcgtcgacctgagagccgatgtccggcttcgtggcgaatcccacgcccgtggcggcgtggttctcctccacgagtccgagcgccttgctcgtgagagtggaataccggtgtgccgcgtcggacgcgccgccgcccgcgcacgggccgtcgcccagccacagcgcggtcccttgggacgcttccatcgaagcgatggtatcgtcatcagccatgtcagctcctttcctgagcgccgaccgtcacccagtcggaatccgacgtgcccgacacgtcggtgatggtgacgtgcagcgtggacgctccgatgaagtcgtcggagaccgtcacgtcgatgttgtcgcccacgtgcggcgctctctcttcgcccacgcggaattcgaaggtttccgcggggaaggcgtgtctgcgcaggtcggatacggcgtgtgactgcagtgttttcatgctcgatacggtcgtgtgctccgtgtcgacggattgcatgaacatgcagccgcgtttctgtggcagttccgtgcttctgcggcacatgagcgttttgtcgttgtccttgccgccggtgagccagacttgcgaggtgaggtcggctccgtcgtcggtgagggaatcgaggatgatccggctgtccgggatgacggcgttccatcgatctgtcactgcccggtcggccagcgtctggtcggtcgcggtgaagtcgaatgtgatggatccatcgtccctgatgcgaggggcgaagcgtatctcgatgccgttctcgaggttggtcaggtcggtgagccggtcggcgacggtggccagatcccacgcgtagtaggtacgggtcagactgcccttgcggacgaatccgggcagggtgatcggcagcatgccccactgcagggcctcgtcgaccagctggcaggcgatgtccctgcagtacgggccgcgcagggtgagcgcgaggtcgccggctggcttccgctcgtccacgacgacgctgtggtcgcgccaggacgccgcgagctggcggccgatgacaaggcgtttcgtcaggagagtgagaccgccgcctacggtcaaggtgactttgtggtcggaagccgcccatttgacatacgtcagcggtccggcgtgagctggcccttgtgccggcaggtaggcgacgatgacgcgccaaggctgcagcagtccccgagcccccatatcacgcagcacgtcggtcatcgcgagctcgacgctcatgccgccctcacggttgcgggattcctgccacgagcacaaggtgaacggcaggcgcgtcacatgtttgccggtggtgatgtcgtacacgtgcatttcggcggcttccatgcttcctcacttccatgccggccgcagcaacaccacggccttcgcgtcgatgtttccggtgtcgaccgtcagacggtgcgtgcctggcggtatcgggaacgcgtggtcgtccgtgacggtgccgcggctggggaccatgtcgcggaagtcgaggtcgaggccgtccttctcgtccccctgccagacgaccaggccatccgcgccggcgtcggagagccggatcttgagcgtcttcaccggcccgtcgatcctgacccgcggccatgtcggcgcgttgccgccgttcacgaccaggcacgtggacgaggacgcctggaacgactgttccggcccgtatttgagagggtccgggcaggtgacgatcagtgtcacgtccgtgacgccgagatcgctcgaccagctcatctggctcgagagatagcagtcggattgccgccgcccgagcgcgtcctccacctggagggtaaggcgttggccgaccatcgcgttgagacggtcgttgagcaacgccagttcgagcgagcttgacccgtcgtgctgcacgacacggccgcggattgtgaccacgcgcggtttcaacgtcattctggatggccagtaggcgccgtccgcctgcggacgatcggtcggcgattcccgtacctcggccgccgtataccagccatccgtcgagtttcttgccagcgtgacctcaaacggatcatgcaacgtggcgaagaggttctgcggactgccatccacgaatacgacgggttccagaccactgtccagcggaggcgtcaaagcaatcctcactgcctcacccccagctctcgtcggatgatttccaccgtctcacgtgccacgacctccgggctcttcgaccctgcaacgttgaccgtgacattggtcaccgatggctgcatggcccgaccctgagggacggtctgcgcggcgggaaccttcgcgaacacctcacgtggaatctgacgacggttcatggccgcgtacaaatcggcaccgtaatagccgaccgatttcacgttgctgacgaattcgccgcttttgacgcgcgcgttcagcagggtgatattgtcatcccccatgtaggtggccttgccgggcagcagcccctcgatgacacggccgccgccggcgtagccgcgcatcgaaaccccgtagccggtgaacaggccaccggtcttgccggttggtatgttgcccatcgcgcccttcggacgataaccgctgctggaatacgtgccgcctgaggaatcctcgtatttgccatggatggtgaaccatttgtccgcgatctgcatgttgttcaggccttggagcactccgatggcctgatcgtcgtttgcatagatatagccggttttcgagtcgatggtccagccgttcgcttcggccaccttggccagcatgtcgctgttgtccccctgcagcaacccggttttcgggtcgatggtggcacctgcggcgatggccatcgcataatcgaactgggtcttgtccagatcgagtttgccggttttcgggtcgatggtggctccggtggcgtctgcgatcttctgcatcaggtcggtgttgtcgccgctgatgcgcacggtcttgtcatcgattttctcggccttcaatttcacgtcatcgagcgccttgctggcatcatcggtgatcttgattttcaggtcgatgcccttggcggcggcattgctcagcttctcgacgccctgacgtaacgtatccgcctgcccacgtgtcaggccataacggtcggcgagcgcccctgcggcctgttcgctcatgcctgcggcgtgggcgttttcgatgaaggctttgcgggcctgttcgagtttgtctccggcttgttgggttgctgctgcagcatcgccgttggcctggccttcctcaatgattttttgagcggtgtcctgtgcggtggatgccagggattgcaaggcggattgtgaatcgtatgcctgtttttcgtggccttggagggcgttgccgctctcgtcgaatacgcggccgttttcctggatgctgccgttgaggttgaggatttcctgattgagcttggtgatggcctgatcggtggtcaggtaggttcccggtaggctgaggaagcctttcaccagaccgtcaatggcgtcggcgaggtcttcggtgcttgtggcggcattgtcagcgctgtcggcgtagttgttggtgccttcggcggccgtgtctccgctggctcccgccttggcgacttcctcattggttttgctgacctgttccttggctttgccgacctggtcggagagcttattgtaactgtctcgaatactgtctgtctccatgatggacatgctgtttccggcgtttttcagctgttcgttgaacagtttttgcgcttccttggatccgttgacggcctttgcgaacgtgctgtagtcgatgccggctttgtcgagtgcgtctccaagggagcctaagccggtggcgaacttgtctccgaagtcccatgttttgtcctcgccgctggcgattttcttgatgagggtttcgacggagctgccggactggttgattgcgtcggagaattcgctgatgttggctttcgcgtcctgcgcggatttggcgaagcccaccagcagcgcgcctgcgaccgtcaaggcgatgccccatgggccgcccagcgcggcgaacaggccgctgccgatgcttttcatgccgttcattgcggtctgacctcgcgtcaggccgttggcgagcgtgccggcgttggtggacgtgccgagcatggatgtgccgagctggatgatgccgtccttgagtagtggtgcggcggtgatggcccgctggaacaggtccagcatcaggccgaagttccgtgccgtctgcgagctgctggcgttcaacggtgccatggcggagtgcagggcggtgaagccgccacccaacgcggtcagcagcacgatggactgctgtacgggcgctggcagttggctaaacgcgtccaccagcgtgtcgagtgtctgcacgagggaacgcaatgggccctgaccgccctcgcccaaagagatcatgagggattcgaacgagccgcttaggttctccaagtcgcctttcaggttgttgttcttggcggcggcctgctcggcggcgaaaccggattcgcttaccgcgtcggtccagtcggctatgccgctttcaccttccttgtagagcacgttcgcggctcgtaccgcgtcggctccgaagatggtgttgagcgcggcgttgcgctgctcctggctcatgccggacaggccctgctgcagctggccggccacgccggcgagtccgatgaattcgccgttggcgtcgtacacgttgatgccgagctcgtccatgaggctctgtgccttgtcggtggggctggccagtcgttggagcatggttttgaggctggtgcccgcgtcgctgccgatcatgccggcgttggcgaacgcggcgagcgtgccggtggtctcctgcatgctgatgcccatgctgttggacaccaagccagcctggttcaacgcgaggccgagatcgtgggcggagcccacggccttgcctgcaccggctgccagcgcgtcggccacctgggtggattccgctccggtcaggttgaactgcttgagcgtggtggccatgagctcggcggcgtcgccgacggccatgccgtcggacgcggcaaggttcagcgcgccgctcaagccgccggagagaatatccgaggttgacaggccggctttgccgagttcgttgatggcgtcggcggattcggtggccgagtagatggtgtcggcgccggcgtcgatggcggcctggcggagctggttcatctcgtcggcgctggctccggtgttggcctgcacggtactcatgctggcgtcgaagtcggcggccatcttgaccgctgccgcacccagtgcggtggcggcgactccggctgcggcgatgccggtggtgatgagcttcgatttgcctccggcggcttccatggtggtcgcggccttctggctttcgcccgacaccttggccatgccggcggtgaagttgctggtgtccgcgagcaggcggactgtgatgttgcggttcaatccgcctgccatagcggcctcctgagattcatcttggtttgattcccaccgtcaatgcggactgcttcagctcgttctcgttcgcatggtccttcttccactcctccaatcgcacggattggagcagggagatctggcagacgccgacctcggccgtgaagtggaagggtgtctgctcgtcatggcagacgctgatgggcatgccgcattgggggcataacgagtgttcgtagtcgtcgagggcgagcatccactcgcgttcggtctcgtcccattcggtttccggcgtgtagccggtgatgcgcctatgcgagtcgcgttccacccgatacgctggttcccagccgagccaccttttgtagctgatgccgagctggcggcagattcgcagttcccttaccgtctgcggattatccgcgaggctgattcgagtgcgtcttttgggtcgatgagcttcgcgttcaggtcacggatcgcgtaccagaccgggctgatctggccgtcggacagttcggtcatgacgttcgccagatcctcaaccggggtttccggcacggtcttcctgaccatgagtttgatcgcgtcggcgcagatgtcctcgatgcgctgcttcgggatcccgttctcggtgacggtgttcgcctcgagcacctgacgccactgggagagcggcagggcctccagcgtgatgcggatggtgtcgtccttcacctcgtctcgcagtttgtcgatctgtttggcgatgcgtttggcggcggcgttgccgccctcggtcacatgctgcgccatggcgcgttccaaatcggctcccaatgcggcgacctgttcggccttctcctgatccaatatgaggtcgacgtccacgcgcttgcgcttcacttccaaagccatgattatccctttctgaaaagtctgcaaacctttctgagcgtgagagaagaatgtccgtgcggggccagaaaggtttagagtccccgcacggaagaattgtcagccgccggcgatggcctctttcaccgtgaccgtctggccgcccttacgggctacggcggtcacggtcggaggcgtcagccttttggggtcgagatctctgcggtctcggactcccagccgggggccttcgcgaacagcgggatcttcgagcggatcatggtgttcgcgtccgggttgatgacctgcttctcgccgcaggtgacgctcacgacggtgagcttctgcccttcggcgagcggcgcgtcggtggccatgcctcgacggcgcacgatatagccggaggcaccctcgtgcatgagtgtgacggcctcgttctgttccttgtgctcggtgttcgtgttgtcgatgacctcgatgctgatgtcgccggcggacttgcggccgggggccccgaagtcctgcacggcgttctcgcgctggtcggatacggtgtcctgtgatggttcgaagctccagccgccgagcatgacgtagttcgagatgtcggtgccgacgttgagttcggtcagcgtgggggccttgatgttggcgatggtcggcacccagatggtggtgatgttgccctcggcgctggtgccgggaatctctgtacccagtttcatggtcataatgtgctccttgaagacttttggtaaatgattggttgactatggtcggctccacgtgaagcggaacctcaggacgcgcacctggtagcggcgcgcggtgtcgtcggcggtcagaccggccgggtatgcgccggaatcctcgtacagggtgagctggccgaccgtgtagcccggcggccgggtgggggagcggttcgccaacgcgggaatcagcatgtcgtcacaccagatgttcacgctgtcggcggtggtgctgacggcgcgaacctccaacagggcggagtgggcggtgaaccgcatcgtctccgccatcacatgacggtcggtggagacgtgcgcgatgatccacggcggcatctccgactccagcggctcctcctgcctgtacaccttcacgccggacggcatggagggcagcagatcgagaaccgcattggtcaagtccatgacgctcataatccgatggctcctatcagcatgtcgtcggccgcgtctcccacgtattcggcgagcgtgggcaattcctgttcggcgaactggtaaaaccagtgggttccgccgcctttcgcggtgccgaagaacgcgatgttggccaagtcggaagctccgccgtcgcgggggctcacatccgcataaatggtggtgccggtgctgcccatttcgtagccgatgccgatacggctgatcgcgtagttcgatgatgtctgcaggtcggagatgacgccttccttgacgttttgcgcgcccttcttcaccgcctgcgcgaccttgaccgaagccatggcgtgcgcggcggcgacacgacggccgaacgcggtcagctccgaagcgtctatggtgatgtcactcattgctgttgcccacctccttcacattccaccggcatgcggtggagtgtgtcttctcggactgcatgttcaacaaccggagtttcctgcccttgagattcgggtcatcggcctcggttatctcgcacacgtcacccggcaataaacccatggtgccgtaggggaaatgcacgtacatgctccacacgggagtgacggcacccaacgcttcgacgatgccgccctccgtgttctcggcagccagaccgcccgaggtctgcaccttgcaacggccctcatacacggtgttcgcagccggttccaccagtcccgtttcggggtcggtgaccggtttgcccatatgggtgacgcggcactggtcggtcatcaacgattcggcgagctgtcggcctcggttgaggatgtgctgcacgttcatcggaacacccctatggcgatgcctcgcatgccgaacctgttgcggagggctcgtttcgtgccctcgggcagttcgagtgcgtcgatgatctcggagtcgccctgacggtagccgatctgcacgtcgtcgattcgtgcgtacgattcgtcgcggtgagcgccggggccgccgttcgactgctggacgagtccggctgcgaccatgctgcacacgaggcgcacgatgtccggggggatcgggtcatagccggcgagcatggtgacggtgatggagcgggggaccatgttcggcaggctccacaggctttccctgtacagcgcgttgccgagcagtttccaatcaccggtctgctcgccgtccacgagcacgcggctcacggaaatcacggggcgcatgggcaggtcgagcctgcgtgaggtttcaccggggatggtcaccgtgtattcgccgcgtgtgatggggcagccggcggcgtcgcgcaccgcggccgaaaccgattcgagcagcttgcccgcgagctttccgtccgcgtattcgatgccgtatgaatcaaggtccttgatcgttgccagcgtgtccatgagccccccccttatgcggttattcggcttcgcccacgtagggcatggcctcatagctgccggccatcacttgcccaccttgaagtgtacggtggccagcgcttcggggcgcacgaccttcgcgccgtacaggtgcaaccccttgacgatgtcgtcaaagcccttctccttgcgggtggcctcgaccttggcgatctgctccgcgaacgtggtggccgcgttggtgccggcgatgatgacgttgccctcatcggtcggagactgggtggagccgcccttggctgcgggagcgttgttggacttgaggatggtcatgcccgcggcctcgccgacgactccgttaagcagcgtggaatgagcggactcggcgcccgcgacgaaacgggcatccttgcgcagcaggccatagaagtccggggtgacgatgacccaacggcccgcgtcgggcacgttctgcttgtccaatgcggtggccagatccacgattgtgtcgtacgccttggtagcggtggcgccggaaatcgggtcgagcttgctcttcgcgccggctgccatcaggccggccaggtactggtcggtcaggtcgcgcagcttgtaggcggcgtcctgggagtatgcggcggtcaggttgttcatggcctggcgcttctccacgtcgtcgatttcgaacgcgaagtacttgctctggttgatgacgagttcgccggcgtccttgtcggtggccggttcgatggtgatgtcggtgtgggccgtgtagtcgccgatgctgatgtgcgcgatgccggtgatgtgcacggtgtcgccgtagttggcgatgtcgccctcgtagtcgcggttcacggcggaaccgtagacgaggttcttctggagttccagcaggatgttggcgctccacagttcggggatgaaattggtgatggccatttaaggcctccttccgtttagttggctccgagcaggtccttcagtcgtccgtcctgttgggctttgacgatttctgcggggctcatggttttcaggtcgtctcgggtgagctgaccctgatggcggtcgccgtcccgtgttccgctgggcggcgtgatgttcgcgcccgagggcgcttgctcggctttcccgagataaggtttctgttccagcagttcgccgatggagtcggcgatggcctgcgtgtccacgccgccgtcagccgtgacggtgaatttggacaggtcgaggtagcgcagggcgtcggccgggtcggtgagcttgccgctggctgcggcgcggacttcggccttgaggatgcgctggttggcggcggcaagggcctcgtccttgacggcctgctccttccgggcggcctcgtattcggcctccttgccctgcagggcggcgatctgtttttcgagttcgtctaccttgtcggccttggcgtaggcttcgttcagtttcttttcgaggtcgcggttgactttccgctggccctcgaacttcgactgccaatcctcgccgccggtgttctccggcttcttggcctcgttgtcgtccgaattctggttctggtttgcgggatccatgttcttcctttcgattcgctggatcattgctggaaaatctggccgccggaggtgacccatcggcggtattcgcgttcgcactgggccgcgatttcgggggtgaggggcatgcggccatcgttggggttgcgtccctccaatacggcctcgtagcggagcttcgcggtctgtacgcgcttctcggcggcggtcaacagttcgacgcgcccctgccggtacgtgttgtcgtgcagccacatgcccttgcggatctcgggcaccttgccgcgccagtcgttgtccacgaaatatccgttggccttcaacgcggctatggtcttctcccggtcgcctccggtcagcgagtagatgccgtcgatggacaggcggcgtttcatcctccgtccggactgttgcgcgtattgcatgctggcccacccgtatcgggtggtgccctcgctggtggtcaacgccgtatagcctttgcccaccttccgcatgccgcgtttcgagttgacgacctggtagatgtcggccccgtcgcggatggcctgggcgtagttcgtgccgaagcgtttgtcctgctcctcatgggagagacttttgaaaccctccatagggtcgctgatccatccctgttgtttggccatgctctggctgcagggcacgtggcggccgtggcagtgggggtggcgcaggaacccctcgttgaatcggaaccatttgccggccaatatcatgcacctgtcgcagcaggtggcggattcgacgcggatgtagccgaccttgggacggctggtgatgtccagtgactccgcctggcgggcggtgtccatgacggccagagaggtgagcattaccagcaggttgcgtccgtattccaacgcctccaatgaggagctgccggtgcgtatcgcgtgcagggcggcgaacacgggggattggaagtaggatgcgatgtcgaggccggacggtgcccaaccggcgaatgcgttcgggttggccaaggcgtgtggcgtgatgtagacgccctgttcggcgagcatcatgccgctcgcgtcgatggctgtctccgccgacttggtttggatggtggagaacagggtgaggaagtcgcggcttatcgacttccacgacgcctggatgttattggcgtcgaccctgttccatgttctgcgtgcggctctgtccgccgccagctccaaggtcgccagccgtttctgactgtaggccagcacctgagattcgaccgccatcagcgcctccgatctgcagggcacggttcaacgattcgagttcggggtcggccatctcgtcggcgcgcatgcgcatgatgcgctgcacctcgtccgagctttggcccatctgctccgcgacccattggatcgggaagccgagctgcttgtatttgagcatcgcgtccgccatcagggcttcgctgcgatactgcggggtcgcgaactgcaccttggagccggcgatgatgtccgcctcagccacgtcgttctcgtagcgcatggcgatgctgcagatgtcgcggatgggggatttcaggaagctgatgcgttcgatggtcttggatacgaggccggcttcggcgacctcgtagccggtggccggaacctccgcgttcgtcagcaggtaatggccgggggtgcgtgtttcggcggcgatatgctccaccgctttttcgatgaccgggatgaacacgttcaggttcgagcttgaccattcgcccaggttcacgttgtcgccggtgaactggtagatgcgctccagcacctgcttgtcgagttcgatgggcttctcgccgacctgctgtccctcctcgttgtagacgggctcgacgagcgggtctccgccgaggatgactcgtgccggcagtgaggcgtagtccaatgcgttcagcaggtaggcccatacgacgttgaccgtgtcctgcatcgattcgacgtgcgcgatgtcgctgatcggcgcattgtccaatagcatctggttgcggaactcgcgcagggggatcgtgtccagaccggtgggctgagggtcattcatcttccagccgtacacgtcgggcggcacgcgctggtcggtcagatcgagcatcttcttgcgttccatgctgaccgtccagccgggcagcatgagggtgccgtactccttgtcgtcgccctgctggatgaggaacccggctgacggctggccggtgcgcgcatcgtagatgactgcggcgctgtccgggtgctcgaacgtgatgcgggccctgccgtcgacctgcgtgaccaaagcgaacgcgcggcccgtggtggtcatcatcagcgcggcttcctgaagtccgcgttcgaagtcgttgcggtcgaggcatttcatgatgccggtgccgagcttcacgtcatcataagggacgaagcccttgaacttgatgcgttccactggggcctgcgccacggggaggcaccagttgtcggagaagtcggagaaccggtcgctcatgtagcgcttgaattccttggacgcgaacttgagcttgccgcgtttgcccaagacgtaatcggtgtgggagccgatgctgggtcgacggaactggatcttatcggccagtcggttcgccaatgaggacagttcctgctggctgtagtccatcagtacctccttctggtcgatgatccggtaagcatgtaattgtgtttgcgagcgccccagccggcggctcgcgcgtcgcatgcggcttcgtgggcgagcacgctggtcacggcggcgtctattttcctgttctgttggggtttcgccagtccgtagcgttccagggtcttggcgacctttcgcgcgttcatcatgtgggtgcgggtgatggggcagccgtcctgtgtgatgcggtgcgtggtcaggtcggcttcgaatcggcgcaatgcctcgtagacggctccgatgcgggagctgcccgacatgctccacggtaggaatttcttcggcccgtaggccctgtcccatgcctctatttccgactcccacgacagttcgtcgcggaagccgggatcgcagtaggcgcgttctatcttgtagcgttcgttgagttccgcccatgctgcggatacctcggcgcgggggatgcgcccgccccactgcttcgggttccagatggtcgcacgccggtcgggcccgtatcggggagtgaatatcagcccgtcgagggtctccatcttgatgcatgtccagtcgtcgttctccgaaccgtcgaagcccgcgcatacgcgtgtgccttttggcgggttcggcagccagagttcatgcgccggcatagcagctctcccatagtccgtcttcgagccatgcgccgccgccttgcaccagacggttcccgaagaaccgttccgcctgggtcgggtcggtcttcatcagcgccttggcctccgattcgatggagttcaggtcgacccatggtgagccgcggtacacgtattcgagcatcttcaaccgttcggatttcaggttgaagtccaatgggcggccgtcgcggtgtcgcaatgatttcgcgagatcggggttccggtagaacacgaacacgtcgtcctcggcgttctcgaacacctgctgcgcgtaactgtcctcgcccggatcccatgcgttcgtccacgcatgcgtgcggccgcccatgccggcggctcctcgacgctgcgtggtggcgaccgctatcatgccgttcgacttcatgtacaggccggcctcgtcctgttcggcgtccgtgatcggattgcccagacgggatttcgccgaggcggtgaccacgtcgatgcggtccaggtccaaggcgtcggcctcgccctcgcgccccggctgcagtatgcggatgaaggtgtccctcacgcgcataagctccttgagcgggccaagcaggatcgtcgccacgagaggccggtagatgttgcgcacctgctcctcggagttcgccgtcaactggatgagcggcgacggatgccgacggcctttcggctcgcccggattgtatggccactcccagccgcacgggcagccgttgtcggcgcaccggtacacgtcgccttcctgtgcccagccatcgaagatggtgggcccgcagccctcggcggcggtgaagaacgccgtgcatggccccttgccccatttctgcggtccgacggtcaacgtcattcgataggtgaacgcctgattgagcaccatcggattgtcgacggtgacttcctcgggcggcacatatggggcgtccacgcggatgcgccaacggttcgccgccagccagtactgccagtcggacagcaccaccggacggcctcgcaacgggccgtcgggctgccggcagtgacgttcgatccacgcgcacaccagatgccccaacgtggggaagtcgatgagccatgaatcctcgtcagccattgccgctcatccgacgctggtacacatgcctcgtctcgtccatgggagagcgttcggcggccgattcccggttcagctccttggccctgcggcgcgtgaactccgaatcgactggcttccgctcggcctcggcctcgatcttccagcccaacgcctgcaatccggccacgctcatgccgacgcggtcggagatgcgcagcagcacggtcaacgccgtgggtgccggcgcgatctcgcatgcggtggaaagccgtgcgtacaacgccagttcccggatcatccacttgaactggggcagatgccaggcgcgtgcctgaggcagcttccacagccacttccacttctccgcctcaagcctgcggacgcgctcgtcatcggcgggctccaagggccattccggcggcttcatccggcactcggtgttcggcaggctctgcaatgtgtatccgagtctgcggctcttctcgctgttcgggtccttggccggcccggagcgtactcgtttgcctccacttggcatgatgttcacctctcgtcatggccttgcgccctagcgacagatcgacgggaccgccctcgcggcggcccgtcggcgatgtttgaaccctgcgcacccggcagacagctcaccggcggttcaggcaggggtggtcgataccccacccccccccctgggtgttgccggtcgtttttttactgtttggtattgaagcctgctggtcttgttctgccggttttcacgtcgtggcattgtttgcacaatcctcgtccgaacttcgggtcgttcggattgagtcgcatgtctatgagttcgattcgctcgtatggataatgatccgcgattgtgcttggttttccgcagagccccttgtgtttgccgcagcctccgtgctcggggtcgccggggcatgtgcagtatgggtctcgtgcgagcacctgcctgcgaaacgattgatgtcccttggtgttgtatgggttgcgtccacgggtacgggtgcggtcccgttgggctcgggtgcaggcgtcgcatttgcgtgccggtgtctcgatgaggttcggacatccgggtgtcgagcagactcgccagctcatgtgtgcctcgcagtcattgtgtccgttggcgtgtcttggtgtcctcggcttgcatatctatagttattgtgttactatagatatgtcagccaaggaaaggaggtgaacatggaacagatcgcggagctgctcaaggccatcggggagttcctctccggattgggtgcggcactcgcacccatcgccgccgtggccgtcgcattgattgcgaagagcaagccgcgaaagccgctgaacagacggcgcaagcggtaacaagagccgtggattccggataatcgtactatccagagccacggctccactcccaactattccatggaacatcatgaacggcaagataggaatcatcgcactcatgttcggagtcgtcagcctcgcgctggccatcgcatcccagagcgtaccggcaggtgtgttcggaatgtgctcgggcgtgctgggttatctggcaggaagggcaagcaatggcgactgaatatctcggcgtcaaacaggtcgcagaacgccttggcatcaccagtggcggcttgctcaacctcaagctccctgagcccgacgccacgatagggcgcacgcgcggctggttgcctgagaccatcgatgaatggaacgctcaacgtccgggacgtggtgtcggaggggggagaccacgcaaaaacaaagcatagatacgcgaaaacccagccacatgagctgggtttttcgatactaatccactgacattatgcggtcacagtcagctctttgtcaagtccgccactgatgacgagccggtagacgctgctgtatgaaatgccttggggcgtgacatcaagcttgcctcgggatttccacacggtgagcgtatgccttttgatggcgattcccgtgtccgcgaacaccttggctatctccgccgccgagccgcgccgactgtcatcccagcagagcttttccaaacgtctcagtttgactgtctgcacacgctgctcggtaccgcatatggggcatgtgacccattggtcgtttgcacctgcggtgagcatggtctcgcatagttcgcaggtgccgatttcacggcgttgttcgggcgggtccagaacaaggtcgattttccgggcgatgccgttgatggtcgccatgtagaatcctgcgtccgcgaacgtggcaaggcatgcatggcctgcgcatgcgatgagcgtggccttcaaatcctcgttgcgtttgtccttgcgccagtccaaagcgtcgataccgtcgaggcaacgccacagttcacgagccgtggcgtcgagcatatcgatcaggtcgagcacgtccaagcgtatcggcgtcgggggagtggccgtctggatgcgcacgggcgaatgcccgcccggatgcaatgtcgcgtcgaggctgtcatgcaatggcgtgacatcatgcgccaatcgcaggagcgtgccggcgaaacgcatctcgcatgctgcgcacagtgaatacccctcttcggttatcgtcttgcagttctggcagttcatgctaagccccttccggctggtcggctagaataatgcttgcttctcatcgccctggccgaccacggttggggctttctcatatttgagccgcgaatacggcatgtcccagatgcgtttgaattcatcgagctcccttttcgtgaggttgcgtccgccccacggcttgcccggcggacggtctcttttcggcggcttgaacggcttgacgctcactcttgccaagcggcacatgtgaccagcgaggtattggccgtcaggcctgatgcccgcactcccgctcacgctgcgcagcaacggatagccgactgatggcagccagacaacccgcgtcaacggccggccgaggattatcgccaccgtcaggtcatcaccctccacaagtccgcagtcccacgactcccacacgctctccctgtcctgaatcacatacaggccacacccctcgcagaccgtgaccacgagcgggctggatttcgggatgaacgcgcgaagccatgctggtttgcgttcacgggcgcgtggcctgctcactcctccattgcctttcttcttgccgcgtcgaacgcgattctgatgatgttctccatccacgcgccggggagcgtgatgaactttcgggtttcggccatggcggcggcaatctcctcttcggtgatttcgcgtgacgctccggccttgtatcctcgtccccacgcccactgcaggtcactgtcgatgtacgacgggtcacgctgcttctgtgcctcgatttcactgctgatgatgctcattcgtttcctccgtttcgttgttgattgccgtttcgattcgtatgcacaggtcgagcgcttcccgccagccggcctggtagccgagcacatacgcctctgccggcgactcgctgcccaatcccgctgaggccagtgcgctgagcgcccgttgaatcacgtcaatcggtccggccatgggtcagtcctcccatttgatgtcctggatttcatgcagcaccgcttcgcaggcggtgatgagtacgctgagcatacggcggccgtgatgtcctctccggtcaaggttgaacaggacgggatggccttgactccactggtcgatgccgatggaggcgattgggatggtttcgaccagattggtgtcagcatcctcacagcggtattggatggtgacggattctttcatgcttcctcgctttcagtcgtgtaacagttcgcgtcgagccagtcggcgatgacgcggaagtccttggcccattggatgcggttttcccgctcccgctcgtccttgggagctggtttcggctcattgaggttgagtagtccgtattcgggtttcttcagatagtggcagcgggcgcgtccgcgtcccttgccggcttgcttgtagttgatgagctggagtatgtgcagcatctccaacgccttggtcggatcgaagttcggggtctcagaatccgcatcgaagcgctttcgaagctcgggcgtggttccctctccattgccaagctcccatgcggtcgcttcgatctgctccctgaatgtgagtgccatcttccggtctcctttctgacgttttcttgattgggaacaactagtgtcgttgacgtgctttttttgctgttccggagggccgagtcgcagttgttcccgcacccacccacacacgtagtgtgggtggggagtgctgggaacagctggacatcgctactccagttgttccgggaacaactcggaacaactgggaacaacgggaacaactagatttcgagatggttttccttatccaattcgttcgcctcctccctgctcatccggtccacgaaagcgtccgatttcgggtcgttcatctgccggtatggtctgacgctggcgtagatgttccggttgttgcgtccggagcggttgctgatccactcgccctcgagcagccggttgatggcggtgagcacggtggtcttccgggcgcttgaaccgtcgtccttcagcagttcgatgatctcggtctggttcggctcctcgggcgcgttctcgacgatccggctgatcttctccatgagtccggttggccgttcgaggccgcgctgtcgcgtggtttcatcgctgggcatcatgttggggcgtgcgatggtgacgcgcatgagtttcggatccgtgctgttgatttcgatgcgtgcggcttcgcgcaggtggctgccgttgctgctccagctgacggcgcaatgctcctcgatttcgctgatgcggtctttgccgcttttgatgacgatgacgccgcgtacgcctttgccgactggcttggtcatgtccaccgagtagctgatgccgtcgatgagtgcgagtttctgcatgctgccgccggcgtagcggccccggttgtccttgcttttgacgacgtggtcgatgagtacgactgctggcccacaggcgctgatgagtcgtggcatggtgttgtaccaggcggcgatgtcgtcaccgctgttgctgtcgaggccggcgtaggcgaggcagctggtgacgccgtcgatgatggtcagcgtggccgtgtccgcgtagtcgagggtttccttccagccgtcgaggctggtggggctgctaggcttggcgctggggcgcacgtagtggaagcgggccactatctgctcgccggtcacgccgagcagcaggaggcgtttgaccacgtttctggcgctgtcctcataatcgatgtagatgacatcatggctactcttgagttcctgggcggtggcgatctgggcgagcatgcttttgccgcagccgggttcgccgtgcaggtcgttgaccgcgccacggtagaagaggccttggccgtcctctcgttggaacacggtgggcgtgggcggcagttcgacgccggacgccaactgggtgaggtcctcgaaccgccaactggaggaggttttatttgcctcgtgactttccattgaaccgttttgaaccggtgcgacgggtgttgaaccggcttgaaccggcattgttccagtgttttgaactgcttccgggtgactttcctccatttgactcgcagccgcgttttgggtgagttcgtcgaactcgccgggcgtcatgcgttcgattttcgactgctcgcacggatccacatgcgattgcacgccgttgaccttctccatcgcgccactgagaatgctggcccattcgcgtgccgcctcacgctccttgccttgacggtcgggggccacctcggcgatgaaccgtggcttcaattggttgatggcgtcgagagccccccggtgtccctcctgcgcgaagttaaccaacgcccagacggcctgcagcgtggtgtcatgccttgagcctttgcttgccgggttggcgagcgtcttgttgaggaacgtgttgaccgccttgcacatgtggtcgtcgtattcccttgaatacgagggagttaaagtggtcgaattcgacactctgtcgggtttgcgcaggtagtccacccacttccatggcagtgtcgccaagtcgtcgatatgggggagcgtgccggagaatgcgccgcttggcgtgtaccagcagtacatttcgccgctcgggtggatcgacggccagaccacggaataccggtggccgggctgcaggatgtcgactccctcgatggcgccgcccttccacgcgaggccttcgggcaccttgtagaacaggtggcgtgccggactgtcgatgccgtgcgccgtgctgctccacgtggccggaagcatgcccagttcctgagagagttcgctgatgcctttcgccccgtccgccttgacctgatggccttgtgcggcgtcgatgtccaacaccaatacgccttcggggatgacgattcccgtgttcgcgtccggggtcgcctgcgaccagacctgtacttgttcgtcggtgacgggtttgcggctgcgtcccgtgaaaccgctgggcggcggggtcttgcggccttcgggcagggggatgacttgcatccagccggcagcacggtacatgggtgcggctgccgcgtatccgtagatgtcggtcattcctggaactcctttgacgtgatgtgaatatgtgtggtgccgtgcacgcctttgcattcgtgcgggccgcttggatacggctacggcggtcgggactggtatcagtccttgtcggaatccttgctcttgtgtcagcccaggagcacgagtctcacgctcatgagctggaggctttccgaatcgacgtcacggaaaccgacctgatcggaggcaagggaatccatgtccttcaccagttcgatccactggttctgcaggtgtttcagcagctcgtccactagaactcacctgtttccggcatctgttcggaacccccgtggtattggggttgagcctggtcggttacggcggtgaccgcttcgaccggcacgcccaacaatgcggctatctcctgcgggcttttgcccacggccttcaactggttgaccttcatcggatcagcctgctgctgtggctggccgagcggcaccggctgaacgggttgctgcggctgttgctgcgtcggcgggttccacgggtcgaccggaggctgctgatacccctgattcggggtctgcgtgggctgctggggagcgtactgccgctgcgggtagtcttgctgggactgctgcacgggaggctgctgggagccctgctggacaggctgctggggttggctgccgttcacgagattgttgacgctggacgcgggttcgatgtggaattcgaacaccttcggcggctggggcgcgtcgccccgcgggccgagacccacgaaccgttccgtgatggtgtcgcccggcttcgggatcttcacgcccgcctgacggcaggcctcgcgaaacgccttgagctggatgccccagcccttgatccagagcgagcggcggccgtcgtcgtcatccacgctcgggtcgcgcaactgggtctggatgatgacgtggatctgctccttcgggcgtccgtcgttccaataggcgggctgtttggtctggaagtcgttgacctgcgtggtctcgattttttcgatgacgccggtcaccgagtctccgggctggctgttcgcgccgaagtacgctttggcgctgttgccggcgagcaggtcgccgagcgagctcaactgggcgggctgtcgttggggctgctggtagccgtacccctgctgcgggtacccgtactgttgtggttgtccgaacattgtcgtgttcctttcgttgttttttacttggtgaactggtattcgggttcgagcaggtccatgagctgcagccattggtccggcacttcgggccatgcctgttcgtcgaattcggggagcgtggtcgagtccggccacgtgttgcagtcgaagcaatgccccgtgctgtgtggtagtcggcggatccacgagtcacgcatcttgggcccgtcggcgagctctatcacgtcgagcaggttcgcgagcaggttcgcccgtgacaaggcccacatgcccggcttctcgtcgaactcccgctcccacgggtaggcgtcattgagcgtctggctgttgcggggaaggaagtaaatgcagctgagccgcacgtccacgccctcgttcctgagccctattccgtacaggctggcctgcacccggtatgtctgcgatgggccgtgggccttcgcgagcttcagtgtggagttgtcgttcacgtacttccagtcgatggtcgcgccttcggccacgtcccacaggtcgatgctgcccttgatgtcgtagccgcccgtgaggccgttcaaccggcccacggtcaccgtgtactcggtgcaatacaacggtttgagctcctcgggggcgggtccgtcgaacacctggccgccgtacatgacctgcgggttggagaacaggcgttcgaaatgctcgtgcagacaggtgcccgtgtagggcagccatgccggctgcttcgactgttcccagcccgccagcttcgccgccagacagtgcaggcagtccgtgcccagttcgctgggtccgagctcacgctgtaggttgcgcggcttgttgacgatgtccgcctcgatgatgccgcgaatcttcggccataacctgggttcctccatcgtgtccacccgtgttttcggcgtgactggcggcttgcccatgccgggtgccgactgggtcatgggcggtgtgtccactggtatcgcatcaccctgctgctgggcttgtgcgacggccaataccgcctcattcatgctcacggttcttcacctccttcaaaaactcgttgatctgtttcttgatgtccgtgagtgcggtccggctgagccgtgtgatggccaccgcctcgttcgaattgtcgaagcgcagcgtgtaggtgcggtcgccgtccttcgcgatggttaccggcatgctgccgaaggccatcgaatgcatggggaagccggtcttgccttgcgtctccagttcgcgtatggccttgtggatgcgtctggcgacggtgagtcccagctcgtcgagctgctcggaacggatgacgtacaggtcgtcggtcagctcctggccgtcctcgtcatgcaggtcgtagtcggcgatggcgctttccacgatccgggcgatgcccaggctggacagttccgcgctcatgagaccaccaccgtcggcttgccgctcatcgcgtaatcggccaccgcgtccgccgtcagcagtttctccaactggctgagcggccgcggccgcagctggtaggctccgggatacttggtggccgggtaggctttttcgaacgtgccggcgttgatgcggcgcgcgcccggtttcacctgcactttcaggttgccggcctggtaggtgccggccggatgcgagtcgaggatacgggccttcaactcgtcgacctcctcctgacgactggcgatttcggcctgcagttccacgatgcgaaccgcctgcgcggcgaacaatccttggcgcagctcctcgtccgggttcacggcctctgtgttttcaatggttgatggagtcatttgatgtgcctttcacgatgatttgggcgtaggtgggataccacgccgtctgatgcttggtctggttcgtgtgccggttgcagcaggtgaccgcctcgtccagtccggtgggcttgccgagcggcccgcatgtcctgcaacgcggcatccagagacgccggtcaggcatcctgcctgtccttggaggtgagtcgcagtccggcgatgatgtccgccgaagcgtccgggttgcgcagcagcttcgacacggccgaaccctccttgacggtcagttgggcgacggcgatggccgacgtgacggccgtatgctgctcgttggtgagcatgatcttgtcggacagcaacagtttggtcgcccggtcgatgaacgtgctggccgcgttcgtgatgccgttcgccggcggcaccaaagccgccagttcgaaactcagatcctcgtccgctatcagcgcctgctgcaccagacggggttcgttgatcggcttgctcatgattgttctccttgcttgttcggcccccgttccgggagcggcttgattcggatatagagatgtggttcgtattcgtgcccgcagtacgtgtacgggtcgccggacttgcgtttccggtatttgcctttggctccgtacacccataggtcgggcatgcgcttggtggcatgggattcgacgacctgcgcgtcgtccacgtaggcgacgccgttcagcgagtccaaaaccagcttcagcaggttgtcgagatccgggcggccgcgatggctcatccagaattcggcctccaacctgaccgggcactggtatggtttcgcctgcgggtatttcagacggaattccgcgaacaggcgttcctccgccctgacggtgcgcttcggggtcatcgcgtgcccgttgtagacgcggggacgccccttcggcaccgggtcgcccggcagacaaagagtgaactcactcggctgttccatcgccaccccacttcaacaggattcccacgaacacgagcggcaatacgaccgccaatgcgagcgagccggttatcatccactgcggcgtacccaccggactggggatgcgactatgcgtgccggcgaaaccgaccagccaaccctcgaagaacgtgagagccagtaacacggccgatttctgcccgtccgttaacctcggccggggtcggcgcatacgcttctttttgcgcaatgcttcgatgctcattccgcaacctccttgcgcttgcgttggatgtcacgcagcagggtcagcgactggctgaggatcatcgacgcatcgaacgccaactggttctcaccaaggtcgaacaggcactgttcgagcgaacctgcagcgtcatgcacgtcactggccacatcgacggcgtgctgccactgatcgaccggatggaacaatctttcctccacggtgtccttgtccggatcgcacgccggacaatcgcacttgccggtttccggctggcgcgtctcctcgtccaactccttctccaactcagcctctcctccctcaagcagctgctccatgagctccttgaatgacattcccttcgggatctcgacgccgatggcgtggattccggtaatcttgtgtcctgacatcacttgttttcctttcaatgtgattggtgatgttggtgccggcgtgaaccttggacagtgcgacgccggcacctcttttctcccggtttcgaatccgggaaacccttattcgccatggaccagctccctgcggcttatcgcgcaccgccggtcccggtagtcgatgacctcttgtggattccaaacgagcctgcggcctacgcgtttcggagccggcggataccggcctccccacttgtcatggcatgaccacacgtagagactgcccttcgagacaccgaggaagctcgccaccttggcgatcggccagccgtcaagagacgattcgatttgactaccggccatcacgcacccgcttccaggtcaaggggagtgcagcccagatacctctggatgaggtactgctggcccttgggcgtgaccttcgtcgtgaagttcaacgacacatgaccatccgaatgggcgatcgatgtttccttgacctcgaacaaacccagttccatgctcttctgcgtcggcatgttcgggttcccgttgcgcttcatcaggaaaccgtcctcgcgcaattgcttgaacaaccggttctggccggtcttcacgccgttctgcttgaggatcttcgccaattcgccgatcagaatgctcctcttgctcgtggccacagcgtccgcgaacaacaccttcggcttctgctcgtccaactgcttccgttgttcttcgatggtcttccgggcgatgagcaccgcgcgcgccatcgtctcctccggggtttcggcctgggggatgtaaccgccggtgcgacggatctgggggacgacctcgtcgaacagccaatgctcgaactcgactgcgctggggagcttgctgctggcgatgaggcggtacacgtcgccttcggtgaggaacacggcctgttgggtgcggccgaggctgtcggtgatggggtagcgattcgcgaccccatcgatatgacggcagtgcttcctgattgcgtcgttggtgttgctgtatccgagtgcggtggcgacatgcttcgcgcagaacagcaccgtcccgttctccgcggtcaccgtggcgaccgggttgcccctgaactcgaagggctgtacattggattcggtcatttgaacctgctttcaattgatatcgccgccgctgcaatcggcggcatttttttgtggctagaatctgagccatgtggaaatggctggcggacaactggatgggattgacggcactgctactgtccttcgacgcggaacgacgcctgtacctctcgaccgactggggagtggagaagacgaatggggacgggtggatactgcgcaacaacgagtggctcaccgaacgagacattcgagtgacgccgactggcggcgctatcgtcgaataccgtggggactccaagctcaagcgccatgagtccggcaccgtcatcgtcgcgatggtcgagacctcgaaatcgagagacatccgcgtatcctcgcgaagaatcctgttccggcattcccggatcctgtccctatagaccccggcccgacatccacgggctcgagcccacggaggcagaagccgacgtcttccttgtcgcagacgacgagtcccgtgtattcgacccagcatttgccgtcatcgaacacgcgaaccgtcatcgggtggccgtccaaccatctgacacgatccatgtcgatgccgagaatacgaatcagcgcacgggccctctcacgttccgcgccaccaagccggtaggtcctaaccatcacgccaccgcctcctgctgcgcgcccagtacgaactggtcgttgaggaagtcgccgggctgatagccggtgagcttggcgaaagtctcgacgtccgtgagggacaggtctaccttgccgttgattctgcgtgagaccacgtccaccgactggccggtttgtttcgcgtagtccgcgacgctgattttctgtgcggccatcactgctctgattcgagccgccgcttgttcgctgagctttgtcacggttgcctccttttgtgttccgtgtttgagcgatggctacagtatgcacgcaattgcgagcgtatacaaattacggcgtgtcgcaattgcgtgcaacttaaaggatttgcactactaagaaaattaacgtcgcgcgtgttcgcgcaattacgcgctattatgaagctatgggaagtaacaagattggtgtcagcgatttcgcgctgacggtaagcgccgccatcagagcgcaaatgggaatacgccgcatctccaacagggaaatcgcgaaactcatcgaccgaggcgcaacctacgtcaactccagaatcaaagacgagaacgaatgggccctcggcgacatcgaacgactctgcgaactctggaacatgacgccatgcgaactcatcgaatccgtcaacagcgagcagtctcgtgtggccgaaactctcaataagctcaagcgcggcgatctcgacatcgccgcctacgaggacgaccacaagtttgatggcgacggagatgaccccgcatgacgaatccgctcccgatatcgccgcgcatgagctacgggcagatacgcacggccctctaccaggtcgcgcccgacctgcacgtggccagcacccgcctgcccggcaaattggacggcatctactgcctgaccacgaacaccgtgctcatcgaccggcgcatcacctacacacgcaaacgctgcgccctggtgcacgagctcgtgcattggcaacacggcgacgacaccacccacggctgcatcggcggcaaaaacgagcggcgctgccaacacgagaccgccagactgctcatcaacccggccgaatacgcgctggcggaacgcatgtacgatggcaatccctaccagatggccgccgaactcaacgtgaccgtacaagtcatagaagattacaagaactggctgcacgacagtgtggccgcctggaagaaagaagaaaacaatgaccgagccaacccccatgcaggcacagcagccgccggcgacgcaggatagccagcccgcagcagcaccatccgcgtcaacgctggcaccgaagaagaagctcccaacggcggctgtcatcgccatcgccgcgatcataggactggtcgtgggacttgccggcggactcggaggcatgtacctgtacgccacgcccatcatcaaccagcagaagtcggacatccaagacctcaatacatcattggactccgtcaaagcgcagctgaccgacgcgaacgaaaaactcaacccccaggaagatcccaacgacacgggatccaacaccgacgcttcgggcacgggtgagaccgccgtcagcggcggcgtcgaaatgaaggtcctcgaagccggcgaacagcccaccatcagcttcgacacatgcggcgacggatgcagcaacggccaatacaggccaaagacaccggacgcgaacaccaagtactgggtggccaaggtggaggtcacgaacaacactagcagtccgatggacatcacctgcagctacccctatgagatagtcgcgttgaactcgaagaaccagaaatacacgcccatcaagaatctgtatcaggtcgaaggcaaccccgagtgcaacgcccagctccagcctggattgaccagcacggtcacctatccgttccaggtcccattggacgcgaagatggttgccatagcattccgcgacgtcggagacgtgtattccggcaccggcggggaggacagctactcctatatagtcaccaacccgaattacgtggtcaatcgatagaaaaagaattgccctgttggcactgcagcgccaacagggcggttgaagaatccagctagttcaagaacaggacactgctgtacgaccgtgtagcagtttaggggaagaagagagtcatgggattcaggattcgcaaaagtataagtctcggcaaggggttgcggttgaacctcggcaaaagcggggtaaccagcgtgaccatgggcaagcgtggcgcgccgcacgtgaccgtaggcaaaggcggcacacggttcggcgccccgataatccccggcaccggcatcagctacgagactagacttgacaagccgtcaaagaaggcgagaagaaagaacacgacgatgggcagccaaaaggaaccggcatacaccccgtcaacgttcccaaccccaacgcagcagctgcccaccacgtcggaacagccgatggagatactggcaccgaccgaagtgctgcagcagccgccagccacaccgacaacgcctccccgagacggagggaatggcggaagaaacggacgacacggttcacacggcgcgaagaaaccatggtacaagcgctggtggggaataactatcatcgttctgctgaccatcggcgtcatcggctacatattcacaccatccaaggccatccccgacgtcgtgggccagacagttttcgaagccaagattgccctcgaaaaggaaggcttcaaaaccatcactgtcacgcccgacaccaaaggtaaagacaggaaatggaaagtcgaggaacagacgcccgaagcagggcaaaaggagaagacctccacatctatcacgctcacagtgaagcgagacacttctgacctgccgaacatagccaaaaaaggcatgatgctggacaaggccatcaccgctctgaccgatgaagggtatgacgcctcggactacaagatcgaaagcgacagcggcaaatcggtcattctctattcgaactgggagattctgtcagcgaacaacggcgtgattcgagtacacaacaaggccgccgacgaagaggcggccagaaaggcggaggaagaaaagaagaaagcggaggaagaagcagctcagaaagcagaggaagagaagaaagccgccgaggaacaggctcggcaacaggcggaacaacaagcacagcagcaggccgctgccgaggaagccgcacggcaggctcaacagcaggccgagcagcaacaagcacagcagcaaacagctcctccgtccatcggaacggtgcgcggaggctcgttctgcagcagcgagggttcaaccggcacatcatcggccggtaacatactgacatgccgagtcgcctcagacggcagacttcgctggatgaaatgagaattgccctgccggcgttgcagcgtcagcagggctgactctataatctgttttcttccgttttgggctcattgagaacagattccgattgtctatatatcgatttccggcgttttcgatacatagaagagtaatattcgtattccaaacatcgatacaacgcgaaacgaggtgataggagagatggactacaaaagcatccggcagaccatcaacatgtcccggtccacggagaaacccacggacgccgcccaacgcgaatacgagtcacgggtcaacggatggtccacgttccgttccggaatcacgttcgacggacacgagatgttcgccgtatgcttcagggaactcggcacggccctcgacaccgtgagggaactcgaaggaagcgtcgaatcattgtggaacgacctgccgaacatcgccaaacgggcctacctgttcgacctcatcggagccgaggtgcaaagcaccaacaccatcgaaggcgtgcacaccacacgcaaggagatagccgacgcactggaatcggccgcgggcgagggcccccacaaacggctgaccgaattcgcgaaactgttcctcggactgtccggagaggacggcgaacagctcgaactgccccacgagctcaaggacatcaggaacatctacgaccaggtcaccgacggcgagatagccgacaaggacaaaccggacggcatactgttccgaaagggaacggtctccgtgtgggacgacggcaacgggcgcaaactccacgacggcgcataccccgaatcggagatccaggtgcaactcaccaaatggataaccctgctcaccgactcgaacataccgccggtgctccgggccgtgatgtgccactacgccttcgaatacgtccacccgttctacgacggcaacggaaggacggggcgattcctgctggcattgcagctgagcaagcatctgagcgtgcccaccgcgatatcgctcagccccgtcatagccgacgccaaaggtcagtactacaaggcgttcgacgacgcccagttcccgttgaactgctccgacgtgtccctgttctgctaccggatggtgaagttcatcatcaccgcgcagaaaaacatcatctccgatctggggaacaaatggggctccctgaaggccgcctacgacaagctcaacgactacgccgaacagaaacgcctgtccggcgaccagaaggacatcctgttctacctgcttcagattgaactgttcgacaacaacccgcaaccggcatctcgcaaggaactgtgctcgtttctcgaagccgggaacaccaggctcatgagctccatcaacgcgctcctcggcctcggcctcctgcaggaacacggcaaacggccgatacggtattcattgtcagaaacggcccacaggcaattcctgcaatagaaaaaagaatcgccctgttgatcttgaccatcaacagggcgggtgaaacatcgaccagcttgcttatcagaaaggaggacgcttcgtcttttatcctacacggggcgaagcatacccgaaatggctaacgtcaccagatgaaatcaaaaacagacgtctcctcttgataaaggaactagtcgtaatacctctcgcatacggaatatgaaacagcttgattccaacgaaagtggtggtgccgaaacacggcgtttcgcatgataaaggacggtggaagccagtgattgcaacgattcagcgatggtgccaacactaatgctgtatactcataattagattcacttagatttgataaagaaacgaggcggaaatgagtgaacgcgaatcaggggagaccgctcgatacagcggaatcctgcatctcggcgacgacatagaaataccctgcggcgtcatggatgacggcaccaggctcctctcggagagagccgtgaccaaagccctaggcggcaagcgaggaggctcccactggctgcgccagaaagaaggtagccaattgcccgtctacgcctcggccaacaacctgcaaccctacatctccgcgtccttgggaataaaactggtgtcccaccgactgtggagagccaaagggacgggcggcttcggagcctacggaatagacgccacggcgctgccggagatttgcgaagtgtacctcaacgcgcgaaaggcgggagccctcacagcatcgcagcagcacatagccgaacaggctgaaatactgatgatcgccctggccaaagtcggtgtcgtggccctcgtggacgaagccaccggctatcagacggtaaggcagcgcgacgagcttcaaaggctcctcagcaagtacatagcggaggagctgcaaccgtgggcgaaacgattcccggacgagttctacacgcagatgttccgcctacgcggatgggattacggcagcctaggcgcaggaggtaagaaaccgcgtatcgtaggcaagctcacgaacgaaatagtgtacgaacggttgcccaagggcgttctggaggaattgaagcggaagaatccgccaaccgtcgaaggtcgaagaaaatacaagcatcaccaatttctcacggaggatatcggagacgagcatctggaacgtcaaatcagcgccgatatcacactaatgcgcgcatccggcagctgggccgagttcgagcgtctgcttgaccgagcctatcccagattcggagcggtgcagggagaactggatataaaagactaaattaattgcccttcatgctgctggaacagcatgaagggcggtgaagcaaaattatcagtttgttcgagattgatagccgcttcgcgctccagtctagcagcgaagcggggaatggagcatacccatggcgaacgtcaccagatacaagaccagtaagggtgaaaccagataccgtgtgaggtaccgcaagccggacggcacgcagaccgataaacgaggcttccgccgcaagatagatgcggagaactgggcggcggagcacgtcaccatcgccaaggccaccaacagctatgttgacccggaggacggcaaacgacgcgtcggagacctctacgagcagtggctgaaggagaaatggccgttttggaaggagaccacacgggtcaacgccacggaagcatggcggctctactgcgaggagcgttgggccgatcgtcggatcggcaccgtcacccgcgccgaagtccaggcgtggatcagcgacatcatcgagaactcgggtgctccatccgtgagacgcccgtaccagaccatgctcggcatctgccgcatggccgtccgggacaagctcatactcgacaacccctgtgaaaacgttgaactccccaaactgccgaggcgcaagagccgtcgcgtgtacctgaccataccccggctgctcgcattcgccgacgaatgcgccagaggaaagcatctgggagcggagcggcaggcgctcgtgctgacgttgggcttctgcggattgcgctggggcgaggcggcggcgttgaaggcccgtgacctggacttcgatcggggagtgctgcatgtgggcggcaacctcgtgtacgtcggggcaagatgggtcgagggcactccgaagaacagtgaggaacgcgacgtgcccgtgcctctcatcgtcatggaggcgttgaaaccgatatgcggggaacgcgaaccggacgaaagagtgttccgtgatctgcggggcggcccgatcatgaagcagagcacggcgaagacgaccggctggtggtatcacgcgctggtgcgcctgggctggccgaaggaggaatggcccacgcctcatgacctgcgtcacaccgccgcctcgctggccgtgcacgcgggcgcgaacgtcaaggccttacagaggatgctgggccacaagaatgcctcgatgacgttggacgtgtacgcggatctgttcgacagcgacctgatggacgtggcccgtctgctcgatgccgccgtgcaggtggagacgggcgtggaagaatgtgggcaaaatgtgggcaaaaacgttttggaacatgcttgaaaccctcagaaacgttggaatcacgccattcctgcgaatggtggttcttcagcaagttgaaggacgcgctgagctgagagtggatgcgttcttggctcccctcagagaggggagccaagtctgttacttcagcagggagcggcacatggagcggtattcgttgacgtagccgccgccgaagaagacacagtggccggcgatggggtagagctgccagagcgtgatacgctcctgccatccggccttcaacggatgcacggactggtagccctcggtgatttcgctcagatagctcatgccgaacaggtgcagcatagccagatcctcctcgcgatgaccgccatgtgccgccgggtcgatgagcacagcctcgggctgcccggaatcggcggtccacatcacattgccgctccacagatcaccgtggatgcgcgccggcttgtcggacgcggctcggcccatcagatccggcaacgcttcaatcacgcgctcggtcagttcgacatcgcgcttatccagctcgccacgcctcacaccaaggttgaccatcgggcgcagacgtccatcagcgaaatagctgatcgggtcggtccactcgccggtatccattttcactgggtcctgcaatggcccgaaatagcatgtgccgttatatccgtcaggcgcagacccgaaatattcggcacccacatcatgcatatgggccagagccgcaccaaaagctcgtgccgcctgaggcgtgggggacgcgctgcccacacgttcgatatccagataatccttgccccagccgtatacctgcaccacgcgcgggccgccctgcgcatgagccgctcccaaccattcgagtcctcgaccctcgcattcgaagaatccttccggtgcgaatgccctgcttttgcgatacgtggccataatgctcccttcgtcgcttacgtactatatccactttcattgtagaagccgtggatgttaccgattcttagtgttgttctacacccccttgggtagggtgttcatcgtcataacacatcaaatacttagaaatcacgaggggttatgaattttttccaagcgatcattctcggcatcgttcaggcgctgaccgagtatctcccggtatcctccagcgcgcatatccgtattttcggcgatttgatgctgggctctgatcccggtgcggcgtttaccgccatcatccaaatcggcaccgaacttgcggtgattctgtatttccgtcacgacatcatcaatatccttactcactggttcagctgcctgttcggcaagaacggcaaggattggaaggcccgcatgggccgcggcgacaattacgccacactcggctggaacattatcgtcggctcgattccgattatcatcctcggcttcactctgcagaacgtcatcgagacctcgttgcgcaacctgtggattacggtaaccgtgctgttggtattcggcattctgctgtggatggtggatgccaaggctcgccagaacaaaaccatgaatgatatgacgtatcgtgatgcgttcctcttcggtttgggccagtccatggcgctgattcctggtgtgtcccgctccggcggcaccatcaccgtcggtcgcgcactgggctacacgcgtgaggccgctgtacgtctgagcttcctgatggccatccccgcggtgttcggctcaggtttgctcgaagccatcaaggccgtgaagaactacaaaaccgatgcgatgttccccggctgggggccgaccctcgtagccatggtcatcagcttcgtactcggctacatcgtgatcatcggattcctgaagttcgtatcgaacttctcctataaggccttcgccatctaccgcatcggtttggctgtggtcgtcgccttgctgctgattgtgggcgtgctgccggccatcgatccctccgtggcggctgcggcataagacgggtcgatagacgactccaatataatggtgctcccgctggcgggagccgtcagcgaagctgactgggggtggtcactggaatatgccagcagaaccaccctcagtctcgctacgcgagccagctcccgacattttgtgcgacgtgcacatggtgcactgctatgaacagcccacagggctgttcatccagcgggagcacaccatatatgggctaattgcccatctggcgcagaaacgcttctgcttctttgactagttgttcggcctggggcgctcccaaggaagcctccgcctcggctttctgctgcaagtcgtagtcgtgctccaaatgctccacgtaatcgtgaagctggtcattacaacgaaccagtatcgaggcttgcgccttccactgttcggctttctgcttcagatctgccgtatcgaaggtgaagccgatatgcttgtccaacgcatccagcaatcgcatagtgccggcagaacattcgtcgctgcccaaatattgggggatggacacccacatcgaggaatgagcaaaaccttgctgcgcggcggccacatccaaaacggtaggaatgcctaccgggccgttatatgaccggtctccttcgcattgacagtctccgtcgctgacggcgatgggcaacggacgggtatgcgggcaatcggagaacatcgaacctaacgtaatgatccgattgacatccagctcatcggcaatggccagactctggctacagtattccttccaccgatagttcggttcgggggcgatctgcgcatagatatgcttgcctgcgtccaacgtgatgtcgtagaacgtggtctgcggccagataagattggtgcgtcccgcaacatggcacagcataggacgggcaacctgatagtcatagaaatcatcacatctaatatgacgaatctcgcgggactcatatcgcttgaccagatggcgcaccgcgttcgtcgccgcctgacaggcatcattccatccctcgaatgcggcgatcaatactgcgccggtgtccttcgctgcttcactcatacctctagagtaactggaattcattgcccgaagcgcacgctttagccataagcgagagtatgcaattacaggcgacacgccgcagctggacgaactacacgcatgtgagtatagtaaacactcgtgcttcggcagggagacctcgccaaggaaacacacgcggacatagcttagttggtaaagcgcaaccttgccaaggttgagaccgcgggttcgagtcccgttgtccgctctaggtccgtgagttgacagaccttacggtgggttagccaagcggttaggcagcggcctgcaaagccgtatagacgagttcgactctcgtacccacctctcagaccagcgaagcaattcaatgggatgaaatatgacccgggcggttggcgcagtggtagcgcacttccctgacacggaaggggtcacaagttcgaatcttgtatcgcccacgaaagtcgaagcaattcgactggatataactgaagaaccgagtattcgggcgattggcgcagcggctagcgcacttcgttcacaccgaaggggtcgtaggttcgattcctacatcgcccactggattccgcttctcacggcggattcctttgcggacatagcttagttggtaaagcgcaaccttgccaaggttgagaccgcgggttcgagtcccgttgtccgctccacaacgaaacctcgcttcggcgaggtttttttcgtattggttcagatgctggtggtatttgtcgcacgcccaacctatcgtgtcctacgttgattaaccagtccaggcctgcacattagtaccgtgggccccgatagcaaaggacaaatcatggcgcaagctaccatctccataaccgtcaacggcgaagcgaaggaggtggaagcaaccaccaccggcgtagaactgttcgcggaagacaagaacatcatcgcggtcaagatcaacggcgagaaccgtgacctgtacacgccgctgaacgatggcgataccgtcgaccccatcgccctcgactccgaagacggcctcgcaatcatgcgtcactcggccacccacgtcatggcccaggccgtgcaggaagtctacccgaacgccaagctcggcgtcggccccgtcatcaaggacggcttctactacgacttccaggtcgaccagcccttcaccccggacgacctcaaggacatcgagaagcgcatgcagcgcatcatcaagtcctcccagtccttccgccgccgttccgtgactgaggaagaggctctgaaggaagaggccgaccagccctttaagatcgaactgatcgaagacaaggaagcacacctcgacccggccgccgccaccgagatctccgaaaaggaactcagcttctacgacaacgtagaccgtgatggcaatgtggtttggaaggacctgtgccgcggtccgcacctgccgaacacccgctacatcaaggccttcaagatcgagcgttccgccgccgcctactggcgtggttccgagaagaacccgaccatgcagcgcatctacggcaccgcgtgggccaccaaggaagacctcaaggcctaccagacccgtctcgaggaggccgccaagcgcgatcaccgcaagctcggcgccgagatggacctgttctccttcccggatgaaattggccccggcctggccgtgttccacccgaagggcgccgccgtgatcaacgcgatggaggactactcccgtgagatgcaccgcaagcaccactacagcttcgtgcagaccccgcacatcaccaagggcggcctgtacgagacctccggccacctgcactggtacaaggacggcatgtacccgcccatgcacctcgacgaggagaaggacgcggacggcaacatcaccaagccgggcgccgactactacctgaagccgatgaactgcccgatgcacaacctgatcttcaagtcccgtcagcgctcctaccgcgagctgccgctgcgcctcttcgagttcggcaccgtgtaccgctacgagaagtccggcgaggtccacggcctgacccgcgtgcgcggcctcacccaggacgactcccacatctactgcacccgcgagcagatgaaagacgagctcaccagcctgctgaccttcgtgctgaacctgctcaaggactttggcctgaccgacttctacctcgagctgtccaccaaggacccgaacaagtacgtcggctccgacgagatctgggaggaggccaccaacacgctcgccgaggtcgccaaggaatccaacctcgagctcgtcgacgatccgtgcggcgccgccttctacggcccgaagatctccgtgcaggcccgcgacgccatcggccgcacctggcaggtctcgaccatccagctcgacttcaacctgcccgagcgtttccagctcgagtacatcgcgcaggacggtacccaccagcgtccggtgatgattcaccgcgccctgttcggctccatcgaacgcttcttcgccgtgctgctcgagcactacgcaggcgccttcccggcgtggctggcccccgtgcaggtgctcggcgtgccggttgccgacgagttcgccccgcatctggccggtttcgtcaagtcccttgaggacgagatggtccgttgcgagatcgactactccgacgatcgcttcggcaagaagattcgcaacgcctccaagtccaaggtgccgttcatcctcatcgtcggtgaggaagacatgaacaacaacgcggtcagcttccgcttccgtgacggcagccagctcaacggcgttccggtggacaaggcccgcgagcagatcctcaccgtcatcaagaagcgcgtccaggtgaactccgccgacgacttcaacgccgctgtggctgagtgatgtgaatggtactggctcccctctctgaggggagctggctccgtaggcgactgaggggagtcctgcatggctcgcactcccctcagtccgtttcacggacagctcccctcagagaggggagccaagaaagggtgcgaaaatgactgacgtgcgtgtcgataatccggcggactttccgcctcaggaggacacggtcgaacgactgtggactccgcagcgcatgacctatgtgctgcgcaacagcgaggatcgcccaaccaagcccaagacgaaggaatgcccgttctgcgccggacccaagaaatccgacgaagacggcctcatcgcctggcgtggcacgcacgtgttcgccatcatgaacctctacccatacaatgtcgggcatctcatgatctgcccgtaccgtcacgtcggattcatcaccgaactcgacgatgccgaactgttcgaattcgagaaggccaccaccctcgccatgaaggtgatggaaaccgtctcccgtccgcacggttacaatatcggcattaatcagggcgaagtagcaggcgcaggagtcgccgctcacctccatcagcatgtagtgcctcgctggaatggtgacgcgaacttcatgcccatcgtcgcccagacacgcaccatgcctattctgctgtccgaccagcgagaagcctatgcccaggcattcgaacagctggctccgcagtatcatctgccgcttgcctaacacaggtgcggcaccccgcgtgaccggtcttatcggtacgcataacaagacaatcatcggaaacatcacgggtatgtctgattaacggcctacaatcgtttcgtttgacatcatccgtttcaataattgctaggagcattatgtcaggtcattccaagtgggcgaccaccaagcacaagaaggccgccatcgacgccaagcgcggcaagctcttcgccaagctcatcaagaacatcgaaatcgccgcccgcctcggcggtggcgacccggacggcaacccgtccctgtacgatgccatctacaaggccaagaaggcctccatgccggccgacaacatcgctcgtgccgtcaagcgtggtgccggtgctgaagacggcgccgccaactacgaagacatcgtctacgagggctacgctcctgccggcgttggcctcatcatcgaatgccttaccgacaaccgcaaccgtgcggccgccgaagtccgttccaccctgaccaagggcaacggctccctggccacctccggctccgtgtccttcaacttcgagcgcaagggccagatcgtggtgccgtccgagggcgtggacttcgacaagctgttcgaaaccgccgccgaagccggtgccgaggacgttaccgatgacggtgaggtgttcaccgttgtgaccggtccgtccgacctgttcaccgtgcgcaaggctctgcaggacgccggcttcgactacgattccgccgaccaggtcatgcagccgaagaacgaggtcgagttgagcctcgacgatgcccgcaaggtgtccaagctcatcgacaacctcgatgatctcgacgatgtgcagaacatctactccaactggaccgcttccgacgaggtgatggcccagctcgacgaggagtaatcctcgtgattatccttggcgtcgaccccgggctcacacgttgcggggtcggcgtgatcgaagccggcgagcaccgccggctttcgtttattcacgtggacgtggtgcggtcctcaccggatatcacccaggatctgcgtctactggccatctacaacggcctgtccgagaaaatggatcgcttcgcacccgatgccgtatccatcgaacgagtgttcgcacaatccaaccgcaacaccgtactcggtaccgcacaggccgccggcctcgccatgctcgccgccgcgcaacgcaatattcccgtggcgttgcatacgcctaccgaagccaagctggctatcaccggtaacgggcaggcgcagaagattcaggtggagcgtatggtgacacgtattttgaacctcaccaaaatgccgactcccgccgatgccgccgatgccttggctttggccatttgccatgcgctgcgcccggcaggcgcattgcagggcggcgaacgcgaacaacatctgaccgccgcgcaacgccagtgggctgaggccgcacagaaatccacgcgccgccgcatcaaccacgaccgaggcatgtagtatactttcgaacagttgttcgagtcttgaatcctggagccctgaaggagtacctgtatgatcggcatgctgaccgggcgggttgaatcggtcgaaaccgataccgcattgattgatgttgggggagtgggctacgaagtgcgcatgtccgccaccgacctgagccgtctgcacgccgggcaagacacccgcgtcttcacctatatgaacctctctcaggatgccattaccctgcatggattcctggatcgggacgccaagaaaacctttctgcaactcatcaaggtctccggcattggacctaaagtggcccaatcgttactctccacactgacgccgagtcagctggcccacgccatcgccgacaacgacgccaccgcgctggccaaggctccggggctgggcaagaagggcgcacagaaaatcatcctcgagcttaagggctctattgatttgagtcagatcgagggtgcttccgctcaggcggcaatatccaagtctccggtggataccggtacggaacaggttgtcgaaggactgatttcacttggctggcgtcagcaggacgcccagcaggccgttgccgaggcttgcgccgaaaacgatattcccacgccgcttgccaccgacgatgtgccgcgtgtgctacgtctggctttggcgctgatggataggggccgctgatgagcgagacaacggattacggtacctcaaacaccggtgccaacgaagagtcgttgcgcatggtctcctcccagccgatcggcaacgagccggtcagcgacgaggagctgcgcccccatgttctcgaaggctttatcggacagccacggctcaaggcccagctgcaactgttcctggacgcggcccgcaaacgcgatgtgccaccggaccatattctgcttgccggccctcctggcttgggcaaaaccacgttggccatgatcgttgccaatgagcttgaagtgccgattcgcgtgacttccggccctgcggttcaacatgccggtgatcttgcttcgattctgagctccctcgacgtcggcgaagtgctgttcatcgacgagatccatcgtctgccgcgcgccgccgaagagctgctgtatatcgcgatggaggacttccgcgtcgatgtgatggtcggcaaaggcccgggcgcaagctccatcccgctgaccctgccgcgattcaccgtcatcggtgccaccacgcgcgaaggtatgctgccaagcccgttgcgcgcacgctttggcttcaccgcacatctcgacttctatccgcatgaggagttggaaaagctcatcgaacgttcggccaacgtactgggcgtaaaccttgatgcgggttccgctcatgagcttgcgttgcgttcgcgcggcacgccgcgtatcgccaaccgattgctacgccgtgtacgcgactgggccatcgtccacgacctgatcgtggtgcggccggacgacgtcaaggaggcgctggccctgtaccagatcgactccgaaggcctcgaccggctggacatcgccgtgctcaatgccatcgtgcgcaacttcaacggtggacccgtgggcctgaacaatctggcggccatggtgggcgaggaatcggaaaccgtggaaaccgtgtgcgagccgtatcttgtgcgcgaaggttttatgattcgcacgcccaaaggccgcgtggctaccgagaaggcatggcagcatttgggaattacgcccaaagatgatgtcagcaagctcttctagactttctcctgtttgcacacttggcggcgtttcgtcaatgtcgctcgtttgaaggagttgtttcgtggaacaacagtacattatgctcatcgtgatcgtcgtcgtgttcggcggcatgatgtggtggcagtccaagaaggccaagcagcaacagcaggagaagcaggacttccgtcgcaacctgcagcccggcaccgaggtcatcaccatcggccaggtgatcggcaaggtcgtcgaagtcgacgagcagtatgaggagatcgtcatcgactccgaaggctccaagctgcgtttcggcttcaacgccatcgcccgtgagtacacccgcccggcctatgtgtccgatgatgaggtcgacgagaacggcaacccgctgcccgacgaagacaccgaggctccggctaacgatgcggctggtcaggttccgatcgaggcgtccgtcgtgtccgaggaagacaccgctgacgagaccggtgacgacaacgaaaccaagacgaagtaagctgttcgattcggtagcaccatccgagtatcgcatcgcaaaggcataaaaggggcgagcactatggcacagtcggacatcaccatcgacgcattgagcaaggtagggcaacaggacgccgaatatctggtgtccttggtgcgttccataccggggtttcccaaggaaggcattatcttccgtgatttcatgccagtgctcgccgaccccaagggcttgaagattctgctcaaggcgcttgaaacggctctgccggtgtccccgagcgaattcgactccattgccggtctcgaatcgcgcgggttcctgttcggcccggccatggccgcccatctgggcaagggtttcatcgccgtgcgcaaggccggtaaattgccgcccgaaaccatcggtgaatcctatgacctcgaatacggcacggccagcgtcgaaatcgaaaccgacgccgtacaggcgggggagcgagtgctcattgtcgatgatctcatcgccacaggcggcaccgccaaagccggcgccgaccttatcgaaaaggcgggcggcactgtggtgggcttcagttttgtgatgcggctcgatggtctcgacggtctggataagctcggcggcaagcccagcagctcgctgatcgcgatgccggcctgagattccgtctcacccaacgtacagttagttttcaaggtccggcatgtactgtgtacagttatatgccggaccaattacatagtcagggaaggatcgatggatctttacgaataccaggcgcgtcagctgctcgaggaacaggacattcccaccccggacgccatctttgcccagaactcccatgaagtcgccgaagcggcggacaaaatcggctatccctgcgtaatcaaggcgcaggtcaagatcggtcatcgtggtcaggccggcggcgtcaagatcgcccataaccgcgacgaggcgattcttgaatccgagtccatcctgccgatgaccatccacgggcacaaggtttccggcgtgcttgtggccgaagccaagaacatcctgcacgaatattacgtgtccatctccgtggaccgcacctcgcgcgacttcgacgtgctggccaccgccaacggcggcaccgaagtcgaggaaatcgccaaggaacatccggaggccgtcaagcgcctgcacatcgatgcgctcggcgacttcgacctggccgctgccaccgaaatggcacagagcatcggcttctaccacgcggacgtcgatcaggccgcacagattctgctcaagatgtggcgctgtttcaaagacaacgatgccacgctcgtggaaatcaatccgctcgccaagatcggcgacccggatgacgaatccaccaagcagctgagcgccttggacgccaagatctccttggatgacaacgcctccttccgccatgatggctgggcgcgtttcgtggatctcatcgttcccgaccccttcgaacagcgcgcccgcgaacacggcctgcactacgtgcacctgcacggcgaggtcggtgtgatcggcaacggcgcaggactcgtcatgagttccctggatgccgtctccggcgctggcgaggaacagggcaccaacatcaagcccgccaacttcctggacatcggcggcggtgcctccgcagccgtcatggccgaaagcctggagatcgtactgtccgaccctcaggtcgaatccgtgttcatcaatgtctatggcggcatcacctcctgcgtggaagtcgccaacggcatcctcgaagcggtcgccaagctcggcggttccaagccgatcgtcgtgcgtttcgatggcaacgccgccgccgagggtctgcatatcctcgcttccgccaacaatccgaatatccatgtgtccgaaaccatggaaggcgcggcagccaaggccgcgcagctcgccggtgaggcgacccagtccaaggaggttcgctgatgctgttcatcgaagacggcgctcccgttatcgtccagggcatgaccggccatcagggcatgacccacacggctcgcatgctcaaggccggcaccaatatcgtcggcggcgtgaacccgcgcaaggccggcacatccgtcaccttccccggtgccaagaacggtgtcgacgtggacatccccgtgttcgccacctgcggcgaagcacgtgaagccaccggcgccaaggccagcgtggtgttcgtgccgccgaagttcgccaagtccgccgtggtcgaagccgtcgaagccggcatcgaactcatcgtggtcatcactgaaggcattccggtggccgattccgcatacttcgtcgaactggcgctcaagaagggcgtgcgcatcatcggaccgaactgccccggtttcatcacgctcggcaaccctggcgtcaacttgggcatcatccccgacggcatcgtcggccgcggcccgctcggactggtctccaaatccggcaccctcacctaccagctcatgggcgaactgtccgatatcggcttcaccgcatgtctcggcgccggcggcgatccgatcgtcggcacgacgctgctggaagccctgcaggcattcgaagccgaccccgacaccaaggctgtcatgatgatcggcgagatcggcggcttcgccgaacaggacgccgccgcatgggccaaggagcacatgaccaagccggttgtcgcctacatcgccggtttcaccgcccccgaaggcaagcagatgggccacgccggcgccatcgtctccggaggcaagggcaccgcccaggacaagaagaacgcgctcgaagcggcgggtatccccgtgggcaagaccccgggccaggccgctgaaatcatgcgcgacatactcgccaaggccaacatcgactgatcggttccaaccaatcgtgatgaaagccgtgattcgccaatgggtgcggggagccatagtcgccctcgcatccatggccatctatgccgttgcattaggttgctatacagcgctgatgttattggttgtctccatggaagagggcggcgacaatctcaccgtcggcacaacctcgctggcacaggccgttgtgcttctgagtgagggatcgggctctagaaccgattcgttcaccctcaccatcacgccattgatgttgaccatactgctgatatggctgatcaatgcactcaccatgcgaatcaaagcatacgggccgcatgcgtatgttgccggattgattgtttggctcgggttgaacgaggcgttccggcaatccgtacacctaggtcttgtcgatgaccagtggctggtgttgctgaaagcagccatcgtattctcgatcggtttcctatgcgcagccgtaccggaatcagccaagatgcgagcattcagggactggattcgcaagcaggtgccggcggacatacgccactgcctgaaaatcggcgtcgtcttggccgtcgcgatactgggcatatacctggcaattggattgattaccgtcatcgtatggtcggtacgcaaccatgccgctgtcgtatcgttgttcgaattgtccgggatggaaaccggttcacgaattctcaccaccgtcgccatgctgatctggctacccaacgtcatgctctgggctgtttcctggctcttcggcggcggattcgccatcggtgatttggccagtttcacgttatggctcggccaatccaaagagcttcctgcaataccggtattcggtattctgcccgaaccggtcagcagcgaactatggcgtaccgttgccttgaacgcgcctctcgccatcgctgcgctcgtgggcctgctggctgtattcctgccgcaaggattcgcctgcagaccgttgaatatacggaatgcgtccacccgcggcccagtattggtttcgctgatctactccgccgggtcattctgcctgagcgcgatgctgatctcactggcatccacattgctgttcgctctgtccaatggatcgcttggcgatcatcgtctcgctcacattggcgtcgacgtcatggcctccaccagagtcgtcggtcattcgaccgcattgggatttaccgcggcatggctgctcgcgctgattggcacagcgctcgttttttcgataggctggttggttgggaggatcaatgattcccgcaccaccgccgcgaccccgaagaccgtcatcgtccgtcaggcgcggtccctggcgtcacaaccacaagaatccaaggaggaacaggatgacaaacacgaaccgaccgatccgtcgggcactggtctcggtctttcataaggaaggcatcgaagtactcgcggaagcgttcgtgaaggccggcaccgaagtcgtttccaccggttcgaccgccaggaagctcgccgagctgggcgtcaaggtaaccgaggtgtccgatgtcaccggattccccgaatgcctcgacggccgcgtcaagacgctgcatccgtacattcacgccggcattctggctgatatgaccaaccccgagcatgccaagcagctcgaggagttcggcatcaagccgttcgacttggtggtcgtcaacctgtacccgttcgccgacaccgtgcgctccggcgccaacgaggccgataccatcgagaagatcgacatcggcggcccctccatggtgcgcggcgcggccaagaaccacgccaccgtggccatcgtcaccgacccggccgattatgcactggtcgcctcccgcgtggccgatggcaccggcttctctctggacgagcgcaagtggcttgcagccaaggccttcgcgcacaccgccgcctatgacgccaccatcaacgagtggaccgccaagcactggcccaagccggcctctctggacgccgtcgaggtggacaaggacgatcagggcactgaagtcgattccgccaagttcccggcccagttcacccgcacctgggatcgtgcgcacaccctgcgctacggtgagaactcccaccagcaggccgccctctacattgacccgctcaaccagaccggtttcgcccacgccgagcagctcggcggcaagccgatgagctacaacaactacgtggacgcggacgccgcctggcgcaccgtatgggatatggctcccgccattgccgtggccgtagtcaagcacaacaatccgtgcggtctggccatcggcgcgaccgcggccgaggcccacaagaaggctcacgcctgcgacccgatgagcgcctacggcggtgtgatcgcctgcaactccaaggtcactcttgagatggccgaaagcgtgcgcccgattttcaccgaagtcatcgtcgcccccgactatgagccggccgcgctcgaactgctgcagaccaagaagaagaacctgcgcatcctcaaggtggccgagccaccgaagggccacgaggccatccgccagatcgatggcggcctgcttgtgcaggacaccgatctgatcaacgccgtcggcgacgatccggacgcctggaagctcgtggccggcgatgccgccgacgccgacacgctgaaggacctcgtgttcgcatggcgtgcaatccgctgcgtgaagtccaacgccatcctgctggcccacgaccaggccacggtcggcatcggcatgggccaagtcaaccgcgtggactcctgccatttggccgtcgagcgcgccaacacgctggccgatggtgccgatcgcgccaccggtgcggtcgcggcatccgatgcgttcttcccgttcgccgatggtgcccaggtgcttatcgacgcgggcgtcaaggccatcgtgcagcccggcggatccatccgcgatgaggaggtcatcgaagcggccaagaaggccggcgtgaccatgtacctcaccggcacccgccacttcttccactgatcgggactctctgaggggagcagctcagccaaaacgcacaaaggtgggattccgcctgacccgtcaacgggtccaagcggaatcccacctttgctattcgcctgctattgtggtcacgtaaccgttcgacagaaggaatcgcaacatgcacaaccatccctatgtatccgaagcgcatgagggcaagccatggtttgaatggtgcgtactcggcgtcgtcgccgtcatcacactgctggttgctttcggatatacgatggccgccacggtcatacttgccgtgacggccatcatcaccgggcttgttcgcctgattcttcaggacaaaagcccatggaaagtgcgctcagtggcgttcgactccttcatcggcatcgccttgggaatcggcctgctgattacctacttcagcttctttggactcttcggcaacatctttttccgctgaatcgccatcagacgaggcggcctgatcgaagaattcgccatcgtcgagcgtgtccgcgttcgcatcggcatccgtctgtggaagatcggcggcagccggcactttgggagtggtcatcatctgcgcgatgatcatgaccaacgccaccacagcggcggccaagaccgggctaatccagaacacccacagctgttgcagcggattttgcgtaagaccctcattcatcgcggccagtgcgataccggtggaacgggcgggattgagaccggcaccggtaaccgggtagctgatggcggcggccagaccataggcaagacccatggcaatgacatgacggtccgaggactcgccgtgatcacccagagaagacatggcggtggcaacgacaatcagagaggcaacgacctcgacgacaatcgccagcgtaatcgagaacgtaatgccatactgggtcagcagcgagtaagacacggagccgttctcgaaaccgttaacggccggagtcagccacactttggcagctacctgctcggatgtgggcagcagcttgaccacggcgaagccggcggcgatggcaccgatgacctgagcgatcacatagaggatgccatccaggattttcgtcttggaaaccagcacggaggctacggtgatggccggattcagctggccaccggacacgcgggagaagatggcggtgactgcggcatatgccaagccggtagccaacgcgaagaacacgatattgatgccatacacggccgaaccccatgtggagaaggcgtaaatggcaaagcacagcaggaagctgccggccaattcggcgcacacgcgcagggccagcggctgttgcttggtttcttccatgattgttcattccttttcatctgttggaagacgggcgaacccgcacaaacggttgccagtctagcagcagtcctacgttgcggtatgatatataggttggaattggctgggattccagtccgccaactctgaagtatgtatacaaatcgacagtctctgcgatgacagagtctgtccggccacgttgggagaacgatgccaaacgcatattcccgcgctgcgaaagcgcaagacgattccaattccattcgactccagaagctgcttgcccaagcgggattcggttcccgccgcaagtgcgaggacatgattaccgaaggccgtgtcgaggtcgacggtgaactggtcaccgagctcggaactcgcgtcgacccccataagcagcaggtgcgcgtagacggttcgcgcgtacgcgtcaatccgaaccacgtcactctggcactgaacaagccccgcaaggtgctctccgccatggacgacccgaagggccgctacacgttgcgcgacatcgtgggcgacaagtacgagcgcatcttccacatgggccgtctcgactacgattccgagggtcttatcctcatgacgaacgacggcgaactctcgcagcacgtcatgcaccccaagtacgaggtcgaaaagacctacgtcgccacactggaaggcaagatctccggcaccgtatgccgtcgactcgtgaccaccggcgtacagctcgacgacggctggatcaagctcgaccactgcgcgatcatcgactcctcacgcgaccacacgatggtcaaggtcgtgctgcactccggcaagaaccgcatcgtgcgccgtatcttcggctcaatcggcttcccggtcaagcgcttggtgcgcacccagatcggcccgatcaaactcggtgatctgaagcccggttcctaccgcgtgctgtcccagacggaagtccgttcgctgtccaaggaggttggcctgtgattcgcgttgccatcgacggccccgccggcgtgggcaagtcgtccacgtccaaggcgctggccaagtatttcggatacgcctaccttgacacgggcgcgatgtatcgtgcctgcgcttggtggtgcctgaagcagggcatcgatctggacgccgaaaccgtggatgagcgtgtcatcaccgaagcggtgggcgagttcttcaccggcgaccatttcgatatctccgtggacccggacaacccctgcgtattcgccgacgacgaggacatctccgaggccattcgttcctccgaagtctccagccatgtctccaaggtgtcgaacgtcatcccggtgcgcaacgtgctcatcgccgcccagcgcgcctacatcgcccgcgaggcgtcggccgactccttctccggggggttgggcatcgtggccgagggccgcgatatcaccaccgtggtgtccccggacgccgaggtgcgcgtgctgctgaccgcccgtgaggaggtccgtcaggcccgtcgcaccggccaggctgtcaagggcgtgggcgctgaggatgtggccgcgcgcgacaaggccgattccaaggtcaccagcttcctgaccgccgccgatggcgttaccaccatcgacaattccgatctggacttcgcccacacgctcgatctgctcatcggtgtggtcgaggacgccatcgagaaccaagaatacgagcagtatgccgccaatctcgaaggctatgagctggacgaaggcgatgaggatctgatttccggccgtggtttcacggaaggcgcgcgcaaggccggtcccaagccggtgggcgtgctggctgttgtaggccgtccgaacgtgggcaaatcatccctggtcaaccgtatcctcggccgccgtgccgccgttgtggaagacacgccgggcgttacacgagaccgtgtgagctatgacgcggaatgggccggcaccgacttcaagctggtggacacaggaggctgggaagccgacgtggaaggcattgaatccgccatcgcctcacaggcacagattgccgtgaccttggccgatgtcgtggtattcgtggtcgatgggcaagtgggcatgaccaccaccgatgagcgcatcgtcaagatgctgcgtgccgccggcaagcctgtcgtgctggccgtcaacaagatcgacgaccaggccagcgaataccttgccgccgaattctggaaactcggcctcggcgaaccatactcgatttccgccatgcacggcaggggagtgggcgacctgctggacgtcgcgctcgacaagctcaagcaggccgagaagacttccggctacctcacgccttccggcctgcgccgcgtggctctggtgggccgcccgaacgtgggcaagtcgtctctgctcaatcagctggcgcgcgaagaacgtgccgtcgtcaacgatttggccggcaccacgcgcgaccccgtcgacgaaatcgtcaacatcgatggcgaggactggctgttcatcgacaccgccggcatcaagcgacgccagcacaagctcacaggcgcggaatattattcctctctgcgcacgcaggccgccatcgagcgctgtgaattggcgctgattctgtttgatgcctcgcagccggtatccgatcaggatttgaaggtcatgtccaccgccgtggatgcgggccgtgcaatcgtgctcgtattcaacaagtgggatgcgatggacgagttcgacaagcagcgtctcgaacgcctgtggaacaccgaattcgaccgtgtgatgtgggccgagcgtgtgaacctgtccgccaagaccggctggcacaccaaccgtctgacgcgagccatggataaggccttggaatcctgggatcagcgtattcctacaggcaaactcaacgccttcctcggcaagatccaggccgcccacccgcacccgttgcgtggtggcaagcagccgcgaatcctcttcgccacgcaggcgtccacgcgcccgccgcgtttcgtgatcttcgccaccggcttcctcgagcacggctaccgccgctacatcgaacgctccctgcgcgaggaattcggcttcgaaggcacgccgattcagatctccgtgaacatccgcgagaagaagaagcggaagtgacacgcgcgtaatttgccagatttcatatatctggtagattatctactcggtgcttttgcaccatcgggccgtagcgcagtttggtagcgcacttgactgggggtcaaggggtcgcgggttcaaatcccgccggcccgaccgattagccccggaattccgccacttctgagtggttgccttccggggcttttccgttttcagacaacatgagacaacatgacgacggacttacctttgtaagccattcgtaatggattaaacacggacttcatcttggcgtgttattggaattatcaccgacaattcaccgcctccgccccccgtcgtatgtgtttgccccaaacaggggctagactggttcctattgatttgatgaaagggacccgaattgaccgaaataaacgataaggcccaactggatatcgccgccgctgacgacaccgacgccgtcacctcggatatccccgaagaaaccgtaaacacccccgaagtggatgagactttcgagctttcggccgccaagatgcgcgagcacggcatgagcgaaaccgccatcaaccagttccgccatttgtatgacgtatggcgccatgaagaagcctccagctggattcgtgaggacgacatcgagccgcttggccacgtgcccagcttccacgacgtctatgagaccatcaaccacgacaaggccgtggacgccttcgccaagaccgcattcctcaagctcaatggcggtctgggcacctccatgggattggacaaggccaagtcgctgttgccggtgcgtaggcacaaggccaagcagatgcgcttcatcgacatcatcatcggtcaggtgcttaccgctcgcacccgcctgaacgtcgaactgccgctgacgttcatgaattctttccgcacttcggcggacacgatgaaggcgctcaagcatcatcgcaagttcagccagcatgacgtgccgatggaaatcatccagcatcaggaacccaaactcgtggccgccaccggcgaaccggtgagctaccccatgaacccggagctggaatggtgcccgcccggccacggcgacctgttctccaccatctgggagtccggcctgcttgacgtattggaggagcgcggcttcaagtacctgttcatctccaattccgacaatctcggtgcacgcccctcgcgtacgttggcccagcacttcgaaaacacaggtgccccgttcatggccgaagtggctatccgcaccaaggccgatcgcaagggaggccatatcgtgcgagacaaggccactggtcgcctgatactgcgtgaaatgagccaggtccatccggatgataaggaagcggcccaagacatcgccaagcatccttacttcaacaccaactcgatctggattcgcatcgacgctttgaaagacaagctcgccgaatgcgatggtgtgttgccgttgccggtgattcgtaacaaaaagaccgtgaatcccacggacccgaactccgaacaggtgattcagctggaaaccgccatgggtgccgcaatcggtctgttcaacggttctatctgcgtccaagtggatcgtatgcgcttccttccggtgaaaaccaccaatgatttgttcattatgcgttccgatcgcttccacctgacggacacgtatgagatggaagacggcaattacatcttcccgaacgtcgaacttgatccgcgatactacaagaacatccgcgatttcgacgaacggttcccctacgccgtgccatctttggccgcagccaactcggtttccattcagggcgactggacattcggacgtgacgtcatgatgttcgccgacgccaaacttgaagataagggtgagccgagctacgtgccgaacggcgaatacgttggcccgcaaggcatcgaaccggacgattgggtgtgatttacaacacggtcgaacgataaaaaagatattatttttgtgaaatggcgctcaactgtggaaaaagcctctaagatagagtgagtgtggggaaactcatacgcacttataacgaaacaataactatacgtgaggactaatggcagagggcacaagcggacgtcggcgtttttccgacaaatggggcaagcacgagctggacgtactggctgtgttgtcatccgcgttcccgcaatggctcacatcccgccaaattgcgcagcgcgtcaaggcttacgccgactcgtatggagagctggcagatcaggccgccaaggccgcgttcgccaagcagttccagcgtgatcgcgccaagctcgctgcgatgggcattgccatcgaatcacggcagcctgagtactcgtccaagtcggaaggccaggacttcgcgtcctatcgtctgcagttgggcgacgaaccgcgcatccgcctgatgttcgagccggaagatatgccggtgcttgccgccgccaactatctggctcgttcgatgtcgatttcttccgagccggatcagtcccagctcacccagcatgtgtcgcgcactacgccgcgtgtgccgcagaccccgattcccgggcttggcttggattcgattgcgcctggcttggggacgcagcccattccggattcactggtcaaggttattgattcgcgtcgtttcgccgccaccgttgacgtggatggtgaacacctgaacgtggcatacaccgattccgacgatttggccatgtttgtgcttgagcatccgggggccacgattgtcagcccgcaagaggctgtggacgcttatcatcgccgtttgcacgccgccagccagttcactctggccgacgaatccgccagtcctgtgagcgcttcggtggtttccccgtcgattagtcgcgatgtgcgagagccgggtgatcccgagtctatcaaggctcagaacaagaagaacggctccgctttccaaacgggcagtgaggttgatcgtcgcctgcgtctgatgctgttcctctccgctcatctgggtgaggaattctcgatgagcgagctgggcgaacgctttatcggcaagccaaagaacgatgatgaactcaagaaattcgtcaacatcatccataaggacatcaacaccctgaccaccgtttccgacgatggtgagatggccggcagccagttcttcgatattgactggccgctgctggatgccgagggtattgtttccgccaccaattcgctgggccttgaacgtcttgccggcatttcgccgcaatacctcagcatgctcaccgcctcggtcagctacctggcgcattcgccgttgctgccggacaagcagcgtgggcaggccgaatccctgtatgagcgtttgcgccgtcatgtcagtcccggtcagaccccgtggctgagcctgaccggctatgagctggagccccgaagcttctccatcgtcaagcgtgcgatcaacaccgattcgctgttggacatggagtacaccgacggtacaggtcgtacccgccgcaagctggtggcccccgccaagatcttcattgacgaaggcgtgtattatgccgccgtctacacggacgttggttccgccgcacccaaggacaaaaaggcctacgtctccaaagacaagaccctcgacaaggccaacggcaaaccgcgcatctggcaggtactgcgattggcccgtatcgaaaaggcggaactggtcaagcccaccaagcagatcaacatcccgaacatgccggtgagcgaactgcgcaagtggagtttcgacaacggtaccgacgcggtgttcatcaccgatcagcgcgatctggcattcatcaagacattgccgggcgctaccgtcgaacaatgcggtgccggtgaaaaggtgcatctgaccgtttcctccgattcctggttcgtggccttctgcatcgcccacgcgcgtcatatcacggcggtcgccccggaaacgttgcgcaccatgattgtggcacgcgccgaacgcgaactgagcatcagcgagaacaagtaaggagcctttcatgccttggtggatatggctgattctggccctgttcatgctggccatgattgttgccggactcatctatgcagcccttcatggactccgtgccttgaaagacatgtccgacatcggcggccaactcggtgaacgcgtggccgcgatgggggagcccggcacctctgccgacaccagcgagccgcctctgttcactcagccgctcagcgtggcacagaatcgttatgccgaggcccatgcgaacgtgattcgcagcaaggccgccaagcgcgaacgccacacccaggcatgggcccgctggaagcgattcaacaactaacggaaagcagcaatggcacgtcaccaacaccataagggcaatgccgattcccagacgctgagcccttcgcagcggtacgcatcattccaaaaggtccaacgccatcgggcgtccgcagcagcgcgattcgccgaatccctgcctttcgaactggacgacttccagaccgaagccaatgacgcgctcgaagccggcagcaacgtactggtcgcggccccaaccggtgccggcaaaaccgtagtggcggattttgccatttacctcgcccaggaacgcaacgtcaaagccttctacaccacaccgatcaaggcgttgagcaatcagaaataccatgatctggtcgacgtgtacggcccggacaaggtaggcctgctcaccggcgacacctcgatcaattccgaggcggacatcgtggtcatgaccaccgaagtgctgcgcaacatgctctacgagcgttccaccacgctgaacgcactgcgctacgtgattctcgacgaagtgcactatctggccgaccgattccgcgggcccgtgtgggaggaagtcatcatccacctgcccaagacggtcaagatcgtcggcctgtccgccaccgtgtccaacgtggaggatttctccaactggattgcctcggtgcgaggcgacacaaaactggtgatcagcgaacaccgccccgtgcctttggaacagcacgtcatcgtgcaggcggacgaacacaccgagcccgaggtgctggacctctatcgccgcgacggcaacggcgagcagaccaccaaactcaacgccgaactcatcaaccggctcgaccagttggaccgcaaggccgcacgccggcgcggcgaggaacgccccgataagcgcaagggcttcggcagaggccgcggcggcaaaggcgccaaagaccgtgccccgaaagcggaacgacacaccccgcgccgctgggccgtggtggacgagcttaacttcctgggaatgttgcccggcatctacttcatcttctcgcgcaacggctgtgaccaggccgtggaacagtgtatcaacgctggactggagctcaccaccgatgaggaagtgaccaggattcgccgcatcgtggatgagatggtggaggggcaactcactcaggaagacctgaaagccctgcagttctccaagttccgctttgcattggaagaaggcttcgcttcgcatcatgccggcatgattgccctgttccgtcagatagtcgaacgattgttcgaagaaggtctggtcaaaatggtgttcgccacggaaacactggcattgggcatcaatatgccggcccgctgcgtggtggtagagaaactcgaaaagttcgacggtaccggtcatgtgggcctgacgcccggcgaattcacgcagctcaccggtcgtgccggtcggcgtggcatcgacaccatcggccacgccatcgtggtcgaccatcacggttttgtgcccgccacggccgcctcgctgtcatccaagcgtgtctacccgctgcactcgagcttccgacccacgttcaacatggccgtgaacctgctcaactccagcgactacgagaccgcgcgcgtcaccctggaccagtcgtttgcccagtgggaggccaacgaatcggcctggcagctggaatcgcagattaacacactgaagaacgcgctggccggatacgaacaggcgttcgcatgcgaacacggcgacttcaaacagttcatgaccctgcgtatggagctgagcgacatcgaaaaggaaggccgccgcaaactgaagcacgaagtgttcctgaccgatcaggagcgttcacgcgctttccagaacctcgaccagcgcattcgcgatttgcgcaaggcggaacacgagcatccatgccgcaactgcccggacctccagcaacacctcaaatggggccaccgctgggcccgcgagactcgagaactgcagcgcgtcaccgatcgctacgactcccgcaccgggtccgtggcacgccagttcgattgcatctgcgatattctcaccgggcttggctacctcgaacgtcatgtcaatgcggccggccacattgacatgacgttgactgaaaaaggtctgctgctgcgccgcatctacagtgaacatgacctggaactgtgcgaggcgctgctcgccggcacgttcgacaagctcgacgccaacggactggccgctgtgctctcttcactggtatacgaggccagacgcgggggagacggcgaaccgaggcactacccgggcggcatctccgggcccatcgccatcgcttcgtccaagctcaagggcatttgtgaagacatcgatatcctgtgcgaggatcacggtctggacgagatgcagcggccggatttcggcattctcgacatcatgtatgaatgggcggatggcggttcgctgggatcgtgcctgtacggcaccgacatgaccggcggcgacttcgtgcgcactgccaaacgactggctgacgtgctgcagcagattgctgtcgcccaaccgctgccgttcgacgggggagagcggctggcaggcctcgcccacgaagcggccgaccgggtcaatcgtggcgtggtggcctactccggcgtggactgacggggctgtttgacgggagtttgtcagccgacgtcggaagcttggaatagcggccaagtccgaactgttgcgtaaattagtagggttaaagatctttcaaggaggatgccgatatggcagaacgtagcctcaggggcatgagcatcggagcgaaatcgctggagtccgacgacaacgtcgatttcgccgcgcgaaacgatgtggcgtatgtatgcccgaagggccaccgcaccatcctgccgtttgccgagggtgccgaaatcccggacgagtgggagtgccgttgtggttccgtggcccaccgtgagggcgacgccgaccgtgagggcgacgaaatcagcaaacccacccgcacccactgggacatgctgctggaacgccgtagcgaagaggaactggccaccctgctcgaaaagcgcctgcaaatgcaccgtgacggttggattcccgactacgagtgatctcctactgaacaacacgtgaacttgatgcccagtcatcccgactgggcataatcattgttggaacaagtcgcattgtttgacgaccattcaaagcagtcgacatgaacaagggggagtggaatctcaatggcacagcatccgatgaaagtggtcctgttggatctcgacggcacgcttaccaagtccgacggcggcattatcggctccgtcatcaagaccttcgaagagatcggtcgaccggttccggacgccgccgaactgcgacgcttcatcggaccggcgattattgaatctctgcgtcgcaatcatgtgcctgcggaagatctggatcgggccgtggacatctaccgcagctactacggagaccgtgccgtgttcgacgatccgaacgagcccggcaacaaggtgcccggacgactggtgaacgtcttattcccaggcatccgtgaacagctgctcaaactgcatgccgacggttactacctggcactggccagctgcaagcccgaataccagtgcatgcctatctgcgaccatttccacctgaccgaactgttggacggcatctatggtgcttccaaagacaattcccgtctggacaaagatcaggtgattcggtactgcttcgacaaaatcggttttgatgctgcagcgggggacagggccgtgatgatcggcgaccgctacaccgacattgacggcgcccacgcctgcaatttggacgccatcggctgccgctggggctacgctccggccggtgagatggaggaacacggtgcctacgaaattattgagcaacctgagcagctcgaagacgccgtaaaccgttatttccaaacgcactgaaacacaacggcgaggacttcttcatgatgggatgcgatggagcctgcgccgcgggcttcgacctggttttcatcggtttgccattgctgtcgctgtatgagattcccatgctgatatggttcatttggcgagcattccactggaaacgagatgacaaggattggctgaaaggcacggcgattcttgcaattgcggtggtcgctccggtgctcctttggctgtcggccttttggctgtcggcctggtatgcgtggactagttgatacaggcgactgaatcctcgtcaaggataactaatctgacataacgtacattatcggctaactattcgggaatcttagaaacggcttaatttcaacggtcttcatttcgcacaggtaactgtggatgcctctgggtggcccgttgtggctacgcatttggctacgcatttcac

SEQ ID NO: 19 - DNA, 6417 bp, Unknown
  R30_18m  MAG No. k141_5429
gatgctattgggggctctatgagagtggatgctgccagttgttttgtagcgatttatacggttgcccgactgaaggaggtaggaacatgatgaagcgtctggctgtggggtatgaattcatttgccggattatcatgatggtagctgtagtgaatgtcgccttcgtgctgcatacattgtttggcctgattgtggttggattgttcccctccgtggccgcgtcatattcggtgttccgccagtggctgctcgacatcgaagatcgctcctggaccatcaaacgtacatggacgacgttccatcaggcatggctggaggagatcggcgcggcgaatcagctgggatggccgcaaacaatcatctggctgctgctcgtttgggaatactggttcgtgcagaacaacgacctgggctatgtgggaaccgccatatccggcgtgctattggtactcaacgtgctgtacggcctgttcgtgttcctcagctggtccgtgcatgtcaatttcagcgaaagcctactgtggacggtgcgcacatcatttgcaatgataattgcccgtccattgtgtagtttcgttgtgttggctcttttcctcgtcacggtgtggtcctactacacgtggcccggcctgatgatggcgttcgggccggcggtgccgattttcttcaccatagtggccgtgtattcatggggaagaatgccaggcatggacgtgcgggtgatcgaaccgttggaaaagaaacgctgaggtaaggacgatggattcggtgtcgtcaggttcattccctgttgtctttcagcatgaacaaacttaactttgcttgacggtacctgatgacgaccgttgtggagaacaaaggtaggaaaaggtgtgacggtggctgcggctgtgttgacgcgaccgttgagggtcatcttgaggggaggggcgttgcggccaaggatatcgcctcgctgttctacatggctggtgattcctcctccgctgcggtttggtcgttggccatcgacggtcagcgcttgctgaactgtgtcgggttggcgttgttggccgcgcatgacgtggcgcggccggatgaggtcggcgttgatgcggcgaagttggccgatgaactggaatgctggaccgaacggtattcgaggatatggtatgaggtcagccggcaatcggaactgggccgcatccaacacgtggtatagcgcgcgacggacgtgctgcgttccatctagaccgttgcattggcgggagctgcggtatgcgccgtagccttgctggggtcgctgtctgtgtgtgggggcagcaagaagtcgactacgactgctgatggcaagccgattgtgacggttctggtcaagaagaacgccaatcaggaaaagatggccaacatgcagtgggctaaggacttggaagccgactgcgattgcaagatcgagtggcaggaagtgactcgagaagcttgggcccagcagaagaacgccaccttggcctctggggatatcgcggatgtgaacctgaatgggtacggtgctgttgaggcttaccagtatcccgatatgttcgaggatttgagcaaggatcttgacaagctgccgaacgtcaaggccttctttaagcaaaagccggatgccaagaagatgtccactgactccaaagggcggatttatgcgatagccgatggtcgaggcaaggcctattatcgccatcccggtgccgtccgccccgggcgcctccccggaccagactgtgtgggacggctcctccagtgagttgtcccttgcgggactgtcgatttccgcccacgccgcgaacaaggacgccgcgctgaagctggccaacctgctctactccgagaagtactccgtgcagcagttccttggctcgttcggcaaggcaataaccaagaccggtgagcatgagtacaccgtggataacgacaaactgagccagttgaccggtgataaccagtatcctggcctatcggaattgttggtgggctggattcctgatgaagctactatcaagggtgatacccacgccgatgaattgattgaagtgaacaaggtgtacgaggagcagcgcagtcacttcgatcccgtcaaggactatattcccgactacgtcaatatggataatatggacccttccgatacgacgaagctgaacactaataatgccgagattttcaataccactatgcagaagactgctacttggatgtccaagggtggcattgacggggaatgggatgcctactgcaagcagctcgacagccttggcctgcaggagaacgtcaagatctggcagaagtggtacgacacctacacgaagtgacggtgtcgtgagcgcaagcctgttgcaaggcagtgcttgcgactccgaggtgtgagccgcacccgaattgttgaactggaggaattcggatcaacgattgggtgcggctcgctcatgcggagcgaatgcggtgttgtctcacgtgccagacaaacacaaatacaacaaggagattcacagtatgaaccagtttcgtggggtcattcccccggtcgtcactccgttgaccgcggatcatcgtctcgatgtggaaagctacaggcgctcgattgagcgcatgatcggggccggggtcaatggacttttcgttctcggatcctcaagcgaagtcgtgttctccacggatgagcgacgtcgtgagatactggccgcggccatcgagattgccggcggccgagtgccggtgctggcggggtgcatcgacacggagaccaatcgcgtgatcgagcacgctcgtgcggcccgcgagatgggggccgccgccatcgtggccacagcgccgttctacgcattgggaggcgtagcggagatcgagaggcatttccgcctgattcacgccgcggtgcctgatgtgccgttgttcgcatacgacatccccgtatgcgtgcataccaagctgcccaatgatctgctgatccgcttggggcgtgatggcgtgctggccggggtgaaggactcgtcgaacgatgatgtggcgttccgttttctggttggggacaacgaggagaacggtcatccgctgacgttgctgaccggtcaggaagtcgtcgtcgatggcgcgtacatggccggtgcggacggtagcgtgcccggcctggccaatgtggatccatatggctatgttgcgatgtggaacgcctaccagaacggtgattgggattcggtgcgcaaggaacagaacaagctcgcctcgttgatgcggatcgtcctggcgccgtccggcgtccagggattcggttccggcgtgggcgcgttcaagaccgcgatggcgttgttgggcgtgttcggcaccaaccagatgcccgaaccggtgttggcactgcgtggcgacaatgtggaagccattgcgaacgtgttgcgtgcatgcggtttcgagcttgcgcgcacggtggaacaggtcgatgcgtccgtcgagcggcatcaaggcgatgaacaggagtgactgaatatgacggagaacgggatggcgaatacgaacaatactgtgtgcggcgcgaaccatgacggagcgatgagtctggcggctccaggcgattatggtgtggcctgctaccggattccggcccttgccgaggcacctaacggctgggtcctcgcggcattcgacgcgcggcctcataactgccaggatgccccgcaggccaattcgattgtgcagcgtatttccaaggacggcgggcggtcgttcgagccgcagcatattgtggccgccgggcatgatggcgtcgacaagtacgggtattccgatccgtcctatgtggtggaccggcagacgggggaggtgttcctgttcttcgtcaaatcctatgacgccggtttcggcacctcccaggcgggcgtggacccctctgcgcgtgcggtgctgcaggccgccgtcaccagttccgtcgacaatggcgtgacgtggagagagccgcgcattatcaccgccgatatcacgaacagcaaatcatggatttcgaggttcgcttcctccggtgctggcatccagctcaagtatggcgatcatgcggggcgtctgatccagcagtacaccatcaaggagtttgacggccgttaccgtgcggtatcggtcttttccgacgatcacggtgccacttggcatgcgggcactcccgtcggcgatcacatggacgagaacaaagtcgtggagctttccgatggtcgtgtgatgctgaattcgcgttcctccgatggaaacggttgccgctatgtcgccatctcccgggacggtggcgccacgtatggtccggtgactcgtgaaacgcagttgcccgatcccgagaacaacgcgcagattgcccgcgcgttccccgatgcccccgaagggtcggcgcaggccaaggtcttgctgtattcctcctcgtcgccctcggacaggatcgatggcctggtgcgcgtttcgattgatgacggcaagacttggagcgctggccgacggttcacgacggggtcgatgtcttattcggtgatcgccgcattgagccacaaggccggcggtggttatggcctgctgtatgaaggcgataataatcgcattctgtacactcgtgtttcactcgactggctcagcgaccagctgaacgtcaacggaatcggcgattttccgccgtctggtgagggggagtgctgagacatatcggaacggtgtcgatgtttcatatatgttagggatgttgacaaaatatctcccgagacttatactgggtgcgtccgcctcacagctgtggcgggcgcactcaaacatcatcatgtcaaaggagagacaatgagaagaagaaccgcattgaaggcgggcgccatcacgtgcgccgtggccttgctgggttcgctggctgcatgcggcggcgacaagaagccgaccacgaccgccgacggcaagccgatcgtgagcgttctggttgcgaaggaacccaatcaggacaagatcgccaacatgcagtgggccaaggacctcgaggccgactgcgactgcaagatcgaatggcaggaagtcgataacggagatttcgcgaatcagcgcaatactacgctgagcgccggcgacattccggacatcagcctccatgccttcagcttcgtgtacgcggaacagttctccaacctgttcgaggatctgaaccaggatctcgacaagctgccgaacgtcaaggcgttctttaagcagaagccggacgcgcagaagctcaataccgattccaagggccacctgtacacgctccccaatgcccatggcaagaacaatgccggcacgggccagctcatgatgatcaacaaggcctggcttgacaagctgggtctgcaggtgccgaccacgtgggacgagctggagaacgtgctcaaggcgttcaagacccaggatccgaacggcaacggccaggccgatgagatcccgatgaacatcaagaagctcgacccgttgtactacacctggcacagccccatgctgctgctcaactccaccggcatcccgaccggcttcaacaagggcgtgtccacatacggcttctacgccaagaacggcgtggtcaagagcttcatgacctccgacgaatacaaggaagtcatcaagtactaccacaagctcatctccgagggcctgatcccagccgactgggccaccaaggacgatgacgcctacaacgcggaccagaccagcgacggcaagaccgcgaagaccggtgtggtgttcagcagctccatttccgatactttcggcgatctgaaggaccagtacatcaccatcccggtgccgtccgccccgggcgtctccccggacaagaccgtgtgggacggctcgtccagcgaattcgacgccgccggccccgccgtctccgcgcatgccgcgaacaaggacgccacgctgaagctgctcaacctgatgtactccgagaagtactccgtgcagcagttctacggctccttcggcaagaccgtgaccaagaccggtgagcatgagtacaccgtggacaacgacaagctgatcgagatgcgcaagaagaacacctccccgagcctgtcctaccccgccggctggattcccgacgaggtcaccatcaagggtgatgccggtagcgacgccctgtatcaggcgagcaaggtttatgagaagcagcgcagcaacttcgaccccgtcaaggactacattccggactacgtgaacccggacgcggacgacaacaccacgttggctagcaactacaaccagatttccaacgtcgccatgcagaagactgctacttggatgtccaagggtggcattgacgaggagtgggacgcctactgcaagcagctcgacagccttggcctgcaggagaacgtcaagatctggcagaagtggtacgacacctacacgaagaagtga

SEQ ID NO: 20 - DNA, 10458 bp, Unknown
  R30_18m  MAG No. k141_5787
gtgtgaaggagggtgagtggggatgtccattcggttggatgagcgacggtatgtcgaggagttgaagcggctggttgcggatttccggatgtggaagaatccgctggttccgttgccggatggcttcgaggacgatctggctggccatgcgcatgatttcgtacttgatcaggtcaagtacgggcggcagacatcgggtccatgggatgtggcgaaaatgttcattccggggcttgcccagttgaatgatgcggcggatgcggtgaacaatgccggtgaaggatttgtttatgcgggttccgcgattcgttcctttatggtggagaggtgattgatatggtgagaagtggtggtcggccaccgtgggagcgtggagccgctggtgtgggcggtgatgccgaggctggcggttctgatgtcagcggtgagaatcgtgttctggcgaatggcgtgcgcgccgtgaaaccgccatgtttctgatcgaccctgcggactatgtgcaggccgaacgggaatatgatggcgagatctatcagatgtcctgtgagatggatgtcacggtattccttttggaggactaccgtcggattttggaataccgccaaccgatacacgactgaggagaggagacataaaccatggggcatcttgacccgtttttccaggagctgaacggcataggaatactggcgctgatcgtcaccatcatcgctgtcatagtccgcgtggttttctgcaagaccatgcgggccagaatctatacgggcgtgttgggattaatatccgcgatcgtcatgtcgctgggtattgattatgcgatacggccattcgccggtactggtgaatcgactgcgacgaatggactggggttcgtccagctcatgataggtgtggttatcgcacttatcggaggtgccgttttgcgcggcatcctgagtcatgacgatggcgaaccacagccgacaagcaattccctcattatggacacgcagacggagctgaaccgtcttgcaccccgatacggactggtggccgccatgagcaacgaggactcctattatggctggttcatgatagaccacgacaacggcggctcccccgacccgttgtatgaagccagcctcaacgcgaacctgcaacaggaacgccagctcgggaaactgtacggcgatccgggttccggcttggactattccgctttcggaaacacggccgtacaggccggccagcagggcgaatccgcattggccagaatcatcgcctacatgcagctcaacgtcatctccttctggtccttgtacgggctcaacgagaaccgccagcccatcaacgcggacatcgactgcgtgctggtcggcatagacccgcaacagcaggtgcatgcctggttcgtggacgcgaagaactacaagggcggcagcgacaccaaatacgtgaatctggatccacgaaacctggtgcgcatgagcatcagccgtcgagccctcatcaaaggctcggacggaacacccgtggtcaagatgagcgagaacatggcaacccaacgcgataattgggcgtccacgctcgaaacctatcacgtggcggcccaatggatggtctgcatggtaccgggcggacataacggcaacccggatgtcagcgaagccgtctggccgggcaatgttcgtgtcgtgacgcctggacagttggttgcggaaatccaatccctgagcctgctgccggtggacaatattccgccacgtgtcgtcagactgttcacttctgcagtcaaacaacaggctcctgcgtcagcagcgccggtgacgagcactgtgccgatgcctgtgacatcacccgttccagcccctattccccagccggcaataacgaacaactgccccaaatgcggtcagccattggacggacaaaccaacttctgcccgaactgcggcacaccgctcaacgcctaatcaggcggtcaggctcagtgtcgcgggcacccatgtccacatgctttgcggcctaccccgagtccggcaagattaccccttcgcgtattccatcggggaaaaacgcgaaggggtttttctttgtttgcagtcagattaaggcgaggatttgacttctccccacggctaaagccgggggattctaagctttgatgggacgtgcgtctccggggtagcacccggatggcgtcttacggtccccgtgggcttcagggacaagtcctgccctgatgagcatgttcaacgccgcgttcttatcacggtccttcaccattccgcaatgctgacagcggtatgtacgcactttcagtccgattggaggattggctatctccccgcattcggagcaggtctgcgtggtgtatgccgggttgaccggaatgagtttgcgaccgttcttgacggcttgccattgcagtatctggatgttcgtggcgatagcggcgtcttgggcgttgcgagccatgttggttttcgataggaacttcggcttgaagttctcgctggcgatgatgtcgttgcgttcgcacacatgtttggcccacgtgtgggcaacggtgagacgttgccctgctatgcgctggcagagttcacggtattgtttccttgctttcttgtagcctttcgactggttcggatatttgacgcccttcttatgcctgcgcgccatgcgtcgttgcagtttcaccacttggcggtggcgcgccctttcgaatcccatgtgggggaaatcgtctggggagtcttcggaaacctcgcccgtcgaaagattcaatccgaccgtggaggcggtggttttgacaccccagtccataccgaccgcgtgcctcgtttccgggaggggcttcgattccacctctaccacgaacgaggcgtaccagtgtccgtcgggcgacctgtacactcggacgctcttgggctgtgagggcagttcgcgggaccatacgacggggatgagcacgcctttcggcagtttaagccgggtcttcccgtcctgttccacgagggtgaatccgccgatgcggtagttgagtgatggcagtgtggtcttgcggctcttatgccgtggcattcccgccttgcgtttccttgaggatgtcttgcggtcggagacggctttccctctggattggctgtagtccctgactatctgctgttggggtacgcaggagtgtgcggcgagccatttgccgccgtccttgtccgtcttgcttgcccctagaaaggtgaggtatttctgcgcctgcgcggctccgaacgtctcgccgcgttcgtatcgcgcttgggattcgtccaccatgcggttccatacgtatcggcaggcgtcccattcggcaagcagataacgttcggcctgcttgccggggcgtagcctgtatttgtatcgaaccttcatggaaaacattatatcacaccacatttatctacttatatgacgcgactgccatataatggaagacatgggaaagacggacaaggttaaacacaacaacaacgtgacctacagatgccactaccacgtcgtgtggtgtccgaaataccggcgaaaggtgataaccagcctcgacccgaaactcgacaatccgccaatcgacggagaccccggacccgtggacgaacggctcaaacagataatacgagaagtctgcaaggaaaccggaaacgacatactcgaactggagaccatgcccgaccacgtgcatctactcgtggactgcgacccccagtacggcatcaacaaactcgtccgactcatcaagggacggacgagcagatacctccgctcggaattcccctcactcaaacgccgcctgccgacgctatggacgaacagctacttcgtcgcaaccgtggggggagcgccactctccatagtgaaacaatacgtacagaaccaacgcaacgtataagaaaaaggcggctcaccccagtcttaaaagacggggcttgcgccgccaatttcggtcactgtccggacgggcgagtccgtgcgcgtggctgccgcccacccatgcggcgagcacgcgacggtccatgtagggtgtgagcgcctgctcgaaacggttcaacgttcgattcccaacgattcgaggtagtcgtcgccgagccgggcggcctgccggccttcgcggctgtggttgatgcggtcggccacgtcgcacgcctcgcggacgaggccggcgaacaggcgggcgtcgccggtgtccttggcgccgatgccggtccatgtgatgcgggccttgccgtagtccatgcggatggtcacgcaggccggttcgccgaggcgcgtggagcccgccccgttgtcgatccggtaggggcgttccgggtcgtcgagacggtggacggtgaagtgttcggtggagaatgcgatgcgatcgttcatgcaggacggcatgcgtccccgcggacgggttccatcaggctttacaatattgtgaagttcttccggccgtcttgtatgcgtgtatgcatttgtatgcatccggggatgcatacagaaaaggcttggaaaaagcccgaaaacccttatatataaaggaaaaaataaaattcctttctcttgtatgcattgtatgcatcaatataaggggtttccttcctttttctcgaatcctctataagggaatgatgcatacaatgcatacacgtgcggaggccgcccccggaacgttggaaccaagccgaaacggaaggaaaagacgtatgcatccccggatgcatacggatgcatacaggccagccggaatgcatacacggcccggggccggcatagccgcgccgcatgaacggtttgagaccatacacggtccggttcacggtgtccgcctccctgtggatgacgaccaccggcgacgaggacatgaccgaacggaaacggcggcggggacgcctgcgcgcctacggacggcaggtgtggcgggagacgaaggccgtgggcgcgccccgggtcaaccggtacatgatgctcgtcaccgtgggcgggcgacgcgaaagccccgtactcgcggccgagaccatgaagcccctgatcgacgctggcaccgatgagggcctgtggccggacgacggacccgtaccatcgcgtgatgacctgctatctcagggaccccgccccctgccgggcggacgcgcggaactgttcatctgggtgatcccattggggccggacacggacccgttgacccggctgctcgcccgcatgcccggttcgaaagcgcccctggcccatgccacgttcggcgaggactcatggctgaccagcaacatgcgcctgacggcccgggagcgcaagaccatgcagacgcgcgccatgcgcgcatgcaggaacgtgtggaaggcatcgccgggcgcggactgcggggtcgtctgccaggtccgctacccggactcccggccccggtacaagggcgatccggacaacacggcggagacggcgaccgccatgtggggcgtcggcgtgctcgccgggctcctgcccgccagtcccagcatcttctgcttcatgctcgccgacggggaaagcgagccgaaacaccatgatctcgatatgctcgcgttcaccacgccgccggacgtggactggccgggcctgctggtcgcctgatgtccggcgaacggtccacgaaccggacgctcgccgacgacttgacactcccgtggttggaaccacgggattcctgcgaactgggcttgcttgcactcggacgttaggtcagagtacagaggcttcccatttttagcgggctatccccgattgtcggccggttcttttcccgttattggtttaccgtgcatgccggccctggccgggcttattccgaccatcggattgtggcggatactgttgtggggaataaccctgttcctgaccatagccgcctgcgacattgggaacctgactggcgggaggctgaggatagggttgggccggctgaaccggattctgcggaaccggattcgcctgctgctgaggctgagcataccgaggagataccggaccgacattccgtcggtactgcgatggcacctgagccgggcccggagcctggtactgcggcacaggccgggacccgggaccgccatactgcggcgaatacggtcggttcggatacgccatacccggcacaggctgacgcggacccgcatacggcaacgggccagcggcagcggcatccggcaacggacgacgaccctgctttccgcgcttcgacaacaccacggcaagcacgatgccaccagccacaacgaagacgcccacaccgccaacggccagccacacccacaccggcacaccggacgacttcacgccgtccctgccgtcaccggtatccggcagcacggtcctgccgtcagacttgccttcagtctcgtccgcggtcgcggtggcggaatacttcatgcaatccgaaccgccatcagacctgcactgctccaccttcttccacgcggttttctgacgctcatactccctgccgatctcaccggcctggcaaggaacgggatacgagtcggcgtcgagcaggtcgccgacgccgtcggggttcttagagcaatcctgcgcataccacttcgcacgatcatccgacagcttcgacgccgcggtcacctgcgcctccaaaatcggattcacatccggatactgcgtcggatccaccgtcaggagcctggcaacatccacctggccataacccctcttatgccccggatccagcttcgcctcacccgacccattgcccttcgtgttacgcaccaaagactgcagaatctgattacccgtcgcatcaggccacttctgcacagccaacgccaaatacccagacaacacagccgaaccagtcgacgtaccacccgtatccaccgaaatgtgtgtcgaattatcggacggacgaagcacctgatcacccggggaaagaatgttcacgttcgcatcagcaacatccgaaatgccggcgatctgcccatcaggaccgacctcgttgttacggatcacaccgggaaacgaattccagaaccgagggtcgccggtcatcacatccgtgctactgccattgacaagggcatccgtctccttgtcgttcgaacggcccgacacgataatcacgccatgacgcaacgcatcaagcatcccatcataaccataatcgcccacagcaccgatgttcgacatgttgatgacacgcgcgccccaatcgaccatggcatcgatatccttatcggcattctgcccgaccatcccctggcatgggtcattcgattcaagcacgttgccacgcccaccagtgatgaacagaacatcagccttcggcaccagacccgttatcccctggctcccatcccaactcttgccattgcccaccagccacgtgagcatggccgtgccgtgcgacgaataaccaccactctccttggacgtgacggccgcctgcaaatcaccatcatccaacacacacttggccggtccatcattctctacatcgacgaacgaaccgacctgatacttcaccttcgcgtccgacaaccccggataatccgaaacaacctggaagtcatacatgccgaccttcacacccgaaccatccagaccagcctcatgcgccgagacaaccgcactgtccttcaccggccacaagccacccatatcatccgcatacgcggacggcgacaacaccaacaacaaagaagccgccaacacccccgaacacacggagaagacaggtctatctgtggtcattactcctcttttcgcagcgctgcacaacgtcaagataacagcaactatttaaatctcatgtacttcaaatgactcaatctcattttgcttgttttgcaattgagtctgaatgctttcttcgaatctcgaggtatgggcagtagcatccgccaaacgcttaccatagtcagccatattctgcgaatagcgcgtccggtcttcacgaattactgcgacgctgcgggccaatgcctcattgattcgcttggtgtgtggatctttccatcctccagtcaccttcacgccataagtctcactcgcggaatcgttgactgactccgatgctgtttccaagcgtgccgccagtcgattggcctcatcggcatcgtaacgaatctcttccgccatggttctcccccgtccactcacatcaacgcatccaccgcatatacacgcgtttgccgtcccacaccaacaccgcaatggaacggcaaacacagcacatcaaagaatcggctcaatcagccgaagaaaccggcggccttgcggtcgctggcggtgtagccactcgaaatctcagcagtggccgaagcgatctgcgcaagaatgttgcgcacatcgttcaaatcggcgttccacttgctctgcgcctgagcatacgcctgctgcgcggaaccatcccagttctgcttcagctggctgaccttggcgtccagatcatccagcttctgctgaatgccgttagcaccattacgaatgctctcggacagggcctgcacctgagccggattcacggcaaaagaaccaatagccataatatttccttgctttccttatctgcctgatacttgtttccccgaaccaatcagctcagcatgctggcgatcttcgaggtggactgctgggtctcctgctcgtaacgctcctgctcctgctccgtggaccgcagggactgctccagctggttcagctggttgttgatgctggaagtcttctcatcccaagcattcaccatgcgggtgaaagcggtcgccgcgtcaccggaccagtacgatcccatctgctcgatctcgccacgaaccctggtgatctcctgctggatgccctgcctcgcctccgcaacggcctgttggcccttcgcaagcgcgccggcttcagcggaaatatgttctgccatggcccatctccttaactcttcccggctcacgccgtcattggtcaattacgccgaggagcttcaataaaaagaaccccctacaagaaactaagcatactcccacattctgttcagccaaagcccctgtcattgtcaagaaagggaacaaggacgagcagcagatgcccaggcccggcaaaccagataccggaccggacatgacgaggcccccaacgatgccgtacagactgtacagatggcgtgcggcatactaaaccggcggcgtccagcccagctgctcgcgccagccatcaggcgggaacgggtccgtgttccacgcgccagtgcccggaacatcattgagcagtatcccccgatccgggccgaacagccaatccgcaagccccgcacggcaacgggccgcgcgaaacccgacataatccatcgcagacggatccaaccccgccacaccaccgcgcacccggtcgaacagcatatcgcgatgttcctgcaataacggcacatacttggggttcgcggcatcggacgcacggaacacggactggcagaacgtacgattgcgatccgatatgctggagctgatcatcgattcggcccacccatgcagaccgaccgtgaaccactggtccaacagccagaaagcacccagatcacgcgcgatcccatccaacggcgtggcacagggcaacttccgctcccacttcagcaatgacctgtacgtgcgccgggcacccaccggcatcaacagcgaatccggccgatcgtaacaataaatacgagacggaccatacttgaaaatatgacgcgtgggccctgacgacctctcaaagaacggcatgacaccaccatacgaccagcatcgccgcgtacacaatacacatcacacgcggccggcaagaaaaccgcacaactcctgcgccaccggcagcatctgcgactccagttccggggtcatatattgccattccaaaagacgatgaacgctaatcggcgtccacaaatacgccagcccatccgccaccaacaaattgagacgggcaggagacgacgacaggatacggaacacctcaggagacaagccacccaccgtctgaggcctcggcttgcccttcaaatccgtagtggtgcaccacgcataccccgacatccgagaacgcaccggcaacaccactgtctgcaacgaccaagcggagtacatcgtccaccaactgagattgtccatcacattcaactggaacgtgacccaaggccccttggcgtaaaaccactgcgtattcgcagtacgcggcatcttcggcgcacgcatgccgatggcatcatgcaacaggaccttatcgaacgtccacggccaagacggaatcggcacccacccacaagcccgcatggaccgatcccaaacctcaacaacatccataccatcacctttatcgacgacagcggaatcgttgactgactccgatgctgtttccaagcgtgccggcttcagcggaaatatgttctgccatggcccatctccttaactcttcccggctcacgccgtcattggtcaattacgccgaggagcttcaataaaagaa

SEQ ID NO: 21 - DNA, 64149 bp, Unknown
  R30_18m  MAG No. k141_6179
aagccgaccacgaaacaggacgcccagccctctacgacaacgctatcgacaccgactacacccactcaatcggcattcaaaaaggccaaatctaacccccgcgacacgccgagccagacacacattttgacccttaacccgccgaacatgatggagaagatcggcagatcacggccgcgcgacttataggcgctttcgaattcgtcctgatgatcggagttggagcggccgtcggtcatgagcacgatggcggtggtgtattgcgaggcttccgactcgctgggcagctcgtcgagcgcgctcagcaggccttcatagatatcggtgccgccgctggcatcggtggcatcggcctcatgcagcaggtcgctggtgcttgtgccagtggccttgaccgggcggtgggcctcggtttcaaacgggatgagaatgttcacgtcgccgctggcgggctcgatgtacgacttcttggcctggtccgggtcgagcgccgcgttcaggcctttgaccacgccgttcttgccctctccagacatcgaaccggagtaatcgaccacccaaatggtccagctgggcttcctgagcgcggtctggtagacgttgagcgcgctgtcgatcaccgtggcggaggtcatggagaacgtgagtttgccgtcgctgaccgcggcgaggatgtccgcggtggagacgggcttggtggcgccggagtcgtcagcccagccgagtttgacggccttggatttggcgatgccgaacacgatcggcgtggtggaggtgctggccgcgtctttgacgatgtgcttggtgtctcccatcgaaatccacatcgaggaggcaggccagacggcgtcgtgatcctggccgccggccttgagcgcgttcataatctccagcgaacccatgtagtgcatcgtcacggctacgttggattggtcggccgctttctggatggcagtggcgacttccttgttctcggagccggaggcaatgctcagggtggcggtcggtttgccgccggacggctggaaggtctgcgtggtggcggacgtgccgttgccgtccgctgtgccgtcatcggaattattgaacgccgtgcaaccggtcaacgcgagcacgccggcacatgccgcggccgcaaccgcggcggcgcggcggcggagagaagacattatgcccataattccatggctctcccgccatctaaagcgggccgggccacaaggtgaccgcacggtgaacaatgggtgaagagctacatcagtacgcggcgcaggcaatcatggggtcgtcgtagaagccgaggatcttttcgaggtagggcttgtaagtgctgttgggcatggagaagatttcgtggcgcgattcggggaagcgcacgatgttcgcctcgccgccgccgtccttgaccagttggacgaagtgattctgcggcttattgagtacccagatgtcgcgtccggactggaagagcagcaccggcgtctccacttcggcgcaggcggacggattcagtatggcccggttgagcttcaacgcctggcgcacccattcgaacgccgcgcagtaggtctggtattcgctattctcgcaacgcagcttgaagtaccagcgttcacgcgcctcggaagcgccctcgttgccttccatcgagaactccggcgtgaagtccgactgcccgaacacacgcttcttgccgaagccgagtccgcacagcgcgccgaccagcacacgggccacgcccagcggcatgccggtggcgggggcgaccatcggggcggagagcaccgctttgtcgaacagggtggggtatcgctccaacacggccgcgccgatgccgccgcccatcgaatggcagaacaggttcagcggcatgccggccgcgtactgctggccgatggtttcggcgaagccggccagatcggccacgtagcgctgccagtcatcaatccacaccatgcagcggttgtccacgtcgcgcgcggacttgccgtggccgcgatgctcgagtacacacaccgagtagccggcaagcaggaagtaccagacgagctcgtcgtacttttcggcgaactcggtgaagccgtggctgatgacgatggccccgcggaaggtggcggtggcgccttgctcgcgaatcgcgtcgaatttggcggagtcgtagcacaggtagtgcagctggcccgagcggccgccggtgtccataatgccggacagcggctcgatcccggccgaacgttcggcggcggacggatcgaaccagccctcctcgcagcattgttcgagcgcgggcagcaccacgtcggtcatcgtttcggcgtacttgttttcgtcgatcatcgtcacctgcatggctcccatcttaggacaagcctcacgcccacacctcgcacccacaccacgacacattcccgggaatgcgtcgcaagcctgcgcgccactgaccgcacaggcgcgtaggttgtgaggtatgagcgaaaccaatgatgtcaatgacgcaatcaagcatttcccacgcctccgggcgcgcacgctgcgcttcggctgcggcgcaccgcgctccgcacagaccgtgggcgacggctcgcgggccctgttcctgcgctccgacggccccgaggatctggtgaccgcactgtggctgagctggttcgacgagtccggcgaacaccatgagaccaagctggccgacccgcgcgaactgctgggcgcaaccgccgacagcgaggacgtgccggccgaggagaaggcccgccgcgagcgtgcgcgcgaaggcggcaccggcatcgtcggatactccgcagatgacgacggcaatcgcatcgtgttcaccatcaacggccgcctgttcctgaccgacatcgattggaatgacgagaccggcgcacccgagccgcacacccgtgaactggccggcgaatggctcgatgaggacccggcgatgtacacgccggtgctgaacccgcgcatcgccccggatggcgaacatgtgctgtacaccacgggcagctacctgatgctggtcgatatcggcggcgaactaggtgaccgcatcaccgccgtctacggcgtgagcgtggaggatgaggacggcaatccggccgaaaacacgtggaaaatcggtctggccgagttcgtggccggcgaagaaatggaccggtacgacggtttctggtgggccccggattcgcagcatgtgctgttcgagtctttcgacaccgccgacgagccgacctggtacatcagcgatccggccgaccccgagaagccggacgccggccgccgctacccgcgcgcgctgacccgcaacgccgacgtgtacctgaccgtgatcacgctggcgttcgatgagaacgaccggtacgcgggcatcaccggcaacgccgatgtggattgggatcgcgaggcgtacgagtatgtggccgccgtgaactggcgtcgcggccacgatccgctggtgctggtgcagaaccgccgccagacccgcgatcaggtgcttgaggtggcagtcgcggcggatggggccgcgctgggtgccacgcgtgtgcttgaggagcacgcgaacgagcagtggatcgacctggttcacggcacgcccgcctacacgccggatggtcgtctggtgtgctcgctcaacgatatggccacggacaccaaccgtctgacaatggacggccgcccgttcacgccggctggctggaacgtgcgcacggtgctcgccgtgaccgacgaggatgtgctggccgtggtgcagcgcgcgcccgaaatcgcgcctgaggtgccggacgcttgggccgatgcggccgccaccgagtccgtattcggcgaccacgacgcccgcagtttcgacgtggtgagtatcgattacaacggcacgatcacgccggtcacgaccgatcccggccagtggaccgcctcgcgcggcgagcgcggcatcgtggtctccggccgcgatatgcgttccgcccgcgcccagatgcggcatattctgggagaacagagcgccactatcgcgtccacggcggccgaacccggctttacaccgaacgtcacgtttacgcgactgggcgagcaccagctgtacacggcgatcatcgcgccgagcccggaaagcccgtacgcgcacgccgagaagctgccggtgctgatgaagccgtacggcgggcccggcttccagcaggtcatcgcctcgcagtccttctactgggagggccagtggtgggccgaccaaggcttcctggtggtcacggcagacggccgtggcaccaccggccgcggcccggcatgggaccgcgagatcttcgaggatatgaaggacgtaacactggccgatcaggtcgaggccgtcaacgccctgcccgaggccgtcgcccggctcaacgccgatgtggaatcacgtgcggcacagccggctgcgggcgatcaggcagacgccgagaaccacccaccggcgcttcgcgccacctcccgccagcgggaggcgattcccatgccggacctcgacaaggtgtgtatgatcggctggtcgtacggcggcttcctgtccgcactggccgtgctggacgcgccgaacgtgttcaaggccgcatgcgccggcgccccgcccaccgactggacgctgtacgacacgcactacaccgagcgctatctgggcctcgacccggatgtctactaccgaaacggcatcgtgcaggacgcaccgaaactcgagcgcccgcttatgctgatccacggtttcgccgacgacaacgtcaccatcgcccacagcctgcgcctctcgcaagccctgatggcggcgggtcgcccgcacaccttcctgtcgttgacgggcatcacccatatgaccaatgacgagaccgtggccgaaaacctgctcaccctccagcgcgatttcctgcgcgacgcgctggcctgacaaatcgataacacgcgcatcccacccgaggtgctccaccggtaaagcacctcgggtggtgcgccgcacccatttccgccctgaatttttggatattttgcactcatcgtcacgtgaaagaccggttttttgtctcatattcccatcaccgcgtaggatgggtgaagattagaaagggaggactatgagcgttctcgaccgttttgaaaaaagcgtggagggtgcagtcaacggagtattcgccaagtttggctccaaagacctgcagcctgtcgatctttccagcgccttggagcgcgagattgacgccgaggccatgcccgtgggccgtgaccgcacggtggccccgaatgaataccgtttcaagctcagtactcctgacttcgaccgtatcgaggcatggggtagcgagaccctggccaacgaactggccgataacctcaccgagtacgcgaagagccagcattacgccttcgtgggcccggtgatcgtgatcttcgaggaagaccttgacctgtccaagggcaacttcaacctcacctccgaatccgtgcagggcaatgccgtgccggtcaccaccgatgcgcagaccgaggatagcccggtgctcgaggtgaacggcaaccagtacctgctcaccaaagacaagacggtaatcggccgcggttccggttgcgatatcgtcatcgacgatccgggcatctcccgcaagcacctggaaatcgacatcacggataacggcgtgatcgcccgcgacctgggttcgaccaacggcacgtacgtggagggccaccaagtgcccgccgccacgctgctcgacggcaacaccatcaccatcggccgtacccgcatcctgtactgggcctccgcccaagcccaggagtagtcgagcacacgcccgaaagtcgtccacttatgaccgaactgacattcgccctgctcaagtatggattcctgatcctgctgtggatattcatctggctggccgtacgttcgctgcgcaaggacatcgagacgttcagtccgcgaccttcgcgcgcgcgtcgtcgccgtgagcgtgaagtgcataaggccaaggccgaaacgccgcaggcagctgcgccgcgcccgcatcgccagcccagcgcttccgcgtcgtccgccgcctcggcgcagcctaccctgttggtcatcatcgatggtccgcttgccggcagctccgtgccgctggccgaagccgacatcacgcttggccgcgccgcctcgaacaccgtggtgctcgatgacgaattcgtgtcttcccaccatgcccgtgtctaccgtgacacgcgctccgggcagtgggccattgaagacctgaactccaccaatggcaccgtggtcaaccagcagcgcatcaaccgccccaccattctgcccgctcgtattcctgtgcgcatcggcgccaccaccttcgaactgaggtagccgcatgccaaaatccgccgcttcacaaccgctgttcctgtattccaccacggtgtccgatgtgggcaccgtgcgcgcgaacaatcaggattcctccttcgccggcgagcatctcatcgccatgtgcgacggcatgggcggtcacgccggcggcgatacggcatcctccatcgccatccggtcactggcccacatcgagcaggacgacaccggtggcaacgtcgagacgatctcccgcatgatggagacctccgttatggccgcgcatgacgccatcgtcggcaaggccaagcgcgaacgcaagcttgccggcatgggcaccaccgttaccgcagtggcattggtggccggctactgggtcatcgcccatatcggcgattcgcgcgcctacctgctgcgcgacggacacctgagccgcatcacgtgcgaccacagctacgtgcagcacctcatcaacaccggtcgtatcaccccgtccgaagccaagaaccacccgcagcgcaacgtcgtgatgcgcgtgcttggcgactttgacattgacccgcgcccggatatttcgattcgccgagcccaccccgccgaccgttggctgctgtgctcggacggtctgtgcggtgtgctggaagattccaccatcgaagagacgatgaccacgctgtccgatcagggcgaatgcgcgcagcgtctggtgcagatggcactgcgggcgggcagcaccgataatgtcacggccgttattgcggatgccacgttggcgttggatgccgatgcgttcgatctgccgcaccaaacgccgttggtcggcggtgccgccagccgtaatcttgagccgattgccgacatcgtcaacgagccggtggctaccgcgcccgcactgcgggaggatgattcccccgcccagcgcgccgcagcattgattcagcccgccagcgcgcacgaggcggagaccgcgcaaaccacggccaaaccgtcgtccacacgcgtggtgcagccgtccaccgtccgcgaggagaccggtgaacgagccaatcccgataccggtgagattccggtggtgcaaaagccggatgggcgcctgtccgccgaccccaacgacccggatgtggccaaagccatccgcgatgagcaggtcgagcagaagaaggccacgcgtaccaagaagcgccgcaataagcttgcggtgattattacctgcattcttgccgtgctggcattggccggcgctggctggggcgcgtacacgtggagccagacgcactactacgtgggagatagcaacggcaccgtggccatttatcgtggcgtgccgaccaatctctttggacttgagctttcgcacgaagtgcagaccaccaatatcgccaccgcggacctgcctcagacatggcgtgaccagctgagccaaggcatcacagtcggttcgttggacgaagcgcagtcgcatgtgggtattatccgcaccgaaatgcgcaaactggccaagcagcaggaagccgacgccgccaagaaggccgaggcgtccaattccccggacagttccaaagacagctcccagagcgattccaaggacagcaccgaggattcgtccagccagtccggctcctcgtcagacaagtccggttcgtcaagctcatccgattcctcggataaatccggtatcggagcggccgacaacgcggccacgggagattctcaatgatcgttacccgtctacgtcagatttctttgttgctgattgccatggcaatcagtgcgttggcgttcatccagatgttccagcgcaccgccggcgaattccctatgcaatacgccggcatgctggcattggccgtagtgctgtttctggtgctgtgggggctgattgtgcgcttccagccgtacgccagccagtcgattctgccttgcgtgctactgctgaccgccaccggcgtgaccatgatcgctcgcattgaccagagcgaaggttgggcggttgcccaacgtcagctgatctggctgtgcatcgccatcgtgctttccgcgctgctcatcatcttcctgaaggactaccgcgtgctgcggcgcttctcctacgtgtcgatggtggtgggcttggtgctgctgctcgccccgatgctgccgtttgtcggtcaggaagtgaacggcgcgcgcatttggatcaggattccgggactgggccagttccagccgggcgagttcgccaagctgttccttgcgttcttcttcgccgcctacctgttcgaccatcgcgaccagctggccgtgggcggtaagaagatgctcggtctgcagctgccgcgtatcaaggatctcggcccgatcatcgtggtgtggatcgcctcgatgggcgtgctcatcatgcagcatgatctgggcacctcgcttatgttcttcgccatgttcgtggccatgctgtacacggccaccggccgtaaaagctggatcatcatcggtctgatcgcgttcgccgcgggtgccgtgctggccgcaggcatgttcagccacgtgggtcagcgagtcgatgcctggctgcacccgttcagcaacgagcaatacaacaagacccccggcggctcctggcagctggtcaccggcattttcggcctggcatcaggcggcatgctcggcaccggtctcggccaaggccatccttcgctcgttacgtttgcgaactccgatttcatctacgcctctctgggcgaggaactcggtctgatgggcgtcctggccattttgatgctctacctgctcatcattgcctccggctttatcaccgccatgaaaatcaaggatggcttcggcaagctgctcgcttccggactggtgttcaccatggccttccaagtgttcaccgtggtcggcggcatcacgctggtgattcctctgaccggtctgaccctgccctatatggcggccggcggctccagtctgatcgccaactatattctcgcgaccctgctcatcatcatctcgaactcggccaatgcgcccgagccggaactgacctcggatacgttccagtacgaggctttggccgtgctgcgcaacaaggaacttgaggcccgagcccgcgccactgagccgatcgttcagcctcgcagcgcgtcggctacggcgtcgcagtccgaggcggaatcgtttgacgaccccattgtggacatcaccaagcacgcgccagacacacttgaggcacccgaagtgcccgcaattgtgacctctgcgggctctgctgcggcccccatcgccgagcctattgtggatgccaccactccggcgtatgccggcgccgatgaaccgtacacgcctaccggtacgattcccccgcttcctcccgttaacggaggcactcgcgtatgaacaaatatcttcgtcagcttttcaccgccgtggtcgcgctgttcgtgattcttggcctgtcgtccaccatcatcatggcggtacgggccaacgcgctgaacaacgatccgcgcaacgcccgttcgctgtaccaccagctcggtgcctaccgcggtgccattctggcctcggacggcacggtcatggccaaatccgaaccggtcaacgacgcgttcaaatacctgcgcacctattccaacggtccgctgtatgctccggtcaccggcttcttctccatcaaccagaccgccgatcgcggcctggaagcctcccgcagcatgctgctcaacggtgaggccgattcattgatctggcagcgggccaaggccatgctcaccggcactacgaatcagggcgcgtccatcgaaacctccatcgaccccaagctgcagcaggttgcctacgatcagctcggtacgcgcgatggtgcggcggtggccatcgaagtcaacaccggccgtatcctcgccatggtgagcacgcccagctacgatccgaacaaactggcgacccatgacgccaaagccgcgtctcaggcctacaacgaactctctgcgggccaaaatagcccgctaatcaaccgcgccacctcgcagctgtacccgccagggtccacgttcaagaccatcgtcgcctcggctgcgctggaaaccggcgattatcagacggacacgaagattcctgcaggctccagctataccttgccgggaaccgccacacagctgccgaacgacgaggcacagggcgatggcgtcaacggacagatctccctgcaagaggccgtcgcatggtcgtccaacaccgctttcgcccagcttggcgtgaaactcggcgcgagcaaggtttcggacatggccgccaagctcgggttcggcagcaccatcaccattgacggcaccgaatccacgggcaccccgatgacggccaccgcgtccacattcccctctgatccgaccgacgacaagcttgcgctggcatccatcggccaaggcgacaccacggccacgccgttgcagatggcgatggtcgcgcaggcaatcgccaacaatggcaaactgatgcagcccacgctggtcgatcgtgtgcgcgccgccgatctcaccgtactttcgcagaccaaaccgcaaaccatggccaacgcgttcagcaaggattccgcagacaagctcaccacgatgatggagagcgtggtgaccgaggccaatccgcagctggtcgacggcatcaaggtggcggccaaaaccggtaccgcacaaatcggtatcgacaactctgccatcgacggctgggtgatcggtttcgcgccggcggacaatccgcagatcgccgtcgcggtgttggtgcataacacagatgtacacggttcgctcgccgctggcccgatcatgcgcgcgatgatgcaggaggctttgcagcagtgaaacttatcgaaggacagcttattcaccgccgatatcgtcttgattcgcgtcttgcgcaaggcggtatgggcgaggtctggaaaggctacgatattcagctcggacgtgaagtggccatcaaggcgctgcgctcggacgtgaccaacgccgaggccaagctgcgccgcctgcgtgccgaagcccataattccgccaatctggcgcacccgaacatcgctgcgttgttcgaatactacgagcatgacggcatcggctttctgattatggaatacgtcccctcgaaatcgttggcggatctgttccatagcaagggcgcgatggatcccatcgaactgctgcccattctgattcagaccgcgcgaggcctattcgtggcccactcgcacggcgtgattcatcgtgacgtcaagccggccaacatcatggtttccgacaccggcgaagtgaagatcaccgatttcggcgtgagctactccaccggccaaggccagatcacccaggacggcatggtggtgggcaccgcacaatacatctcccccgagcaggcgcagggccagcaggccacgccgcaatcggacatctattcactgggcgtagtggcgtacgagggccttgccgggcatcgtccgttcaccggcaccactccggtcgatatcgccgcagcgcacgtgaacaatcccgtgcctccgctgccgaactcggtggacgtccagttacgcgaatttgtcatgtcgatgctggccaaggacccgttggatcgcccgaaagacgcgctggtggtgtcccgtacgctggcacgcatcgaacgccgtctgctggatcagcagaccgaaatggccgacaccgccatggccacgtccggcaatcgactgccgcgccgagtgaccagcacgccacgcattgttttggaggccccggcctcaagattgggagggaataagcaatgagcaccagtatgcccaccgcattggccggcggacgctaccagcttggccagctcatcggtcgtggcggcatggccgaggtccacgtggctcttgacacccgtctgggccgtaccgtggccgtgaaaatcatgcgcgccgatctggccaacgacgacatcttcctggcccgtttccgccgcgaagcacacgccgtggcccagatgaacaacccgaacatcgtgaacatctacgattcgggcgaagaactggcttcttccgaaagcggcgataccgagcgtttgccgtacatcgtcatggaatacgtcaagggccagaccctgcgcgacatcatcaaggtcaacggcgcactcagccagcgcgactgcgaacaggtgatgttgggcgtgcttaacgcgctcgactattcgcatcgcatgggcattatccaccgcgatatcaagcccggcaacatcatgatttccgagcagggcgcggtcaaggtcatggacttcggcatcgcccgcgctctggacgattccgcaaccaccatgacccagtcgcagggcgtggtgggcaccgcacagtacctttctcccgagcaggcgcgcggcgagaccgtcgacatgcgttccgacctgtattccgccggctgcgtgctctacgagatgcttaccgggcgcccgccgtttaccggcgattccgctgtggccatcgcctaccagcatgtctccgaagtcgccacgccgccatccgccgtggtgccggggctgccgaagatgtgggattcaatctgcgccaaggccatggccaaggaccgccagaaccgctacgccacggcctccgaattcaagaccgacatcctgacctacatgaacggcggcgtgccggtggcagccgcgttcaacccattgacggacctgtcgaatatgaaggcccgcaaggaagccgaacgtgatttgcccaccacgccggtggaaccgcagcagcagcccacccaggcattcaacccggtgaccggtcagttcgagcagattccaccggccaatggtgccaactcagcggcgttgcagtcccgtgcgcagcagcgtgcggcggcggccaaggccaagaagcgcaagaagatcatcatcggttcggcgatcgcggcgattgtcgcggtgctcgtcattgtgggcatcatgttcgccatgaacggctccggcaacaagtcctctgaagacaccgtcaccatccctgaagtgtgcaacgcttccacgtccaaggacaacatcaagctcaagcttgagagattgggcttgaagatgaccgaaaagcaagacaccgactccaccgagccggaaggcacctgcaccaagatgagcccggacgccggctccaaggtggccaggggatctgccgtgaaggtgtggttctccgcaggcccgcagtccactcaggttccggatgtcaaggagcgcagccaggaagaggcgcgcagcattctggaaagcgccgggttcaaggtgaacgccaccgtcaaaaccgaagacagcgccgacatcgccaaggatatggtgacgagaaccgatcctgccgccggtcagtcggttcccaagggcaccaccatcaccatatatgtttcttccggcatgaccaccgtaccgagcaatttggtcggtcagtcgaaggacagcgtgctacagcagtatgagggcaagttcagcttcaccgtggagcaggaaagctccgatacggtggaggccggtctgattacccgcgtaagccccgattcgggctcttccatcgcgcagggcgggtccatcaccatctgggtgtccacgggcaaggaaaaggtcgctgtaccgaatatcaccgctggcactgactacgccaccgccgaactcatgctcaaggccgtgggcctcaaggctcaggccagtggcccaaccgacagcaccgctgtggtagtcagcatcaatcctggcgctggcagccaagtagatgcgggatcgaccgtcaccattaccacgaaggccggcagcaccggaggcgacaccggtaccggagacggtggcaacggcaacggtgccaacaacggcaacggggggcggaacccgtgagtgagtgagcgccgggcgtgtgtgttgcgcatacgcaacgcacatagcgcaacacatgcgcaacacatgcgcaacgcaatcacacaacgcaaaggggaggggtttctgcacccctcccctttgctgtataaagagctatcccagcgcaacattcccgggaaagcgtcgccgcgcgcggaaaagctacttcgtaaccttgggctgaaggccggcggacttggccacggcgttgtcttggccgcagaccttaagccagttggccagcagacggtagccgtcctgggtcatcacggattcgggatggaattgcacggcgtacatcggcttgcccttgaccttgatgccctgaataatgtggtcgccctgcgtccacgcggtaaccaccagcgtatccggcaccgaatcgggctcgacggccaacgaatggtagcgggtggcggtcatggggttggccacgccctcgaaaatctcgtcatcgatatgttccaccaagctggtcttgccatgcatgatggtgggcgcatggcccacagtgcagccatacacctcggcgagcgcctgcaagcccaggcacacaccaaacatcggcacgccgctggccgcgcacaggcgaatcatatcctcactggcaccggattcggccggagcgccagggccgggagaaatcagcacgccatcgtaaccgtccagtacacccggcgcggctgggtcgatagcgtcgttacgcaccacatcaacagtggcgccaagggtttgcagatagcctacgatcgtgtagacgaaggaatcgtagttatccaccaccaaaatatgcgcggaatcggtcatagggctctccttgagggacgtgtactgcaagacatagtactaggctgccgtcagctcactgccacgaagttcgacatctgctgtaggaatgggatattggcggcggcccaagggaatccccactggaacagcgccgcggcggctgcgaacagcagcagagccagcagcagccatcgaatcggtgccacgccgggctgcagacgcaacagtccgccatagatgctggcatccgggcggcgacgctcacccgcgcgaatctcgcgcagcaccggccagcgccatgccaccgcagcggcgatgaacagaaccagccacactaccagcgcgccgaataccaccttgtccagcgagccaatgcgggaagcgatcgagggggtttcggtggtggagaacttcactgcaccggacgaatcagtagtagccagctctttgggcacgccatcagacactttggcccagtacgccaactcaccatagctgatccatcgatgggtgggggtggagtatttcggctcacaggtagtcagtgtgatcatgcgtttggtgggattggcagtggagtcttccggattgggcgcgatcacatacacgtccgtgggcagcacaatctcgtaccgggtgtagtggtagacgtaccagtaatccttggtacgaacgatgatgggatcgccttcctgcaacttgtccacatcgcccaacggctgcccgtagccgttgcggtggccggcgacggcgaagttgccgacctgccccggcatctgggtggtgtcgtaatggcccagaccgtggcgattgagctgctcgagcgtggtgccttccacgatgttgcgatgccattgggagccgaagcgcggaatgtagatctgcgcaatcaagtctccatatttcgcgtctttcggctgtactggagcatcgccctcctgggctttggcgatggtgaccgttcccccgttgttgctggggtcgctccagtcgacggactgggtggtttcgttctgggctcgctccgcctcgacaccggtccaccacatctgccagacgatgtacagggcgcaaatcacggcagcggtaatcagcagttcggcgcagatgccgagtgcctgccagatcaggctccgctggggcgaagacgcgccgcgtactgcggcacgacgggaccttgccctgctggcattggccgggtctgccgccattcgtgcggcgtcgtcctcggggaagggctgtacgtccgacacggacgcgagatcaatgggcgccggtgcgccgctgttgtgcctgccgtgtctcattgctgagtctgctcctcatctgtggtctttgacgtatcgaccgtggcatatttcaactgctgcagcaaggcggcggtagcggggaactgaaggccctcggcattctccaccttgtagccaatgccaaacgcggtcacatattgcttaagaatggtaatggcttcggagtcgttcaacgctgcgcgaagtctttgcgggtcaccaatcgcggaaatggtgaatggcggcgagtatttcttaccgtgcaacgacagcacgttgccggaacagatgaccgccgaattgaacagcacccgctgatccataatcatcagcgcatcggcaccgccggcccacaaggcattcaccaccgattcgacgtcctgctgatgaatcacgtaatcgttgatattggcggtcgtgccattgttgttgacggcgttctcccataacggagaatcatccagcgttaccgttacgccgctgccgctgagcgcgggcagcatcaggctggaatccacattgctggagtccttgccttggttctgcgtgctgtcagtaccgtcggtgccatcggccttgagcgcgtccgtaagattggcgacctgttcggtcagatcgctgacgtcctgctgcagctggttggcctcgtccacgccttgctccaccagatcggccgtatcgttggtggcggcaaccgtacgattgaccctcacgttggtgctcagcagaaaaccggtcaaggcaatgacgacgaataccgcgacaccaccccatagggagtgccgtgcgccgtgcttacctacatgtctggccatgaatttcctgtcttcttgccgactctggtcgccgctttcgagtgtagccactattatgacttttagcctattgaatggagactatgctgatggctgacgaagagctgcacgagaccgactcgaacaaccagaaggactggcagagcgagacctcatccagcaccgctgctgacgagaccgccaacaaagacaccgagcagaacgcagagaacgcttctgccgaggaagacgcggcttacggcgtgaatatggagcaggtgcaggccgtgctcaacgccactgccgataaggccacgctgaccccgcagatgcagcgcgtgatgaaccgtcaggcggagaacaccaagcgtgttgaagaaaccattaagggcaccaagtcgaacccgcgttggttcgtgccgctgttctgcgcgtttatgatcatcggcctgatttggtgtgtggtgtactacctctccccgtccggctcctggccgattccgaacatcggcgcgtggaacctgggcatcggcttcgccctgatcatgatcggattcctgatgacgatgggatggcgctgagttccgactcgttgcgcttatctatcggtagatcgtttttctatcgttaggttgttcttagttcttatgcgaaaggccgacctcccgtatgcggaggccggcctttttcgtgccttcacctgttcatccacagctatccaccacttatccacgacttatccacgacttatccactacgttatccacagcctgtggatgaatcacacccatgtagttttccaccgaatgtggaaaaccatgtggataagtggtggataagcggcgtttctcggtgtatatctcgtgcataactttggcttggcatacatcgccacagcgagggaacagttatacacccgagttatccactgcaacaaacccagtaataccgcggcattcctaacttatccacataagttatccacagtcttatgcacttttctacacacttgtgcacaagtcaccattgtggataactcgttatcgtggataactcgtcattgcgcgcatctcattactgtggataccttcattactgtggataccttcattactgtggataccttcatacagcgcatgcccactcaccgaatgacgatatccacatcgctaatatccacatcgccgctttccgcacatacactgatgccgggcactgcatgttccgcaatacccggcatcaatcgtttttttacagccatatcaagccatatcagtgcagggagccgaaactcatccacccataaggattggccatattgcacaacagaatcaacacaacgaccagcaccaccatggcccagccgtaaacctgcatacgccatttcaggcttttacctcgccacgccggcacaccacccaccagcagccatgtgagtattccacccactacaaagccgccgacatgcgcctgccacgccacgcccccgaccacgaacggcaaggcgaagttcaccgccatccagatcaacatggagcggatatcggcgccgatacggcgatataccaccagcaatgatgcaaacaggccaaataaggctccagaagccccataggctgccatctgccagccgatgcctcccggagccaccgcagcccacaccataagtcccagagagccgccaaggccggaaatcacatacagtcccaagaaccgccagtggccgatcattcgttccagcactgggcccacggaatacagggcgatcatgttgaacaggatatgcaatagcgagttcggcgcatgcaggaacatcgaggtgatgagcgtccacggctcagccaccagtctgaccggagccgccatgccgaggtacatcaaccaagccctcaggcccggggcaataaatcccagcaatacctccagtagccacactgccacgcacgcaccaatcagcgcccaggtcatcaccggaccaccgcgctcccactggtatcgaatctcccgttgtgtaggaatatgcatgcaatccactgtatcgaaggtctcggatgcgttccacgcgccgcgaagatgctgagccgaccgagggcatgcgggcgtggatgaatcgcccacgaatgtcattccacccaatcgtcacaaacagcggcctagaatagggagcagagtcggtctgaatgggcataccgaccagacgatccctagggaaaggagccgtcatggagaacaagtcttctaacggttggaagttcttcgcgctgctgttcggcggattgctcgccgcgcttgttggcttgtacatctacaagcagcagaacccagattacgatccgtgggaggagccgtgggagaacagctcctcgccggtcgacctgggtctgaacaaggccgaggatgaggccgatggcgaggcggaagccgccccggccgaagcctgatagggcggtctttcaacgcaagaagccccgcaaccgatggatgtcggttgcggggcttcttatgttctggttcccctctccgaggggagccgccccaccgactcagtcagccagaggagcagtgtgccagatatgcggagccgttaagcgggaagcccggcgggcttcccgtaggcgacgccgagcggcgacagccgcgaggtagaaaccagcacgtagccggcgcgctgctccggcggccgtcaggccagaggagcagtgtgccagatatgcggagccgtcaagcgggaagcccggcgggcttcccgtaggcgacgccgagcggcgacagccgcgaggcagaaaccagcacgtagccggcgcgctgctccggcggccgtcaggccagaggagcagtgtgccagatacgttccaaatagtcttccatggagcggtcggagctgaagtagccggagttggccacgttgagcagggccttgcggttccattcgagctcatcggcgtagagggcctcgatctcggactggatgtccatgtaggcggagaagtcggccagggtcatgaaccagtccttggtcagccagtcggccacgagcggggagtaggcgttgcggtcgccgttggagaaggtgccgtcggccaccagatcgatggcctgcttcaggcgcggatcggcctcgtagtaggaggcgggattgtagccctcggcgtacttcttctcgacctcgtcgacggtcatgccgaacaggaagaagttctcggcgccgacgcgctcacggatctcgacgttcgcgccgtccagcgtacccacggtcagggcgccgttcagagcgaacttcatgttgccggtaccggaagcttccttgccggcctgggagatctgctcgtcaagctcggtggccgggatgaggttctgagccatctcgacgttgtagttcggcagcatgtggacggcgagcttgcccttgacggccggatcgctgctgatcacgcgggaaacgttgttgatcagctcgatggtcatcttggccaggtagtagcccggagcggccttggcaccgaagaacacggtgcgcggagtgatgtcctcggccttgaccttgccggacttgatgtcggcgtagttggagatcacggcgagaatcttcagagactggcgcttgtactcgtgcagacgcttgaccatggtgttgaacagggtgttctcgtcgatatcgatgccgtagtggtccttggcgaagcccacgaatgcgtgcttgttggccttcttgacggcggcgaacttcttgacgaactcatcgtccttggccagcggctcgaggcccttgagcagttccagatcggcgacccacttgtcggtgcccaggccctcggtgatgaggtcggacaggcgcgggttggcgagcttgacgaagcgacgcggggtcacgccgttggtcacgttggtgaacttgtccgggtagacgtcggagaagttcttcagggtgacgtccttgagcagctgggagtgcagctcggcaacgccgttgacgtgggagccgccgtaggtggccaggtaggccatgcgcacggcgtcgccggtgtagatggccatgtccttgatggtgtcggcggcaacgcccttggccttgagctcggcctcgaactgcgcgttgatcttctcgatgatctcaaggtgacgcggcagcagctcgccgatcaggctggccggccagacctcaagggcctccggcagcagggtgtggcaggtgtagttgaaggtcttggtggtgatggaccacgcggtatcccagtcgtagccgtactcatcgatgaggatgcgcatgagctcggggatgccgatcaccgggtgggtgtcgttgagctggaagacgatcttgttcgggaaggtcgtcaggtccggcttgtcctgccccgggtagaagacgcggatggcgtcgtgcagggatgcggagacgaagaagtactgctgctcgaggcgcagttccttaccgaccttggtggagtcttccgggtagagaatcttggagatgttctcggccttgacctgcggggccacggcgtccatgtactcggaacggttgaaggcgagcagatcgaactcgtcgtagctcttggcggtccacaggcgcagagtgttcacacgctgggacttgtagccgggaaccatgtagtccaccggcacggcgcgcacggaccaggccggttcccaggtcttggtgccgtcggcgttttcgacgaccttgccaccgaaggagaccttctgatcacggttgtagtcggtgtggccccacggctcttcgttggccagccagtaatccggggtctcaacctgcttgccgttctcgtcgaacttctgcttgaagatgccgtacttgtactggatgccgtagccgaaggccggcacgcccagcgaggcgagggagtcgatgaagcaggcggccagacgaccaaggccaccgttgccgaggcccggctcgtattcggcgtccacgatgtccttcggcttgaagccaagggcttccacagccttgtcgaactggtcggtcaggccagcgttcagcagtgcgttctccagctgcttgcccatcaagaactcggcggacaggtagccgacggccttggtgttgccgttgacggtgtcggcctgggtcttgaaccaggagtcggcgaggtggttgcgcacggctttggacgcggcgacatacacgtcagcaggggtggcctgctcggcggtgacgttttgagtgtatttcagttgttcacgaatctcgtcggcgaattgttccgccgtgacaggagacttcggtgcggtgatttcggtcattctgactttccttccgggataagtgcccgtgtttattatgccgcgcgataggtatcgtcgcatagacgtaagcatgaactctccgtaacgacgatggcggagcgttcttgcatacgttctcattgagagcgtatcacatatctcacggttccgcatcctacagtatgccatcgtttgcataccttgcggtttcgcgtgccggtgccatgatggagcatatggcagtaattctcgaaaaagacttgaaacgagggcacgacgcactggtgcaatggcgtgccgcagccctggaactggccgacaacacaccacatcgcctgaccacctcccccgttctgccgcgcccggtgtgggcgatggctgtgcgctactcgctgttcctgctggagcggcgcgcgcccggccctggcgtggaggtgcgcgttgcgccgtggggtgcggtcaagatcctggacggcccggaatcggacccgcataacctgaccccgccggacgtcatcgaactggagcccgaggtctggctacggctggcctgcggcatcaccacgtgggcagaggaaaaggacgccggccacatcagcgcggtcggcgagcgcgacgacctaagcgacctgctgccgctgtaatcgccggatgcccggtatcggaggccctttatcagaactgtgcgatgctccaacgctggatgtgctcggcccagtggtccggcgtgggcagggtgacgaggctgcgcatcgtcagcgcatagagggcggcggccaccagcacggcggccagaatcaggcaggtcggaccgtagccgatggtctgcataccccagccggcgagtgccacggccacgccataggcaccgtactgcaacaccatgctgcccgctccaacgcggccgagcttgtccttgcccaccaaggtattgctgaggcctccaagcaccgcgttgcccgcgggcaatgccagtaccgagcaggccacaaatatggccttgccaaccatggagggcaccaacgcggcaccggtgaatcctacagccagcaagacgaacatcacgcccaccagtacgccgccgggcacacggttgaccagttgcgaggccatcagtgcgcccagcaacatgccaacggcggaggcggcgttgatggatccggcggatatcagctggctgccaccttgggagatgtccagcgcggtcagcagtaggaaggcattgctggcaccggtcaccatggccgctgcgatgatgagatggcgttggaaccggtcgcgcagcagccagatcatgccgtccagtgcgtcgcgccagcgtggggcggagtcatcggcatcatcggcgtccgagacggccccgacctccgaaccggtatcaacattgcccggacggccgctatcgctcacagtcgcacgtttccaatagcggcggatacgccatgcggacaccatgcccagcacgctcagcaccgcgctggtcaggaacggcaccgcatgtcccacggtcatcagcagaccgcccaacggcccgcctgccagcgtgaccgtcgaatccctggcgtcgttcagcgccatcgcgtgcggcagctgctcatccggcaccacgccacgcagcatggcattcgatgtattctccaacaggccatcgcgcaccgaaaacagcacgacgatacacagcagcgcgatcggaagcacgtgggcatacggtccgccgaatgccggagcgtttgccccgttaaccccatggccgctcgtcttcggcgcattgccgaacagcatcaccgctgccgccgccaccgccgagagcaccacaccggacgcaccccagatcagcatgagcgtacggcgatcataccggtcctgaatcacgccgccggcaaggcccagcaccgtctgcaccaccacgcagatgctttccgtcgtggtggcggcggcagaggatcctgtcgtggcgagcatgatcagcggcaccgcgaacgcgatcaggctggcaccaaccgcgccggacgtgtccgcagccagccaccatccgtaatcagttccccgccataaatccgtatcacttgccatcgttgtcctccctgggattggtccttatggacgccaccatagggagccgccgccgagccgaacacccgcaatcctcggttatggggacatggctgcggtcgtcgtcctcatttgtgaggacagggtacaatcagcgccggacgccggacatcgcagcttctgccccatcagccccgcacgcacgggatacgcacatagatcatccacgtgccatcatccgaacgggtggtcaactcaccgcccaactcctgcacacgggtgcgatgcatggccagcccacgccccgaccgctcctgcgcggacaggccactctgcgcgtcggcatcgtcacggatatcgttggtctcgcgaatctcaatccattcgggagacagggtgacgaatagcaggtaggaatcagctcccgccggtgcatggcggcggatattcgtgccgatctccgtcatcagcgacagcgcctcggccgccgcctcggggtccacgaccatggcgatgccgttgaccgcggccgtcccccgatagccctgcgcctccagaaactcctcggtatcggtgatctgcgccttcacacgcgtgacgaaggattgcggcatgcccgctgtggattgcgtacggtcatcgccaccggcgttctcgggcacggcattgtcaaccacctcattcgcaatcgctggacagctcccggtgcctaccgggtcacgagccagggcggattctttcgtcggcgaatcaacctgccctgattctgcagtcgccacctcagatgtcccggtgccaccgaccggcaaggactcgtcccggaagccggcgtccattccgctctgctcggtcagaaaatcgatgatgccatgcacttccgcaaaggcacgttggctgcgatccagcacgcgctgccagtcgccaccatcgatgccggctggcgcggccagattattccgggcgatggtcgagatatacgtcagatcgttggacagcgtgtcgtgcagttcgatcgcgagctggttgccgtggcgcagatcggccagcgccgattccatctgctcgttttcgttctcctgattcaccacgcgcttgcgccagcgcaacgcaatgcccagtaataccagcagcacgcttgccgtcaacgccgccgacgccgtgaccagccacgacccggtcaccgcatagacgatggccgccaccgcaagcacaccgatcgggccgaacatcgccagcggatgattgagttctatatcgatatcaatctgatgatgcttcttgccgtcggcgtgaccatacgaatacgacgaatgccgcgaaatgataatcggacgtttcaccggcccgctccccttatgcgccttgcgcttcttctaccgtgtccccacacacccatcggcgccttcatcagtgcaggttcatgcgaatccatgcgccgataagttccttgagattgccggcgccgagcttgtcggccgcacgcatcagatgcgtgcgcacggtggtttcggtgatggacagttcggcggcgatctgcggcatagtccggccgcgggaccacagttccgcaacctccatctcacgcgcgctcagacggttgtccttctcggccttgatgcgcgcggacgcaacggccgcggtctcgaaccgcacgtcgccaccatcgccccatgttttgccggcctgtacctgacgaatcgccacggcctgcaaccgcacatcatcgttcttgctcatgatgccttgcgcgccggcccgggccatctcctgggcatgccggcccacaatcgaggcggtaatggccagtatcgccgtggtcgcgttttccttacgaatcgcgcgcaccacatccgggccgttgatgtcgttcatcgcgatatcggccaatagcacagcaggcgggcgtttggtggccgtgcacagctgaatggctttgctgccctcgctcaccggcggcaacaattcgaagtctggcagggccttcgacaaaatcgactgtaatgccatcagggccatgcggtcgttgtccatgatgagcatggtgggccttggcccatcctgcccgctgatatccggcatatgcctacgtgcgctcagctcttcttgggcttgagcgcggaaggcatgggcatcggaatcggcttacggggagccggtttcggtacattgaccgccttcttgggtgccgatgcggggaattctccactggtcgccttggctgccgcttcggctgcccacttggcgtactcgtcgaggtcgtcctcctgcgcggcgggagctgcctcggcggcaccggaagcgtggtcgtcagcagcggaatccacatccttgtccgcatactggtcatccatgtcggcgaacgggtcaggagagcccgttcccggctcctgctcgcttagctcttttgccagctcatcgtaatcggtatcggtggtcaggtacttgagctttcgggcaattttctgctgttttgctttttgacgtccgcggcccatctgaccccctgcgattactgtgctgttcgattcatcaacaatagagagtaccactaatagtggcttgttcgttgtcggctcacacttttaccataaaaagcgtttatctgagccctatttaaaggattttcgcatgaccgacgagcagcaactgacagcggcaggcaatgagataagcgcgagcttcctcgcggccaaaaagcgttcggacgaaacgctcgccaagctggaggccaagccgtcgtccttcaccatgttgaccggcgaccgtccgaccggccggctgcacctcggccactacttcggctcgatccgtgagcgtgtcgccatgcaggagcgcggcgtcaacacgaacatcatcatcgccgactaccaggtgatcaccgaccgcgacaccaccgagcacatccaagacaacgtgctgaacctggtgctcgactacatggccgccggcatcgatccgaacaagaccatgatgttcacccactccgccgtgccggccgagaaccagctgctgctgccgttcctgtccctggtcaccgaggctgagctgcaccgcaacccgaccgtgaagtccgagatggaggcgtccggccacgcgctgaccggtctgctgctcacctacccggtgcaccaggcgtgcgacatcctcttctgcaaggccaatgtcgtgccgatcggcaaggacaacctgccgcacgtggaaatcacgcgcaccatcgcccgccgtttcaacgagcgttacgccaagaagaacccagtgttcccggagccggccgccattctgtctgaggcaccggagattccaggtctcgacggccgcaagatgagcaagtcgtacggcaactccatcatgctgggcgccaccgccgaggaaaccgccaagctcatcaagaagagcccgaccgattccgagcgccgcatcaccttcgacccggttgcccgcccgcaggtctccgccctgctgaccaccgccggcctggtgaccggccgcgacccgaaggacatcgccaaggagatcggtgattccggtgccggcgcactcaaggcatacgtcatcgaatcagtcaacgagttcctggccccgcaccgcgagcgccgcgccgagctggccaaggacatggattccattcgtgacatcctgcacgacggcaacaagcgcgccaacgccatcgccgaggagaccctcgaccaggtgcgcgaggccatgggcatgaagtactgattttcccgccgctcgtagcaagacgccgtgtcagccccaactgggcaactgacacggcgttttttgtattgcggcgtctgctgtgtcctatcttcacttcgaggggcggatttcttgttttccggaggtctatctccgcttcgaggggctgttgctcaagtaggcgaggcacaaaaacggcggaatgacgttggcgtgaatgggattttatctgagattgagcgcatgaccagccccttgaaacggagatagacctccggaaaggctcaaatccgccccttgaaacggagaatcaagcgttagtaactctcaattcaaaaaacacaacatgttttccgtgcaacgcggctatcaagacggacctctggtcacttcatgccgatggcttgcatcaatacgtacgctccccgcacagcaatgtcattacgacgtgttgcggcatagcgcgcatggcttccggagtatcggcggcgtatgggtcggcgtccaacaacaccatatcggccgggtcgccggatgcaaggcggtcacggccagtggcggtcgaggctgccagcgaggtgcgtacatcgaggcactgctcgggctggaacggctcgcggtcagagctttcggagccgaacacggcggcggaaatggccagccacgggtccagcggggccacgggcgcatccgagcccatgcgcagcgtggtaccgacgtcgtggagggccctgaacggataagggatgccggccgggttggcccagaaacgggtgatgacgtcgcggtcatccatggcgtgctgcggctggatactggccgcgagccccagctcggcgaaacgcgggatatcgacgggtttgagcatctgcgcgtgctcgatcgatccatgtgcgtgcgtggcagcgactgcgttgagcgcaatggtgttcgcttcgtcgccaatggcgtggcaggcaatgtcgaagccatgctcggcggctaggcgcatatagtcttcgatttgctgcggcgtgtagctcagcgtgccatacgtcggcggctcgatgcccgaatacggcgtggagcagtaggcggagcgggtgttgagcgatccgtccgagatgagcttcatggcgcccacatggccgagcccggcgctgcccggcagtgggttgccggtatgccaacccgcgtcaatggcggcttgcaaccgctcggggtatacaccagcgtccacgcgcaaaccgttaatgccggccgcgaaacgattgatccacgtatcgatgttttcggccatttcataatcgcggatgcccaccacgcccttgcttgcggcgtcctgttcggcctcgcgcagcagacggtcagtctcttcagcagcgcccggcaccttgtcgaaggcggtgtaggcgttgaaccattcgagttcaccgaccagaccggattcgtccacatgtacgccaagcctgcgggccgcggcggagttcacccatccgcagtgcatgtccgcgctggagagggccaccggctgttcgccggtcacggcgtcaattgcagccagtgtgggctgctcgtcgtcggcccacagcgagtgacggaatcgcatgcccaccacgaaggcatctgggtcaagtgtgccggcggcgcggcgctcatccagatgacggcgcaacatgtccatcgcttcggcggcggaacgggcattgatgaggtccagtcggcccagcgtcttagcccattgcgtgaagtgcgtgtggcagtcccacaggccgggaataacccacaggccgtcggcgtcgatggtggtttcgtcagcaggtgcggaggccgacgttgggattgagacgctgccagaagcaatggcattcgtcgcgtatgccaacgatgtcgtatgcgccttagtctgcatcgtgccgtccgaagccgagaccgttccagcagggccgacagacgcaacaaccccatcgcgaagcaccacatccacgcggtcctgagaccccggaacaccggcattgacaatacgcaccaagctactcatacccgccatcatgccacctttgcatgaacgccatggagattcgttcaagctgaatcgcgccgtcggcggcgattcccgctggctgcctgcaaacccctacgttccatgtaattgcgggatggcctgcaactgcgatgaacacccatagtttatccaccgacttatccacatttatccaccgaaaaattggggcggtagacaaggccgatagccggactctacactgcgaggacaaagcgaacatcacgaaggggtgatcatcatgggtagctcaacggcattgaccgagctgacaatgcagaagtatcaacgaatgcagacgtgcgcagatgttcaacgacgaagcgcatggcgcccaccttatgccctgacaacagcgttggagcttttgtcaattgaagtaccccgcatatcaagcaaacacagaggccttgcaactacaaccattgttgcggttccacatgccaatgacaaacggcacattgtgggggtcaaagtggttgtatggcctttcccactagacacggtcataatcgagggacaattcacatgcacttcaccagcttgcacatgggccatgttctccgcgtatctcgaacttgaagaactcatcgttctcgctgattccatgatgcgacgagatcgaaggctctgcagaacaaccatcgacgccctttctctgtatctcgatgaggccgaggcccaggtgcgagccgacaaagagaatggcaccaattcgtatttgttccgcgggtataacaaatgccgtcgcgccctgcttttggcgcgcgcgggcacagattcctccatggaaacacgaactcgtttggttctcttgaaatacggtctggattgcccgcaggtgaattatccaatattcgtaggaaacaacaccagacccatatatctcgatcttgcataccctgaattcaagatatgcatcgaatacgaaggctctcatcatgccgggcaatggctgaatgacgcgagacgccgccagatgatcgaagacgctggctggaagtacattcaagtcaccaaattagatattggcaacgaagcgggagaagaggcccttgcccgaagagttgccgaaaggatacaggaggttacgggcaaaacggtccagctcacgatgcggcaaaccacccagcaaattagcgatgtccgaaagctacgccgtattccgctgtacaaacggctgaaattcgagcctctgctgccaattattccgacgacgcaggaataataagcccggtagagtcagtccgcaccgtccgcaccgcgctacggtattcaaaacccatttcaaggggctgatttggcctccgccggaggtctacttccgtttcaaggggctgatcatccgctagatcacgtgtatcaatgcccttacgccaacgccattccgccgttttggagccgcgtctactcaggcatcagccccttgaaacggaagtagacctctccagaacgtcaaatcagcccctcgaagtccgttttggcctcaatggttcctgccgaaccacaaaaaagccactcctctaccatacgagccgaccgcacagcaggcacgtgtcatttgccgctgcggacctcggactccatggcttccatgggctcgtcgacgagcacggtgccggacggcagggtgccgggcagcggatcgtccatgtagtggtcgaactcgtagagcatacgctcgttcggtttggcggtcagcaacgaaaccaccacgatgaacagcagcgaaatgatgaacgccggcagcagctcatagatggcgaatacgccgcccaagggcttgacgaggttgtgccagatcagcacggccgccgtgccggacagcatgccggccacggcgccggccttgttggcgcgacgccagtatagcgagcacagcatcaacgggccgaatgaggcgccaagcccggcccacgcgtaggacaccacctggaagatcgacgagttctggtcgtatgccaccagaataccgaacaggaacatgaccaccagcgtgaccctggccacgatcatgacctgcttgtcggtggccttgcggtgcagcagcccgcggaagatgttctcgcccatggccgaagcgccgatgatcagatacgaggagctggagctcatcgaggccgcgaaaatgccggagaccaccacgccgcacatgaagctcggcagcagggtctgcgccagcacgatgaaaatggtttccgcatcggtggaggtcagcagttcggtgggcatcatcgcgcgccccaccaagccgatgcacactgcgcaacccagcgaaatcacgcaccaggaggtggcgatgattcgggacttgcgcacttcttccacgctgcggatggacaggaagcgcaccagcacctgcggcataccgaagtaacccaggccccacgccagcatggagatgatggtgatgatgccgtagtcggagggcgcgccgaacacggccttgcccgcctcgacgagctgctggccggtggccgggtccagcttgggcgcggccacctgcgtgccggacaggtagccggggatggcacgcaggaattccacggtgttgtcgatgccgcccgcgctggccacagtgccgatgaacaccaccgcgagcgcgaagaacatgagcatgccttgaatgaagtcggtcatcaccacggacaagtagccgcccaccacggtgtagacgaacacgaccaccgcgccgatgatcatcatgacgtggtagtcgaaaccgaacaacgtggcgaacagcttgcccacggtcacgaagcagctgcccacgtacacgctgaagaacaccaggatgatcacggccgcgatggtggagaccacgcccttcttgtcatggaaacgcttggcgaagaagtcaggaatggtgatggcatcgccggccactaccgagtagcggcgcagtcgccgggccacaagcttccagttgagataggtgccgagcgccaggccgatggcggtccacatcgggtcggccgcgccggtgaagtaggccaggcccggcaggcccatcagcagccagccgctcatgtcggaggcttcggcgctcagggccgtgagccacggccccacgccgcgcccgcccgcaaagtattccttggaagaggagttggagcgtttggagtagatgaatccgatggacagcatggccgcaaaatagatgaccatggccagcagaatccagaaatcgttggtcaactgcgacacctccccaatcatgacgccaagcggctaccgccatggcagaactatgtgctgatatgcgtgctgatatgcgattgacgccggagcggcgtcatacagaccgtcacagccgtgaatacggccgcaacgcacttcgcctgatggtagtggatacaagggctcaagcaccttccaccgtttccatactgagacgctgttttatccgagctccccacctgaggggagccaagatgacggtcagatgtcgtagcgccaggacttgtcggtcaccacgcgggccatcgccaagccgatcggcagacagataatcaccatgaacgcacggaacgcccagtccagcgcattcatggtctggaagctgccgaggtaccacatggcacggtacatatacagaccgggcaccatgatcacgatcgacggcacggtcaggcagatgcgcgggtagccgaggtgcggcggtagccagccacgtcgcacggatgaacgccacgccgatgccagaatgcccgccaggaacgcgccgatgaaggtagccatctcgggtgccacgttgaagtcctgcaattccagacgcagcgtgtccgtgatcgcaccgatcagggcggcggccaggcacatgcgctgcggcgaattgaacagcacggagaagccccacacgccgacgaacgccgccacgaaccgcagcaatccgttgacccacgggtcaagccccagcggttcaaagccttccgggtgcaggtgcaccatcacggccacggcccagcctgccagcgtggccatcaggatgatgcacagcacgtacgccacgcgctggatgcccgaggggaagtcgattttcgccatgtcgagtccgccggtgatgagcgggaaaccggggatcacgaacagcatggcgccaatgtaggccgtatcgtgcgagagcgcgactgggtcgaaaatgccgatgagtcgcagggtgccggtgcaggcgagcgccgccgcggccacgcacacaaaggtgacgaagaactggttcagatggtatgcaaacagccggcgacgcatccactggccaaggcccgcgcccacgaacgcaccgatcatgtcgtatgggccgccgccgagcaggaacacgaaggccgcgcaggccagggcggaggccagaccggagaaccacggcttgtacagcggcttgcggcgctcaatcagatcgagccgctcgtgcgcctgccgcacggtgataccgcccttggccttctcttcgtcggagcgctcgttgaagtgttcggcgtattccttgggcacgcgattcttgcacttcgtactgcttgcagcagggctttcggcggttgcgccgttcgccgcgttcgccgattcaaccgactcattggagtcaccggtaaacacttcggcatcgtcgtaggccttctcttcggccgctttgtcttcgaccggagtgatttccgcgctgtccgccaaaagtcggtgggcttctccattgtcatcatccaaggacttggccacggaggtcacgagtaccttggttttcaacgcaagatccagcgtctcgtccacgctgccgttggccgcctcagcctcggccttggcacgttcgcgcaggcgcttggccagatcggccgaatactgcgaagcgtcacgttcgtccaaatgcttgaccacgccatcggacagttgcgaatcgacgtgatacatcgaccccttgccgagattcacggagaaccagtcggcgaaatgttccagcagccagatacgttcggtgttcacgccggtggtcggcaaatccacgacttcggtgatgcggttacgaccatccgtgcaggtggcctcgatatccgtcaggttcacgtcggcgcgtacgtgcacgcccagcgggtaggcgatgcggtgcatcatttcacgcacgcggaaggagccggtgccggctcccaggtccagcatgccgacccgtacaatcacgctggctttggcggcgataccggcgtccaccaccggtttttcccaatcgcgcgcaatatcttccatgtccagcggaatggagtgggtgtggaatttacgtacagccgttgcgcctttcgcttcgggcgcactttttttcttctgttcgctcacatccctcattactactccctgcctcccccgccagcaatcgtaaggtgctcaaatcttccgcgaatcggacagtgtctcatatgctgtccgatattcggtctctataggtggacaacttggagcactatatggactccgtaacgcaaatagcgatttcgcggggatacactattgcccacacaacaaccacgttgaatatgggctgtgggctcgcaacgactggcctcaacaactgcggaggagccgcagacgaccggtagaccgagcaacctgttattcggcaaaggaggttatatggcaacacctgaagaacagatcactcccgctgacgccgccatcgtcactaccgggaccggccgaaagggcccggaggagcatgatcttcccgaaagcctgaagtacgacatggatctgtgtcttgagatcctgcgtaacgtactgggcgaatacaaccccgaactgctgtctacgttcgacaccgtgcgtcattacgcggtggaggccagcgccgagcatttcgccgagctgaaggatccgaaccccgaccaggatggcctgaaggaggccgtgaacgtcatcgacaacatgacgttgcacgacgcccagctgctggcccgcgcattcgccacgtatttccatctggcaaacctgtccgaggagaactaccgtgtttccgtgctccacgagcgcgagaacaacgtgtccgttgaccaggcggtcgacccgatcaacgagctcaccgtcgcctaccaccagctcatcaatgagactggcccggccaaggccaaggaactgctcaaccagctcgaattccaccccgtcttcacggcgcaccccactgaggcccgtcgtaaggccgtggaaggcaagattcgccgcgtttccgaattgcttgaggagtacaagcgcctcggcggctcggataagaaggaatgcctgcgccgtctctacaacgagatcgacgccctgttccgcacttctccgatcgcgctgaagaagccgaccccggttgaggaagcggacacgattctcgacatcttcgacaacacgctgttcaacaccatccccaaggtctaccgtcgcttcgacgactgggtcctgggcgataaggccggtctcgtcgagcccgcttgccccgcgttcttccacccgggcagctggatcggctccgaccgcgacggtaacccgaacgtcaccgccaaggtgagccgcgccgtggcccgcaagttctccgatcacgtgatcgccgcccttgaggaagccacccgcaccgtgggccgcaacctcacgatggaagccgagaccacgccgccgagcgccgagctcaagagcctctggagccaccagaaggaaatgagcgagcgtctgaccgacaaggccgccctgatctccaccaaggagatgcaccgcgcggtcatgctggtgatggccgatcgtctgcactacaccatcgagcgcgatgccgacctcatgtaccactcctgcgacgacttcctcgccgacctcaaggtggtccagcgttcgctggccgccgccggcgccaagcgttccgcttacggcccgctgcaggatctgatctggcagaccgagaccttcggcttccacatggtggagatggagttccgtcagcactccgtggtgcacgcccgcgcccttgcggatatccgcgagcacggcctgcacggcgagcgcggcgaactgcagccgatgacgcacgaggtgctcgacaccttccgcgccctcggtgccatccagaagcgcaacggcctcaaggccgcccgccgctacatcatctccttcaccaagagcgcccagaacatcaaggatgtctacgagctcaaccgcttggccttctcccacccggaggacgtgcccaccatcgacgtgatcccgctgttcgagcagcttgaggatctgcagaactcggtggacgtgctcgaggaaatgatcaagatccccgaggttcaggctcgtctgaaggccaccggcaacaagctcgaggtcatgctcggttactccgactcctcgaaggacgccggcccgacctccgccacgctggccctgcactccgctcaggagcgcattgccaagtgggctgagtcgcacgacatcgatctgaccctgttccatggccgcggcggtgccgtcggtcgtggtggcggccccgccaaccgcgcggtgctcgcccagccggtcggttccgtcaagtgccgcttcaagctcaccgagcagggcgaggtcatcttcgcccgttacggcaacccggtgctggccatccgccacgtcgagtccgtggctgcggcgaccttgctgcagtccgcgccgagtgtggagaagcgcaacaccgagatgaccgagaagtatgccgacatggccgctcagctcgacgaggccgcgcacaaccgcttcctcgacctgttgaacaccgacggctttgccccatggttctcgatcgttacgccgctgaccgaaatcggcctgctgccgatcggctcccgcccggccaagcgtggcctcggcgccaagtcgctcgacgacctgcgcacgattccgtggatcttctcctgggctcaggcccgcatcaacctggccgcctggtacggtctcggcaccgcatgcgagaagttcggcgatctggagaccatgcgtcaggcttacgaggaatggccgctgttctccaccttcatcgacaacatcgagatgtccatcgccaagacggacgagcgcatcgccaggatgtaccttgccctcggcgaccgcgaggacctcaatgagaaggtgctcaacgagatggagctcacccgcaagtgggttctggccatcgtgggcgacaagtggccgctgcagcaccgtcacgtgctcggccaggccatccgcatccgctccccatacgtggacgcgctgtccgtcactcaggtgctggcgctcaagtcgctgcgcaagaaggtggacaaggaagagctctcgcaaagccagcaggcaggattcatctatctgatcctctgcaccgtttcaggtgttgctgccggcctgcagaacacaggctgatccgcgcctgaccgaccgcttgacgagcggggaggttccgtgccgataaacggcgcgggcctccccgttcgcgtcgcacggccctagactggccggcgacggcgcgcatagaacgggcgcgctggccgagtgacagactcggatgatcggaggggacatggacaagccatcgaatgagcgcgggagcaccgggccaacggacggcatcaaggcggagggcgacgccgggaacgaacgccacgcttgcaaagcgaatccggttatgatcgatggcattgggaagaaacacggcacagaagatatgtcagaaagtttttccggcgagaaatgtgctttggcaccgaaagcagataccaaattccctaaggcgagtagatgctatgtggctttgggcaaggccagacgcgtgctatggtggctgggattactgctgctttcaccagcacttattttgtgggcggaatggggcgccaatggcgatgatgatactataatctgcagagtcttaacgttctcttcctcttcgtgcatgaatttaactacggcaactgagtatgtacgtagacttaccttagtattgattatgggggtagtctgctggattgcggcgcttgtcatctttggcgtgcgttcatatatgcgatctgtatatccggaacttcgtgatcattcctcttccgcctcgcatgtccttgtgggaatcatatcgtttctcgtgctggttatggtctttcctgtttttgtgataacgctactttccgctctaatgactctatgacgttttaccagaggcgcattgcgtggaatggctgaatcattccacgcaatgcgatcacaatcatgattgattaacggttcggattttcaagagattcagcataggataatgccaatataccagcctccgcttgactcgggagtcggtctgcatgtgacgcaatgagcagtgcttttttacttccggatacgttatcgaatattccaagatcgattccatcaacgagctttcgaaatgcgatgaccaggttgtccgcacttcccttgaaccgggactgatagaaccgtttaattcgattcgtctcgctttgcgcgaacatgtcccgcatagcggtggacaatgacctttcggaggaattgctctgcatggaccgcgccagcaaccatgcatcgcagtccgcgagaacatcgctgtaactgaatcccatacgggcgtcttgctcgccgagatgagcgtgcagccatgacgccaggtcctctttcggggcattcgccaggtagcttccccaaatctgcagcaaatccagggcccatccgcccagatcaccgagaccatagtccattggatcgttcgtaacgccccatgtcaagtatcccagggacgtggcggccatatgggcgatgtcccgattgggcagcgtgcctttgatgacaggctgtgcatcacatgcgacaccgcatgcctgacgcgacaaggccaattcgctgggagtaaccggctcaggtgtgtacgcgtgccatagtgcctgcgtgccggaacttccttccgaccagtactcaggtttgcgaagccactgcaggatgagttgaccgatgctgtcctcataaaccgccacctgggtacccagagcggcaggggctttgtgacactcctgctcgggtgtcgccgccggcctgcagaacacgggctgatccgcggctgtccgaccgcttgacgaacggggaggttccgtgccgattgacggcgcgggcctccccgttcgcgtcgcacggccctagactggccggcgacggcgcgcacggaacgggcgcgcgggccgagcgacagactcggatgatcggagggggacatatggacgcggaaagggacacggacgggacgacggacgcgcacgagggggaccacacgcccgcggacggtgccgggacggagggcgaaggcggcaagccagacactaggccgggcgacaaactcgcgaccatccgacgcacgctgtggtggataggactggcgctacagctcccattcgctttgactctgatccattttgataccccttacctgatattggagcgtatcctatgcgctattccgccaagactggcaagcgacccgtcatcaatcgtcggcattcccgcacttgaaacggaatggtgccgagaattcctggcactagtcctgggcgcagtttgctgggttacagctgaagtaatgagattagttgcggacagcccatcaaaccatggaaaagaaacccttcctgtacgcatcttcgccggaatcatcaccatcatcgtattgatggccaccggtattacaggactcttcctcggcatagcggccttttagaagtttccccgtatctggcagaggaattccaaatcgaaagcacaacagcgaatgtgtgggcagacgacacatctgcccacacataatgcattatgcgagctaccgtcttggctgatcaatgaatgcagcgaacgcccgagcactcacttcagcttcctgcttatcaggaagcttgtctgtaccggcagccttttttaggatgctttcgctcattccaatatttgtcaaaccaagtgcatcaagaccgtccgccattgttgaatatgcactcaccacattatctgcgcttgatgcaaaacgttcgtcgtagaatcgaacgatacgatgggtctcactctgcttaagaaaaattgaagcaaaacacgcaaagccagcaggcaggattcatctacctcatcctgtgcactgtctccggcgtcgccgcgggcctgcagaacacaggctgatctacacaccagcgcatatgggggaagccccgctcacatcgagcggggcttccccgttttgtgtacatctttcaccatcttgcaataattcttacatgtaaacagagagttcttacatgaaagaattattgaaaggtgatgaaagaacttactttcacgcgcgccaatcatcccaacacgtatcgggatgacggcccattcccctcgcggcgcaacttgcccgcatcctctagcttcttcaacaaccggtatgcactgatatagctcaggccaaacaaatccatgacatccgccgtagtgacgacaccatcatttttttcggcgaactccagaacaaggccactgcgccgggtggcatcgatgtcacgctggcgcacgtaagacgccagcccctctgaacgtttgtacactcgggcactcagcatatacgaacgagagctcccgctaccgaccccctctaccaaaccagcttccaccagattctcaacagcggacacgatgcgtcgatgctccaaatgggagaaatcgcacaattggaccacggtaagcctacgatgctcacgcagcagcgagagcacaatcagtgaccagaccggcaacggagccccacgtcgacgttcctcgtcgccaatcatggtcacgaatgcctcgtcaggcaccacacggcggaggaacagaatgacttcttcggcaccggactgtgaataatccgggaaagaaccacccgccgcaatcgacccggcatagatggtatccacgcctcgtccggtgcgttcaacatatccggcagctttcagaatcagggcaagctgcggattgcgggaacgcggttgtgcagtaagcaggttatcttcggaaacaccctctatgaatcctccggggttggctatggtcaacccatcatcatcaaccaggaatctcaccgaacccattcgtgcataatcgcgatggcagaaagcgttaatcattgcctcacggaatgcccctcgatcgaagtctggcagatcgacccgaatcaagccgctcatgacttcgtggctgggattccacggctccatcagctcgcctacacgatcaaacatatccaccaaaggcaacacgaacggatccatattgacctttggagacatgcctttcatcacttgaaaaacagccgatgcggctggaaccgatcgatgaatagcatcaaccgaaccaatggtgagcagaccagcaacagatggctgcaatccatacgggccatcaacaaccagctcaagtgcccgatcgaaatcctcatcagtaaaagacaacaacgagttttgcgcattggcactgcgaatacggcttctcaacttgttccgtgagtctggattcaaatcgtccaaccgagcctctggtgcaggttgcgcgctgaaatcgtagaaccgttgctgagataaacggctaatgaattgggaaacaaacagcggaacgacctcaggcgagccgtctgctttcagccggcgctgcaatgtcttcccctgactggtagacacgatttgctgactgttatccacctcaatactgactatcggcacctcgttctcatacaagagcgccacgcgagcgggaagctgcggaacagtcttattgaaaattagtaccgcaagtccattgatattgcgatgctcgtcacatacgccggtcacagtgccatcgtcttcaataccgagatacagtgtgccgccttcggtattggctagagccactacggtgtcaacaatttcatcatgcgattgaggacgcttctgctcactcttgaactcaaccgtcaaactttctttggccggcaacatgagcatcccctttcaccatcttgcaataattcttacatgttaacagagagttcttacatgtaagaattattgcaagatggtgaaaggggtaaagagcaatccatcctgtcatctccagcaacttaaatccgatcatcgctgctttcggcatatctgatatcagccgctggtgccagtccaatcacccaattgaagctcaacacggccaaagactctacgccgcagtggattcgcgctcgatgagcttatagcccacattcacggtctgcgggaagaactcgtcgtccaggttctcgatacgccgcataagcaaggtcagcgcggtatccgccatgcccttgaaatcggtggccacggtggtcaaagtcggcacgctgtacatgctctggctcaggccgtcgaagccgataacgcgcacatcgcccggcacacttacgccatcgtccgccagaccacgcagaataccgagcgcaataccgtcgttcaggcagtacagaccgtcgtacttgcacttgcctttcttggccaagccgcgcccggcctcgataccgccgtcaatcgaccacgaggatttgatgaaatcacggcgctcgtcaaacggcagtccggccgcgagaatcgtctccttggcggcccgcatacgaatatcacgcgagccgggaatgatgttgggattgttgggatcgtgattgtcgccgacgatgccgatgcgcgcacagccacgcgcgataaggtgttcgattgccgcccgtgagccggcgtcgctcggcgcgttcacggtgtcgatgggcaggctggtgtcgtagttttccagcatgacggccgggtgccgcttcaggatatcgaccgcacgtggcgcattgatggcgatgatgccgtccgaaaacgtgtacgacagatcgttgtcgtcggtaagataccgggacagttcgatgagcatgtgcgagtcgcgcttgtgcacttcctcagccacgcacatggccagatgggagaaatagtcgccctcgaggcccgaggtaaggaaggtgatggtatcggaccgcccagaacgcagggaccggccagacaggttgattttgtagccgagtttgcgggcggcgtcacacacgcgttgcgtggtttcgggcttgacgtaatccttgcctcgcagggccgcggaggcggtggtggcggtcactccggccagttcgccgacatcctttaaggtcaccatcgttaccatctccgcatatcacgaaccttatcgataagaatccatagtaccgcccacatctcagccgaggatgagaccctcggtcgaggccctgcccggcgactcgaacgccgcggtcaccgtggtgagcaccgacgctgcaaacgaaaacatgtcaaaccaagaaatggacatgacggagtcattgttttccgagagggatatgccgcgtccacgggcagacgtcacgtatcaatcacgccgataccgtcatataactgttttcgatgtgagaaagctcatagcttccgaccacagaaaccagccacagcaaccccataacagcgttatagttctgtttgtcggcgtcgacaagagccagcagcgccgatgaaatgcacaccaaggatgtttagcgaattgttcgcagttcgcacgattcggtttgattcgattcgtgcagcccggatggttcacgggggcatgccgtcgtgatgtgcgtggatatgggcgatgcgactctcgttcgggtcggcaggtcatcgtacaccagttacgaaaggatccgtccatatatggcaaggtttaccgagaatcgttggaccagcgcgattattcccgcactgctgattcatatcccaatcggtaccgtctattgctggagcgtgttcaagcagcttatcgctgaccgtctccacgccagccccgcctccgtggaatggggcttctcactcgccatcttcttcctcggcatgtccgccgcgtttgccgggccaatggtggagaaaaacatcaagaaatccgcactcgtctccatggtctgcttcgtggtcggcttcgccggcacgggcgtgagcatcgccctgaacttcctgccgggcgtgttcatctgttatggcgcgatcatgggcatcggcctgggcgtcggttatctgactccggtcaagaacctgatgctttggttcgccgacaacaagggcctcgccaccggcatcgccgtcgccggcttcggcctggccaaggccattgccagcccactgatggaatatctcatcggcacggttggcctggtcagcatgttcttcatcctcgccgcggtctacgcggtgatgatgttcgtcggcttcctgctcatcaagcgtccggccggctgggtgtacgatcccgcgacctcacacgtcagccgcaagacaatcctcaagaagcccgtgttctggggcatctggatagccttctatatcaacatcacctgcggcctggccctcatcagccaagagaaggatatcctgcacgatgtgctcagggccttcccgcagtatgccaacctgagccccgccaagtttgccgccgccatctccggcatcatcggactggtgctcgccgtggactccgtgttcaacacggctggccgcgtgggcttctccacactctccgaccacctgaagcgccgcgagaccgtctatcaggtaatcttcatcatgtcgattgccgtgtgcttgctgcagatcttcaccaacagcatcgacaacgctctgctgtgggccgtgctggccatgctgttcctcgtcaacgcgggctatggtggcggtttctcgacgctgcccgtgctgcttgatcagcacttcggcaccaaaaccgtctccaccacgcacggtctgacgctgagcgcctgggcgttcgccggtctgtccggcaaccagttggcctcgttcgtagttgcccacgcgcctgatcaggcccaccgctacgccgcgctgattccggtaatcaccggcctgttcgttgtggccctgatcagcatcagcctggtcaagtacctcggcgacagaaacgccacgaaggccgtcgaagaccgaggctgagctgccgcaaaacaacgattctgccggagtcgggcgcatcgatcgcatcaatcgatgtacgtcacgattttggcagaatcgttgttgttgttgagtacctgaggtcgtgcggcttacgcgccgaccagttcgagcatttgggggatgctctttttgccgaattcgacttgctgggtgccgtcggcgtgggtgatgacgatgcagggcacgctcatcgcgccgtactggtccttgagttcggggaagtgcgagacgtcgtaggcttcggcgcgcacggccgggctcagggaggcaatgcgctgggaagcaagcacggtttccgggcacatcgtgcaggtgagcgagacgaggatcatgatgttcagcgggtccgtgatggacttcgcgcgttcgaccaggtcatcgcccagcggctggccgggaccggccgcgttgtacaggccgagcacgaacgagttgaactcgtggccggaaggtacgccgtggaaggccagaccggtgaagaccagtgaaccattgccgtccttgccggccttgccgtcgccctcagccggcacgcagatgcgcacggtcggacgggcgagcggcaggacgccggcgacgtcgaacgtggcacggccggaatcgtccaacgaaccataagtgggcagttcggcaccgtccggcaaggtgacggacagcggttcgccgaccaccaaagaagtaggcacagaagcaccatccaccgccgtgatcagccctgcggcatcgacggcgaccgagttcagcttgccattcgacaacgcgaccatctcgccgatgaagccctgcaattccgccgaaagcggagtgccgtccagctcgagagcgagcgtgaccgggcgggtcatgcggccgaagaccacgccaagctgctgcttgatggcggcggagaacagttcgccgggcttcttggcggcgctggctgcggctgcggcatcggcgctgcgtttggcgggagccggggcgggcgtcgtgccagcggccgagtcggcggaggcggccttggcctcggactcctcataagcggaagcagtgggacgcggcggcaccaagccggttttctcgctcatctgcttggcgtaacgctccagttccacggcggcaatcgcaccgtcggcggtggcggtgaccacttggcgcaggttcttgacgcgcagatcgccggccgcgtacacgcccggcaccgaggttctgaggtagtcgtgcgtgaccacgtaaccgtggtcgtcgagctccaccacgccgcgcaccaaatcggtggcgggcacatagccggcgaacacgaagacgccgaaggtgccggcgtcggcgggcttccacgtttcggtctggccggtggcaaggttcaggatcgaggcttctcgcaggcctccttggccggcggtgacgcccttcagctcgacctgataacgcacgtcgatcttcgggttgttcttggcttcggcggccactgcggcatcgcaggtgaagtccggttcgcgcacgagcacggtgactttggaggcgtatttggtcaggaacacggattcctcggctgcggcgaatccgccgccgaccaccagtacttccttgccggtgaagaactcgccgtcgcaggtggcgcagtaggccacgccgcggccggcgtactcggcctcgccctcgaagcccagcttgcgcgggctggcgccggtggcgatgaggatgccgaaggtcttgaggtcgccgcgtgaggtgtgcacggttttgatgtcaccatccacgtcgagaccggtggcttcggcggagaggaattcggcaccgaagtcctgagcctgctggcgcatggtctgggtgagtgcgcggcccgtggtacggcccacgcccggatagttgacgacttcgttagtgatggtgatctggccgccgaaatcgtccttttcgagaatcagcacgcggtagcgagcgcgggccaggtacaggccggccgtcaggccagccggcccgccaccaatgacgacgacgtcatagagattgttggtctgagtcatgaaaactcccttacatacactggctcccctctctgaggggagctgtcgtagtgagactgagggaagcatatcggatcaggctagctctcgcgagcactccccccagtcgctttcagcgacagctcccctcagagaggggagccaaggttaccgcctattcagtgtcgatcacagctggccgacgaggtcgaggctgggctcgatggtttcctcgccaggggtccagttggcggggcagacctggtcgccgtgctcgtagacgaactgggaggcctgcacgcggcgcagcagctcctcggcgttgcggcccacgttggaggagatgacctcgtaggccacgaccttgccctcggggctcacgatgaagtcgccgcgctcggccacgccatcggcctcgttgtaggtgtcgagatccttggccagcagggcggtcgggtcggcaagcatcgggtactcgatcttggcgatcttctcgttggcgtcgtgccaagccttgtgcacgaagtgggtgtcgcaggagacggagtagatctcgcagccaatttccttgaacttggcgtagttcttggccaggtcttcaagctcggtggggcacacgaaggtgaagtcggccgggtagaagaagaacagggaccagtggccgagcacatcgtccttggtcacctcacggaactcgttgttctggaatgcgttcaccttgaaatcggtcagttcatgctgcagaagagtcatcatcggtcctttcgggaattgttaatcttcaagcgtttaccgccacctatcgtagtgtggcggcacagggctcgcacggacagaacatatgagccttatcacaccagccacagcccttgtgctgactatcatcacggcccacccttaaacaggattgagattgtgagcgttctcattatgctttgggcaaagccagattatgcatgcagtcgcgaatccgcacttccaatcgctactatgggtaccagcagtccgctgataatggaggttttcatggctcaggcagacgttgaacaggaatcaaccgcaaatgcgacgtggagccgtatgctccaaggcaatcgccgattcgccgaaggcaagcccgaccatccatggcaggatcaggagacccgccagacgctgcttgatggccagaacccggatgccgcggtgctctcctgctcggactcgcgcgtacctccggaaatcatttttgatcagggcctgggcgacctgttcaccgtgcgcaccgccgggcaactcatcgatagcgcggttatcgcctcgctggagtacgcggtcaagaaactgcacgtcagcctgatctgtgtgctcggtcacgagcactgcggcgcaatcgaggccgccgagcaggagctggacgacctgatgcacaccatcacttccgaagccgacggctcactggaggccgcggatgcgatggacgacctcgacgagcacatcgccgccgccgaatcgattattctgcgccaggccggcatgtccgtctggcaggcgcgcgaagccgagctcgacgcgcatgaagacatcgagcgcgtacacgtggcccacaccatcgagacgctggtggaacaatcccccatcattcagcaggcattggctgccgaccagctgatgatcgtcggcgcccgttaccagctcgacaccggcaaggtcgaggtgctgagtttctgaccatcagtcagaccccgttcaccgggggtaatgcggtcgtggtacatctgtgtgcagagagatcgaagaacacggaagtctgaaccaatgccacctgctcttactattcactacggatccgccacctatacccccaatcctgcacgtgccacgaccatcgggcgtgcgccggattgcgatctggtgattcacaacccgtacgtatctcaccatcatgctcgcgtcacctttaccgacgatggttggctcttggaagacacgggtagtgcaaacggactgtccatcaacggcattcacaccacttccgtactgctgctgaacagcaccaaagtgacgctggcacaaggtgccaccatcgtctgcatcgtcggaaccagcgggccgtccacgccggcacagcccccgcgacgccctgcggcaaacgtggcccagcctgcgctaccgccggcaccatcagcgcaaccggcacaacccacgcaactcgcgccgcaacaggcacgcccagtagtgcaacccacaccaccagcaccgcaaccggcacaaccggtacaaccgcaaccaacgccagccccgctggccccgcaccgcgtatccccggccctcgcgcacctgcaacagcaaccccgcccaacagcagtggcaccgacggcagtatcgccagtgccggtatcacccgcgtcaccatctccgtctccctgcgcatccccttccccatcgaatgccgccggcaccgttctggcaggcagcacgcaagcggtaaggctcgaatcccaactcaccaccaaccgcgtgcacgggtccttcagccccgagcacgacaccacaggcgtcatcggccgcgataccgcctgcctgattcgcatcaacgattatctggtctcccgcaaacactgctcgctggaaaccaccagcagcggcatcctgctcactgacctgaactccgccaacggcacttacgtcaacggccgccgcgtcgcgaagatctggctgcgggaagacgacgtcgtcaccgtcggcaacaccgacctgatcgtgcatgaaggcgtgctgtgcgaccgcacgccgtttgtcagcaacgacgcggttatcgccgaaaacatcggactgaccgtgggcaaaggcacccggctgcttgacggcatcaacgccgtattcgccaagggcacgctcaccgccgtaatcggaccttccggcgccggcaaatcaacattcacctccatcgtcgccgggctcaacagccccacggacgggcgcgtgctgtttgatggatacgacgtgcatcagaacatcgaactgttgcgcagccgtatcggattcgtgccgcaggacgacgtggtgcaccgcaagctctctgtggacgcggcgctcgaatacgccgccaagctgcgcctgcccggctcaaccaaggccgagcgcgccgaaatcatcgacaacgtgctcaatgagctggaactcacgtctcgccgtaagaatcgcattgacagactgtccggcggccaacgcaagcgcgtgtccaccgctatcgagctactcaccgaacccgaactgctgattctcgacgaaccgacctcgggcctcgacccggcgctggatcttacggtgatgaccatgttgcgccaactggcggatgccggccgcgtggttatcgtggtcacccattcactgtcgtatatcaacaagttgtgcgataacgtgctcatgctcgctcccggcggccatccggcattcttcggcaccgtgcaggagatgagccaggcgttcaacggcaaggaatgggccgacatcttcaacgatgtcgccgaatctccggaacgggtgtattcgattactgattcacgccagcgcaccatgcaggccgagtccaccatcacgcggcacaccgagcatgagaaaccggcaaagccattccgcatcaaacagaccatcactctggtgattcgtcagctgcatttgatcatcgccgaccccggattgctgatcttcctgctgttgctgccattgctcctaggactgctgtcgctggttgtgcccggttctcatggcttgggtgagcccgatttcaaagacgccgccaccgagccgaaccagctgcttgtgctcgtcatactgggtgcctgttttatgggatcggctttgtccgtgcgagacatcgtctccgagcgagcgatttacggccgcgagcgcgcggtgggtttgtcgcccacgtcatacaccgcctcgaaactcatcgtgatgggtttgcagaccttgttgcaggcggcgattctgaccactgcggtcagcctcggcaagcccggcccggaccatggtgtggtcactgattccggcatactcgaactggtgttggcgatttggctggctgcgtggacttccgcattgttgggcgaagtcggctcggcgttggtgaagtcgggagaacagacgatgccattgctggtggtgctggtcatggcccagttggtgttctccggcggcatgattccggtcaccggccgcgacagcctcgagctggtcagcatgatcttccccggacgttggggcttctccgccgccgcctcggatatcgggctcaacgatctgctgtatggccccaccaaggtgccgatgttcaaaaaggatgatctgtgggagcacaccacggatcagttctggttcaacattggcattctggggattatggtagtcgtcttcaccattgtgctgcgtatttgcgtcagcaatgccgtggccaagatgcgtcggcgctcatagaactggatcgaaactagcccgcaaccggcttacttcattcattaggtcaattatgcgttcatttggtcactgcactccaacactgaccattgaaatgccgccattccaacgcctcaccatgccgacaacccaccaaatgaacgcgcaacctaccaaatgaatgaacccagccctatatttggtgctacaacgactgcaaatactgccccaaatgcggcaccgcaaattccagctgcccatgacctgccgggcggatgagtttgtccttgataagaaccgcccggtacttgctcacccagcttcgacttctgcgcgtacgatccgcaatatcacccacctgcgtgggatttggcgaatccttggccatagccgcgagaaacagcctctctgcactagtaatgccgtccagcgctggagcgcatacggcatcgtcgaaggcgagcagcgcatcggaaacaccggtcgacacgtcgtccgcggtaatgacatctgaacctcgacgctgcgcagattgccacatgtagtagccaacaagctgcaccatgtacgggtatccttcagactggcgagcggcttcaagcgcatcttccccactgatggtcttgccggaatccgcaactgtttccaggaacgcattcttgacgtctggaagcggcacgttatccaattcgcggcgtagcgcacggcgcaggaatgtggttacctcgttatccagcaaatcgttgaccatatacggcaagccggcaaatacgatggcaacgcccttcttatcctcatcaggcgtatcactttcatcggcatccgtaatgacgtgctgcacggctgtagcaatggcaaccaaatcatcgtgtgaggccgcttgcgtctcatcgatggtgatgagaatgcccttccctttgccgagtttcttactgcccagccgcttgttcaacgcgttgcgcaacgtcagcggattggattccgcggaaaagtgcgcttgcccgagactcgccgtggcaatgccggaaattccaatggaaggactgatattggcctgatccagacgcaatcccgaaggcgataatgccgctatgagtctcgtgaccagtcctgcggacgccgtctctccaatgacttcccaatgctgcgctttggcgatgcgccgaaattcggtgagcataaccgtctttccgaagccgcgctgcccggtgaccagcatgatgcgcccaggagcccctaccccgttggtcagcgcctcggaaaaatcttcgataatggagtgccggccaataagaatcggcggcattttaccggcggttggtttgaagggattgactgccatgaccacactcctgtccacaacacataccatctgccacgattgcgtaccatattacacgattgcgtaccaaattacacgaaattacaccatatgacacgattgcgtatcattgcgtactctttcacaccatcacacacgtcaacacacatcacgcctcacatagccagcgcagctagcaaaccctgcccagccagcacaccccaatttgacgtgccactcccctagagttaaaggcatgtcacttggtttgaacatcctcctgatttttgtatttctcgttatcggttccgtgttctccggcaccgagttggcattggtctctctgcgcggctcgcagatcgagcaaatggagcaggaggacgctcgcggcgccaaagtcgccaaaatcgcacgtgacccgaacaccttcctctccaccgtgcagatcggcgtgacgctctccggcttcctgtccgcctcgttcggcgcctcttccatcgccccctacctgattccggtggtcgaaagctggggtgtgcaccccggcatcgccggcggcctggtgaacatcatcctgaccctcatcatctcctactgctccatcgtgatctccgagatggtgcccaagcgcatcgccatgcagcgcaccgagcagatcgcgcgcgccgtggtgcccgccatcgacgccttcgccgccgtctgccgcccgatcatctggctcatcggcaagaacacgaacggcatcgtccgcctgctcggcttcgacccgcagcagaccgagtccgaggtgtccgacgacgagctgcgcgtgctggtcagctccaacaccaacctttccaaggacgaacgcacgattctggacgatgtgttcgacgcgtccgaaaccatcgtcgccgaggtgatgcgcccgcgtgccgacgtggtcttcatcgagggcgaccagcccttggccgaggccgccgcgttcgtacgcgaccagccgtactcccgttacccggtgaccggcaaggatttcgacgacgtgatcggcttcgtgcatgtgcgcgatctgctagacgtgcgcgatccgaacgccaagatcgtgcgcgatgtggtgcgcgaaggcatctccctgcccggcacctccaagctgctgccgagcctggaactgctgcgtaagcgcggcatccatctggccgtggtcatcgacgagtacggaggcacggacggcatcgtgacgcttgaggatatgaccgaggagcttgtgggcgatattcgcgatgagtacgatctgcccagcgagaagggcggcgaacgcaccacccgcaccgcgttcgtcaatggtgtggccacgatcgaggccagcatgaccattgaggacttcgccgatctgaccggcatcgaattggaggacggcccgtacgagacggtcgccggctacttcctgtccaagaccggcaagatgggtgcggtgggcgacgtgctgcattccgacgacggctacaacatggtcatcaccaaggtggatggccgccgcatcgaaaccatcgaagtccgcaaagccggtgccaccgatgcatcctcgcagccggatactgtgacgggttccgatgccgcctaggcttcttcccagtatcccgcgtcattaattcgttgattacggctctccaacaaaaggggccggccagcgaagtgttcccaacagaaatttcgttaacccttagaaacgtgcaattcacccaccgtgcgaaaccttagaaacgtgcaatcttgtactatacttaacccttagaaacgtgcaatcataagggaggagccatgtttcggcgcaaggcttacgacaagctagtcgaatggaagcggtcaagcggaggtcacaccgccatgttgatcgagggggcccgccgcgtgggcaaatccaccattgccgaggagttcgcgcgcaacgaatacaattcgtacgctctcgtggacttcaccaaggtgggagacgagtttcgtcgaacgctgctcgacacaaggggggaccttgactccttcttcctgtacctaagcgccatgttgggcgtgaccctgaccgaacgtaagtccctagtcatcttcgacgaagtgcagctgttcccgccagcccgcgagttcatcaagcacttggtcgccgacggccggtacgacttcatcgagacgggatccctaatctcccttaacgaaaacgtgaagggcatactgattccctccgaggaagagtccatgaaaatgggtcctctggatttcgaggagtttctgtgggccatgggcgaagaggcgctggctcagatgatcacgaactcgtttgcatcggggagccccttgccggactcgctgcaccgcaaggcgtcgcgcctatggcgcgaatacgtgctggtgggaggcatgccacagtcggtcacggcctacgccccgaatagggacatggcggccgccgacagggccaagcgcatggtcctcaagatctaccgcgaggatatcgagaaatacggcggcacggcggctaaacgaatccgagcagtgttcgacgcaattcccggtcagctgtcgaagcacgagaagcgcttggtgtacacgcaagtcgagaacggctcgagatcgcgtgatttcatgacggccttctcttggatgcgcgaagcggcgacggtcaacctatgcaccctcgccgaggacccgtcaattggtctggcgctcagcgccgacgacgcaacagtgaaatgctacatggctgacaccggactgttgtctaccatggcattctccgcctcgggctccgccttgccagaagtgtaccggcaagtgttgctgggagcggacggcgtgaacgagggcatgctcgcggaaaacgccgtcgctcagcagctcaccgcatccgggcacgacctgtatttctactcaaaatcctcgagcatccgcgaggagcgcatggagattgacttcctgatcatccgaccttacccggacgcagccatgaaacccagagtcagccctgtagaggtcaaatccggcaaacgctattccacggtgtccctagacaagttccacgcgaaattcacacaacgagccggcgaagaatacgtgctgcacccccgccagatgagtcaggatggcatacgccgcttcctgcccctgtacatgtcattctgcctgtgaatctcgttttccaacgattccacagaacatgaatgaactgcagaatcccctttcctttaccggtgggtgcagtttgcgcaacagctctcaaccgagcacaaatgccaataaggcgcgacatcattggcgacacgccaaacgcgccatctttccgatcaaagacccgatgaccagttggcggccttccacagcgcggtcagccgtcggacaagggcgcgtagactgggagggacgttccttgaagatgaaaggaaggaacatcatgacacttgcatttgttgctgaatatttgacttgctgagcacgttggttattccagttcggcaccattgccgtttcacgggatcattgtggtttagcaccaaagttattgtggttcggcgccgtttgggttagtctcctttcaccatgtgatggacgcatggcgaaaggagtgccaacgatggtacgcagaatcaaggcgaagctcgtgctcaggcttcgtgagcaaggattgtcgcgcaacgcgatagccgtgggctacggtatgtcgaagcatagcgtgatcgacgtgttcgacgccgccgaccggcttaacgtctcctacgatggtgtggaggacaaaaccgatgacgaggtgtacgccctgctgtttcccggcaggggtgtgatcgagagcgcctacgagcagcccgactgggcgcgcgtgcacagcgaattggggcgcgtgggcgtcacgttgaagctgctgcacgcggagtacgcggactcgtgccgggtgaggggttccgttcatgggctacgaccggttctgcaagctgtacgccgattacgtgctgcgtctgggcgtcacctcgagggtggagcgcaaggccgggcgtacggtcgaggtcgactgggccggggcgaccatgccgatccatgacacggtcaccggagagacgtcgaaggcgtacctgttcgtcgggtgcctgccgttcagccgttactcgttcgtgcgcgcgaccggcgacatgcgcgaatcctcgtggctggactgccatgtgtgcatgttcgactatttcggcgcggtgccggtcaggatcgtgtgcgacaacctcaagaccggtgtcgtgagccatccccgcgatggcgagatcgtgccggacgaccattaccgcaacctcgccgaacactattccacggcggtgctgccgggcagggtgaaacggccgaaggacaagcccagcggcgagaacctcgtcctgcacgccgaacgggccgtcgtcggcgcgatgcgcgaccgggaattccattcgctcgacgaactgaaccgggcgatccgcgactggctcgacgcgtacaacgccgcgcctttccagaaacgcgagggcagccgcctggcggtgttcgagtccgaggagcgacccatgatgatcccgctgcccgtcgtgccgtacgagaccggcgattgggccggcacgaggaaagtcgccaacgactgccatatcgtttacaggcggaaccggtattccgtaccccaccggctgatcggcacccgggtcgagcttcgcgagaccgcccgcacgctcgagatctggcacgatggccagcgggtcgccgtgcatcggctgttcgatgccgttcagtcgaaccgttcctccacgcgcgacgtggacctgccgaaaaaggcgaactggcgggaatgggacgagccccgggtcagggcatgggcgtcgggcgtcggcccgaacgcggtcatcgtcatatcccgcatcttcgaatcatatgccaggccggaccaggccatcgaccccgctctggcggtgctgaggctgtcgcgccgctacgggcggcaacgactggagaacgcgtgcgacgtggcccgcagggtcgtgaacacgccccgccaccggcaattgaagacgatcctcgacaccggccaggaccacgaggtcatggaaggcgaggacccgaaagtcaagggtctcgacatcgaaccgcccgcgggatacgtgcgcggcgccgactacaacgcgagggagacgaagcgatgaggctcgacgaacaaaaacccgccaccagctgcgcgacatgggatgccaggagcttctcgacgcgctcctgcatcaggacgacgacgcatgcgcgcccctgaacgcggaacaacgtataaaactcgcggtcgacgaggcgcacgccgcgttcacggacaaacgcatcggcggactggccagaagggcgaggctgcgctacccgcaggccgacctgcgcaccctcgacctgctcgacgaacgcggcatcagccgcgaactgatcgcctcgctctcagactgctcatgggtcacgcgacaccgcaacatcgtcgcccagggctactgcgggtccggcaagagctggatcgtctgcgccctggcgcgtcaggcgtgccgcaaccggtaccgttcccgctacatccgcgtccccgacctcgaggaggaatggcgtcaggccgccgacaagccccaaggacggtccagactgctcaaacgctacagcgcgtacacggtcctcgcgcccggtcgaatggctgttcgacccgcccgaggaacgcttccgcggcttcctgttcgagctcatggaacgccgacacgacaccggcagcaccctgttcgccacccaatacccccaaaaggactggcaccaacgactcggaggcggcacccacgccgacgccatcatggaccggatcgtgcacaacaccacctggatagaaaccggcgactacaacatgagggaacacgcacccggccggtagccgccaaccagtctcgcaaacaggaacggcaccggcagtgcccaataccaagcacgccggtgccatcccacaataaccccagtgccgaatcggaataacatccggtgctcaaacctcccaataatcagttgcgccgggactcgatgaggcgaccagcgagaaggccatcgcgattctgcagaaccgactgagctaggagcaggaggccgcgctggtcctgaagcatacacactggaatgtgaccggaccgaacttcatcgccgtgcacaagatgctcgatcctgaggtcgaatccgtgctggctcaggcggatgagaccgccgagcgtatcgccacgctgggcggcacgccggacggccgtaccgacgcaatcatgcgcaaccgcacgcggaagccgttcgacgtcgaaggccgcgccggcaccgaggagtatctcaaggcgctgatcgagtactatgacgccttcatcgccgacgaccgcaaggccatcgccgagctggacgagctggatgtgatcagctccaacatcatccaggaccacgtgcaggaactcgaaaagttccagtggttcatgcgctctcacctggcataagtaaaagcagtattccgtggctcccctcaaagaggggagccactttcgtctcacgtgaaatagagagtctccacatacataagttggaaaagtgtataaaactccccattttgaggttggaaaacgtagccaaaaccgcattcttatggttggaaaagtgtaaaatatgcgctataaacagttggaaaacgtgcccaacatagatgcaaggcctacaaatgactggagattctcatgctgcgaagaaaaatcgagacacagctggaagcttggagatccgcgccgaaacgcactgcactgctggtcaccggagcccgtcagattggcaaaacctatatcatcaggcactttgcccaacagcattacgaccatatcgccgagctcaatttcatcgagaaccccgacctcgttgcattattcgatcggccccgcgatgccaaaaacctactgatgaggctggaactggccgtaaatacgccattagtacccggcaaaaccctgattttctttgacgaggtccagcgttgcaaggaaatggtcaccgcaattaagttccttgtagatgatggtcggttcgattacgcgctttccggctcgctacttggagtcgagctcgaagatatacgctcggtaccggtcgggtacctgaccgagctggatatgtatccactggatttccaagagttctgctggtcgcagcatatcggcaacgacgtattcgatatgcttgccgaatgctttgccaagcaccaggaagtggatgagttcattcatcaaaggctcatggagctatactccaaatatctggtcatcggcggcatgcctgccgcagtcgactcgttcgtggcaaacggcagcgttgcggacgtgcgcactatacaagagaacataaagcgtgaatatcgccgcgatatcagccaatacgcgcgcaaagaagaccggctgcatatccgcgctatctacgatttggtgcccagcgagttaaataacccaaacaagcgctttaccttcgccaaaatcgaaaagaacatgagattccaatcggttgcttccgatttcgattggctggtcaatgcggatgtagccgtcgccgcgtacaacgtggacgaaccgtgcacaccgttggagatgagcaaggaacgtaacctcttcaaactcttttacaacgacgtgggtctgcttaccggctcgtttctcaagaaaaccgcgctcgacgtactcgacggcaaccctgatatcaactacggttcaatctatgaaaatgcggtggcccaagagctacgcgctcacggatttgacctgtactactacaacagtaagaagcttggcgagctcgatttcctcatccaagaccgcaacgatcacgtgctgccgattgaggtgaagtccggcaaatcctacaaacgccatcgcgcaatggacaacgtgctcgcccaccctgaataccatctcaatacaggctatgtgcttggcccgtgcaacgtctcagtcgaagggaatgtaacctacctgcctgtatacatggccggcatgttccataacgaatgacgggccgcacacttagtcaacaagtacatgtcggtcagatggttcggactggtcagagggcccgctctgatcagttaggtcggtctgaacggactggctgggctggtcggcctgagtagcccgtttggaccgatccggttcgcccttgctggccttcacactgcttcagctccagctgaagttcgctgatgcgccgttcgagttcgtcgatgcgccgtacttgtggcgaagtgagactgaggggagccgagagatggctcacaggccgagggcaccggccacggccatggcctcgtgttcgggatcggcctggccgatgtgtacgttgacgtgaatttcgccatcgcccggctcttcgagaatgtcggactgggattgcagcatgctcggcttcatgaagtggccttggcggtgggaaaggcgttccatcacctcgtcgaatgtgccctgcatgtagacgaacaccacgccttgacggcgcagcttgtcgcggtagatcttcttcaacgccgagcaggtgaccacggcgggctcgccggtggccacgcgctcgtcgatccacgcggcgatggtgtcgagccaaggccagcggtcttcgtcggtgagcgggtgtccggcggccatcaagatggtggcgcattcggaccatgcgaacgaatccgatcaggccatcagccacatcgccggcactgaagcctgacccgtcatcgtcacagcaccacgcggcggttgaggtcgcgacgcagcgtcttccagccgggtaggtaggcggtcatgcggcgttggaatccggcgccatggccgctttcccacagatgcgtcatctcatggaccaagacgtattccaggaattgcggttccatcaatcccaattgaaggttcatgcggatgcggccggttcgcggcgtgcatgatccccagcgcgaggccatgacccgtagcgtgatatgtgtgggctgccggccgatgaccggcccccacttggccagcagctgtggcaacgcggcgttgatcgcggccgccgcttgtcgtttgcgttcgtcggtccagatttgggagcggtcaaaatacggctggacgttcgtaccggcttggcccggcccggcgtcgccgattctcggacgactgatatcaccggttttcggacggccggcaacgtctccatcatggccgctggcaccagctacgccacgacctccgttctcgaagcctgcaccctcgttcaatgccatgatggagcgccgttgcgcctcagccatgcgctgctgctgggcgagaatccacgaatgtcgctctttgacgaaatccgcgatacgactctcgctcatccgcatcggtgcggagatttcgacgcggccgctcggcggtttgatgcgcaaatacaggtttttgatgggtttgcgcgtcaggtgcagatggatgccgtcaatgtccaacgactgcccggcggcagcggaccgaacggatttcggcgcaccagacttcggagcggtggattgacgacggcgataaggcatgcaagtcattcttgcacaacggcggacaacaagcggcacacaatgccgcccctcacgaatcggcaaccggcgctgctacattcaatccgcataccaactgcccacaccggagaaggtcgcgcaggagaaggcctcgctgctcgagatcgacgacagcttccagaagatcgtcatcgtacgcgacgtggtcaaacccgtccgcgacgaacacggcatcctcacgatgagcgtctacgatttcctcctcgacccggacagactgacgatgtgacgccggacggccggcaaatgccccggaacgcagacccccccccactcctcgaacaccgccttcgcggtggccgaggacaccatgacgagacagccgagcatgatggcacccagcagagggtgccgaagttcgcgatgacgtaccgccacaggtccgacccgtccgtgtagccgtcgaagcgcagcgcctcgacggggacgagaaatccgtcaagcgcatgcgcggcgtcagatacaccgtcctgaagaaccccggcaagctgaccgacagacggtccgaggcgtccgggaacctgcgggacacggaccccaagggccggccctaccgttcatgacggctcagggaacccctccggacgatgcccaaacgaccggccg

SEQ ID NO: 22 - DNA, 34478 bp, Unknown
  R30_18m  MAG No. k141_6439
cggccggtcgtttgggcatcgtccggaggggttccctgagccgtcatgaacggtagggccggcccttggggtccgtgtcccgcaggttcccggacgcctcggaccgtctgtcggtcagcttgccggggttcttcaggacggcgtatctgacgccgcgcatgcgcttgacggatttctcgtccccgtcgcggcgcgcctggttccacgggtgtctcctgactttgtcgggcgcgtcgctcatccaactgacgatgtggaacccgtcgggcgcgcgttcggcgttcgggcaccactcatgtacgcatgagtcgatccaccgggccccgtccccggcgacgaccctgatggaggcgcgctgttcgggcgtcaacgtttggaagaacaggccgaacacgtccctgccgtacccgtcgtgcgcccatatcgcccgatgccgttcgtggtcgacgaccacggtgatgcacgtgtggcctttgcggtagccggtctcgtccacgccgatcgacgtgaggccgccgaacggagacggcatcgacgctttcaaccgttcggcgaccctatgggcggcgtcttccggcggcgcgccacgcgacgtgcggaaaaccgcttacggtcttctggttcgcgacgctcatcggccacgcgcgttccgattcgaaatcgcgtgtggaccggctgcccggctcggcccacggcacggaagcgaccacgacgccgcacgccgccgccctggtcatgcccgcggcgcctccttccgcatcgggagcatcggagcatacccgcacgtggacgcacccggatctcgagcacgggttcggaacgcggcggcgaatccgtgatccgcgcatcctctgcaaccgtgcctttgacgttcggcaatccggtgaatgggcttttgcccaggcgttcttcgtgattcatttctttggtcggaaaacagaatacgcgggaacgcccctcacgcttacgaaaccaacggctcgacgacgaaccgacatccacgaaaacagcaatagcgccatattttgcaatatggaagattcagggccttgaaatgacgaaccattacaatgagcggcgaacatacatcacacggcgtaggaaacgccaaggagggcatcatggccgagatcacatggaagtcgattctcaccaagctggtcgggggagaccaccttactgctgaggaatcggagtggttcgtggacgacctgatgcaaggtaacgccaatccggccgccgtgggtgccgcgctcgctatgcagcagcagctgggactgaccgccgacgaggtgcgtggtgccgccaaggccatggtctcccacgccgtgccgctgaacgtttccggtgggaccaccgacatcgtgggcaccggtggtgacggcttcgccaccgtgaacctgtccaccatgggctccgtggccgccgctgcagccggcgtgaagatcgtcaagcacggcaaccgcgctgcatcctcgaagtgcggtgccgccgatgtgctcgaagacctcggcctgccgctggatttgaagccggaggccgtcggcgaagtgggcgacgaggtgggcatcaccttcgcgttcgcccgcaccttccacccggccatgcgcttcgtgggcccgattcgtgccgcgctcggcattccgtgcgtcttcaacatcctgggaccgttgaccaaccccgccaacccggcacacgtggccatcggctgcgccaaccgcaaggtgagcccgatcatggctgccgtctacgccagccgtggtcagtccggcttggtctacacttcgcatgagggcatggatgagctcgcccccaccggcccggtttccgtctgggagattcgcgacggcaaggtcaccgaaaccgagttcgacccgaccgtggatctgggtctcgccaagattaccgtcgaccagctcaagggcggcgtgccggacgtcaacgccaacgcatttaaggacttcctggccggcaaggacattacgtcccgcaccaccgcgctgctcaacgctgcctccgccatcgtggctgacggcaatctggtcggcaacggcacactggccgagcgcttcgccgaggcctacaagctggccgaggatgctgtcgactccggcaaggctgaagccctgttcaacaagtggatcgaaaccgcccagtccaagcgttagacccgcgcgccgtcgtcgtaatagccaccctgatcaccggggcggtctttgcggttgaggattttggccaccaatccgcccagacccaaaatgacgcccagcccgaagagaatattgagcagcgcgcctaagagaggaatcgcgttcaagccgggaacgaatatcatcaccgtttcgcctgcgagaccgatgatgagcaacgccgtcagcagtaccgtagatgctttgaccggaccaagatcagggttcgggggagtgaagccgccatcatcataggcatccatcacattatcggtatccagccagctggagccggtgaaatcacgggggcctgactgcttgccttttttgccgccacgactcgggcgagcatcatcggtgaacgagccgatatccaagtcatctacggaaagcagtgcttccttctcgcgtttcttggcctgcttctcgaactttttggcctgcctggaggaagccacgtcatgcaagtcggcctgatgctcggcttcgaacgcggcccacgccgcatccaaatcgttcatgtcatgcgattgcggtgtatcggcaccattcgtggccgatccggcggcaccgggagtcgacgacttggacgaagtatcggaatcctgtccgttgcccggcgtgggggttggccgctctccgtcggcattgctattctggttctcagtcataactgtcactctaatcaggcgaccggccaatggctagttcgtctgcgggaggaatgccaagtgctctactggttcttcgtcaaaggtctcggccctattgctcatcatcgtttgagccctgctgtcagcggactgaataacgtgcctcgagagggtggcgcgattatcgcagccaaccatctggcggtgattgacgatgctttgattccgattacctgcccgcgcatggtgcacttcatgggcaaagccgaatacttcgagggcaagggattgaagggcaagttcaagaagtggtggttcacgtccgtgggcgtgttcccggttgatcgttccggtggcagcaagtcgcttggcgcactcgagcatgcacgcgagattatcgaggatgggcacctgttcggtatccacattgaaggcacgcgtagcccggacggtcgactgtacaagggacacaccggtgccgcacgacttgcgctcgagaccggttgcccgattgtgccgaccgccatcatcggctcggacaagctgcagccgattggcacgtcgattcccaagaagggcaagaccaaggtgttgtatggcaagccgattgaggttgcgaagaagccggctgatgaaattacacatgatgatttgcgttcgctgaccgatcgtgtttccaccgcaatccagaaaatgagcggtcaggaattcgtgaacgaatacgcccagaaggtcaaggccgagctcaaggcccagcaggccgctgaagaagccgaaaagtaattaacaaatgaggctccctcgtctcaagacagagggaggctcattcaaatctcacacgatggtgagggtgatgacggtggggttgccgttggcatcgcgcaagcgaatcttgccgccgttggataggtccgtatcgccacttttcacggtacgtaccgtgccgaacaggccaccgagcaccttgtcggttttcacctcgaacccgagaccttcaagtgtcttggttacggcgctttcctgtttgccgacaaggccggacggtatcgtcgccatctccggacccttggaaatcaccacgtccacgctatcgccccacttcagctgggctccggcttcctgagacgcggaaatgacttgaccggcctcgaccttgtcatcgtactgttcggtgacattggccgtgagcttcaactcgccgagcgcggcttgcatctcatcctgggtcttaccgacgatgttaggcatggtcaccggcatcggtcccttgctcaaagtaaccgtcacctcatcgttgtgcttggccgtggtaccgggatcaggggagatcgtcaatgccacaccctgcggcgtgtccatcgaatactcatccttcgactcgtcatgcttgacattatcgaagccggccttcttgagcgcgttcaacgggtccttgccattggccgaattcgcgtcgagaatatccttcgggatggtggtcatccgcacgcccttggacaccaccaccgtaagctcctgattggctcgcttgcttatgcggctgttcacaacggccttggtcttgttcacggaagaagagatgatcttgccttccgccacgtcgtcgctgtattccttgtgcgtcttgtaggggatgccgagagccttcaacgtgctctcatacgtggcccaatccgcgccggccaacgagcattcggtgcttgcattcgcatcgcaggtcacgtcatccggcttgggcacactccaatagctgcccggtccggcaaaccaccaccagccggcggttccgccgattgcagccagtaccagcacgatcaccagtacgatgatgagcggttttttgctgcgctgcttctttggcccggtgccgttggaagcgacgtccggctcatcggaaagggcaagcgctcgggtgaaggcatcgccggcctgaggcagcacttgtgtctcgctgccggactgtgccatgatttgcgtcttatggggagccgaagcatcggctggcgtcgacgaatcaagtgccgtggtgggggcgaccggaggagccggaggattgacgtctgcggcgccaccggtatcggcggtattgcttgcgacatcatcggccaaaaacgccggtacggacggctcgaacgttgctgcaccggcaggtacgccggtcagcggggcctgctcggcgatattgcctaccagcgctgcagcggtggcatcggtatgatcacctccgatgggttcggcatgcaaacggtattgccacgcctccagcggcaatttggcggccaactggctcaattcctcagctgctgccgcgccatcggcggggcgggcatccacctgacgcgcggtcagatgggcgatgaacgccgccacggacggatcaatgccctgacagaccgtggccacggacggcacgtcctcatgaacatgcttgaagacaagcgtcaccggattatccgaatcgaacggcaccttgccggtcagcatctcccatgccatgatgcccacggaatacaggtcgccttgcgcggtggcctgattgttctcgatcatttcgggagccagataagcggcggtgcccaatagcatgccggtggagctcaatgtggcctggctggcggccttggccagaccgaaatcagtgatctgcacatggccgcgatcattgatcaaaatgttctcgggcttgatgtcacggtgaaccacgccggcgcgatgtgcggaagccagaccatccagcgtctccgcgaccacgcgcagcgtctcacgtacggagaatgtgccttgggcgttcatctcatgccgcagattgacgccatgcacatattccatgaccagaaaatcaagtccattgaactcgccggtgtcatacacctgaacgatgtgcgggttggcgatggacgcggccgaattggcctcgcggcggaaccgttcgacgaactgctcccgatgcgggcctttggcgagttgtgtgtgcatgaccttaatcgccacggtgcgccccagacgctcatcgatggcctcatacacggtggccataccaccctcggcgatattgcgcacgatgcggtagcgtccctcaatcatctgcgcgggctcgttctcactcatgttgtatcgtacggttcctttaatcacgactaaacatgttcagtgtacatggccccggttacgcggccggagcatcggcgcatagttttcacgggttttcaccggtgttcatggtctcatgacccggcggctcgcattgtggactatcgcaaggattcggggacgaatcgcgcacaagcctcggtcagacggcgctgcgcttcggaattcagctcaagaccggcaatcgccttacgggactcaccccatagggcagcgatgcgctcgcgggatcgatcaagagcaccggtcgacgtgaacagttcaatggtgcgggctacctggtcgtcgttgcgacaatccgcttcgaagatggcaatcagatcggccttatcctccgtatctgccgcagacagagcatcagccaacagcactgtgcgtttgccttctcgaatgtctccgccaacgggtttcccggtattgcggcttgatccgacgacatccaacaggtcatcggccagttggaacgccagtccgagcggccggcctacggccaacgcgcaatgcctggcctgatccgggctctctcctgcggccagcagtgcaagcagcagtggggcgatggtggtgtaactggctgtcttccagcggaatacgttcaatgaggcgttcgccagagcttcgggatcagacaacggggtcatctcgacggccaagtccagtatctggccgatctccacctcgcgctgcatggtaagaaacgcctcgttcaaggcatcggtgttgggaagacggctggcggaccggcgtgtgatttcaatgcaggcggtggccagaatatcgccaagcatcaggcccaagccacggcctatggcaccgctgtgtacggcctgttccaaggcacggtgtgcggaaggcttgccccggcgcagatcggattcgtcgatgatgtcgtcatgcaccagtgcggccgtctgaaacacttcaatggcacaggctaggtcgatcatggcgtcacgccgatcaggagtcacgtcgccggcaagaatatcgaaggcgtccaatgcgagcaacgcacgcagtcgtttgcctccttggctggaggaggaggcttggtccacaacctgttccatcaccggtttcagggcgtcggcaacctcatcggtggcgggggcggcagtcagttcccgcaccaactgaatgatgcgtggctcgatgatttcgcggttgttagcagttgtgcacatgcctaataacttatccacagggtttgaagaacacaagaacgttgggaatcaagggttttgaagctagaaccacaatggtcgttttttcctgcgtcatacggcgttttcagccatagtgggcacacaccccctcggcgcatgagctatccggctcggcgcgcaccacaacaccaatagattgcacaccattagtcaaggaggacatgatgaacaacaacacgccgcacaagccgcgtaagagccgacacgccaaacggcacgccgccgagcagacggagccctttggctttgatgagttggagacgagatcacaggaatttcgcaatgatcgccgacttcgaggcgcgcaacaggctaatgccgactgggtggccgaaccattggacgaatggctgtcttgtctcgatgccgggaacaccgacctaggccgagagacgatggccgcgtttgcggtgggcatgcgcgagaccttatcgattcgtgatgcgctgattctctcgttggttattgatgaaagccgttgccccaagtcatggctcatggaattcgcggcgcgaccgcatctggcacgtacgagaacacgaatgggcgagctgctgacctgcgcattcgaggatgaaggcatgatgccggataaggagcgttgccatgccggcatcggtatgttgctcgatatcgcggaagcctcaccggtgccgtactgcatacaaccattggccgtaatcgcctacaccttatggtggctgggcgatccgcgagcaatggtgttcgccttgcgatgcctgctgctcgatgaggattgttcgctggcggcgatgatattctcagccgccgatcgaggcgtggcaccggcatggtgctcgggctgaatgaacagaaacggcggatttccgaggttttatgcgcgatgcgcggaaggaaagcgtgtggtgatcggcaacacgtcgggcaacgatgtgggaataatcgtccgtggagggtggtttactcacatagttgacgatttgcccttgccagaagtgggcccgtgtggtatatgcacttcacggcgagagatcagaaggagcagttttggccacgaaggaaacgacggcaaccaagcagacagccgagtccagcgaggagaccgagaccaagaagaaggccagctctacgaccaccgcgcgcaagacttctgccaagaagtccaagtccgcagagccctcgaaaaagaccacgcgcaagtccgccgcgaagaaaaccgcgaagaaggccaaggacgatgagctcgtcaaagacgaggacactcaggtcgatgacgggcttgatgacgatgccgaggtcaacgacgacgatttggacgttgacgatctcgacgaggatcttgacgacgttgacgaagacgatgccgacgacgaagacctcgatgaggacgatgccgacgacgacgatgtggaagacgacgaggacgaggaagaagccaagtccaaggcacccgagcagcccaaggaaaagggtgcctacgtggtctccgacacggatgatgaggaagagaacatcatcccttcgggcaatccgaagcgtcgtgtgatcgcggccggcgcaaccgccgacccggtcaaggactacctgaagcagatcggccgtgtgagcctgctgaacgccgaacaggaagttgacctgtccgagcgcatcgaggccggcctgtacgcccagcacctgctcgacaccgaaagtgaaggcatggagttcaagcgcaagcgtgaactcaagtgggccgccgccgacggcaagaaggctaaggaccatctgctggaagccaacctgcgacttgtggtctcgctcgccaagcgttacacgggtcgtggcatgctcttccttgatttgatccaggaaggcaaccttggtctgattcgtgccgtcgagaagttcgattggaagaagggcttcaagttctccacctacgccacgtggtggattcgtcaggccatcacccgtgccatggctgatcaggcccgcaccattcgcgtgcctgtgcacatggttgaagtgattaacaagctgtcccgtgtacagcgccagatgctgcaggatctggggcgtgaacctacgccggacgagctggcccgcgagctggacatgccggttgagaaggtgcaggaagtgcagaagtacggccgcgaaccgatttccctgcacaccccgcttggcgaggatggcgattctgagttcggcgaccttattgaggataccgacgccatcgctccgtccgacgccgtggccttctccctgctgcaggaacagttcaagcaggtgctggaaaccctgtctccgcgtgaggccggcgtcatcaagatgcgctatggccttgaagacggccagccgaagacgctggacgacatcggccgtgtgtatggcgtgacccgtgaacgcatccgtcagatcgagtccaagaccatgtccaagctgcgccacccgtcccgttcgcagaccctgcgcgacttcctggatcaatgatcatctggctcccctctgtgaggggagccaagcatttgaagagaaaaataggactgtatgcccaaagaagaatacggcgccaaggacctagctgttcttgagggcttggatgcggtgcgcaagcgtccgggcatgtacatcggtaccaccgactcgcagggtcttatgcactgcctgtgggagatcatcgataactccgtggatgaggccttggccggcttctgcaacgatatcgtggtcaccctgcacaccgacggttccgtggaagtcgcggacaatggccgaggcattccggtggataaggaaccgaaaaccggcctgtccggcgtggaggtcgtactgaccaaactgcatgccggtgccaagttcggcaactcgtcttataacgccgtcggtggcctgcacggcgtgggctcctccgtggtcaatgccctgagctcccgactggacgtcgaagtggatcgtgacggcaagacgcaccacatgaccttccaccaaggtcaccctggcgtatacacggatgccgacccggccaatccgtctcccgattccccgttcaagcgcactcgcaagaaccgacccaccgagctggaaatcatcggcaaggtatctcccaaaaccactggtacccgtattcgctactggtatgatccggagattttcaacaaaaccgccgaattctcatacgaacagctcatcgaccgcgtgcgccagaccagcttcctggtgcccggactcaaaatcaccattgttgacgaaaacgtaccggaaacggcgactgacaccgccgaagccattgatgccgacgcagtcgaacctgcgcaagaccaggccccggctttggacgtctcgtccaacgatgccgaactcttcgacgactccaccgaggctcaagccgacagtaccgagagcctgtccgaggaggacttctcgctgacggccggcgaccaggtcgtcgatggcgcgttcggcgagcagcccgcgcacccgcgcgtcgtggaattcctgcacaccggcggcgtcaaggacttcgtcgacttcctatccaaaggcgagccgatctccgacatctggcgcatccaaggcgagggcacctataaggaggagacccaaaccgtgggcgaaggcggtgaactgcacgcccaggaaatcgaacgcacctgcggcgtggacatcgccctgcgatgggtcaacggctacgacaccacaatcatgagcttcgtgaacatcgtggagacgcccggcggcggtactcacgtggacggtttcatgaacgccatcaccaagcagattcgcaaggcggtggaagacaacgcccgcaagctcaaggtgaacatgaaggactccgccatgaaggtggagcgcgacgacatccaagccggactcgtggccgtggtcaccgcacgcgtggccgaacctcagttccaaggccagaccaaggacgtgcttggcaccgcgcaggtcaagccgatcgtcacccggctcaccgacaagcaattcggcgagatgatcaccggctccaaacgcggatacaaggaacaatccggccgcgtgctggagaagatcgtcggcgaaatgcacgcacgcatccagtcgcgcaaggccaaggaggtcacgcgccgcaagaacgcgctcgaatccgcctcgatgccggccaaactctccgactgccagccgggcaatgacgacgtggccgaactgttcatcgtcgagggtgattccgcactcggtaccgccaaggccgcccgcaacgccggtttccaagcgctgctgccgattcgaggcaagattctgaacgtgcagaaggcgtcgattacgcagatgctctccaacaaggaatgcgcggccatcatccaggtggtgggcgccggctccggccagagctttgacatcgaacagtcgcgctaccacaagatcatcatgatgaccgatgccgatgtggacggcgcgcacatccgtatcctgttgctgacgctgttctaccggtatatgcggccgcttatcgaacacggctacgtgtatgccgcagtaccgccgctgcaccgcatcgcgttgaccggctcgcacaagggcgaatacatctacacgtattccgatgacgagctggccggcaaactggccgacctcgacaagaagcacatcggttacaacgacgacatccagcgatacaagggtctgggcgagatggatgccgaccagctggcggacaccaccatggacccgcgcacgcgcatgctgcgccgcatccgcatggaggacgccgcccaggcatccgagatcttcagcctgctgatgggcgacgacgtgccgccgcgcaagcagttcatcgtcgacaacgccgacgatttcgaccgctccaagatcgatacctgaccgaagacgtcgctgataatgacatcgtgcttaccgagaatttccgtaattggcgtttgaggtgagcacgttgtcatatgttttatgcgtgttgcccatgagtcattcgatagactgatgacatcgttatcacaaccggtgccgtactgtgaatgggagatggaacatggccagtctgttgcttgccgtcatctatgtggcgtttatcagtctggggttgccggattcgctactcgggtccgcatggcccaccatgagccaggatctgaacgtgccggtggcgtgggctggcggcatctccgcggtgatttccatgttcacgattgtctcggcgttgctttcggaccgaatgacattgaaattcggggcaggcaaggtcaccgccgtttcggtggcgttgactgcggcggccttggcaggtttctccgttgccccgaattactgggtgctgttggccatcgccataccgtacggccttggcgcgggtggcgtggatgcggcgctcaataactacgtagccattcactacgaaagccggcatatgagctggctgcactgcatgtggggcgtcggcgcatcggtcggcccctacatcatgggctatgcgctgtctcaaggccaaggctggccgtggggctatcggtacatcgcgatcctgcaggtgatgctgaccgtcatcctggtgctgagcctgccgctgtggaagaaacgtggcacgactgggggcggcgaatcgaccgatggcgccgcatcatctgacggcaatgccgagggatgtggtaatgctgaaggggcgtctgttgctgaacgcaaaccgctcggcgtggccggcgtgctcgccattcgcggtgccaaggaaatcctcgtgatgttcttctgctactgcgccatcgaatccacggcgggtctgtgggcctccagctacatggtgatgcacagcggcatcgacaagatcaccgccgccagctgggccagcctattctatgtaggcatcaccgtggggcgtgcgctttccggctttctgaccatgcgattcaaggacccggtcatgattcgcctcggtcaagtgctggtgctcgccggcatcctcaccatgttcgtgccattgcctcaccaccttggcgtggtcgttgggctggtggtcatcggcttcgggtgcgcgccgatttatccgtgcgtcatccactcgacgccggcctacttcggcgaagacaaatcgcaggccgtcgtcggcgtgcagatggcctgtgcctatgtgggctcactgctcatgccgccactgttcggcatcatcgcgcaatatgtgacaatcagtctctacccgtggtatttgctggtgctcttggtgctgatggtggccatgcacgagcgtcttcgtaagttgcgcggctgatcatgcgcgcatttgggcccgccgcctactatgcttggagcccatggtgataagtgaagaagaacataaacagatgcccgagcccgtacgggaacgattggaagcgctgaaggatgcgccgggctcggtaatcgtggtcggctcgatgaacgccgattacaccgtgaccaccaaacgactgcccaagccaggcgaaaccgtcaatggtggtgccatgaaagtgttgccgggcggcaaaggcgcgaatcaggcgtctgccgctgctcgcctcggtgtcaatgtccagttgctgggcgcggtgggcgaggactccaacgcggacttcctattaggcaagctggatgaggccggcgtcgacaccgccgatatcctgcacgttgaaggccccagcggcaccacggtaatcaccgtgagcgctgagggcgagaataccatcgtctattcgccgggttccaatgccaaggcaagtgccggctatgtgcaatcacatcgcacgaccatcgccgaatgcgcggtattgggactgtgtttggagagcccgatctccaccgttatcgtcgccgcacagaccgcgcatgacgctggcgtgaccgtgctgctcaacgactcgccatttatggacgagctgcctcacgaactggtggaagccacggatattctgctggtcaaccagcatgaagtggctcagttactgggtctgccggacggcgatgtggaatcactcgactggtatgaggtcgctgaacgattcaccgattacggattcgaccgggcgatagtgacgcttggtgcgtcggggtcggtggtgatcgagaacggacgttggcatcgcgtatccgccgcgcaagtcaatgcggtggacaccaccggttgcggcgactcgttcatgggaactgtgctggctggcttggccgctggccatacgctgctgcaatccgcgcaaatcggctcctatgtctccgcctatgcggccaccaagcttggtgcccaaagcgcctacggcaccgccgaagaagtcatcgcctacttcagctgacctataatcgtacatatgtacgaaaccctgagcctgttttccgaacccaccaaggtgtggttcgagcatgccttcggtcagccgaccgaggcacaggctcaggcatggccggcaatccattccggtcgtaatgtcttggtcatcgcacctaccggctccggcaaaacattggctgcgtttctctcagccatcgaccgattgatgaccgtgccacgcacgcggcgtgccggtgtgcgtgtgctgtatatctcgccgttaaaggcgctcgcggccgatgtggccaagaacctagaacagcctttggagggcattgccgcacaatgcgagacgcaagggctgcccgtgccgaagatcgcggtcgccactcgttcaggcgacaccaccgcacaggagcggcggcgcatagcctcccatccaccggatatcctcgttaccacgccagaatcgttgtatctgttgctcacttcgaaggcaggacggattctcggcactgtcgatacggtgatcgtcgatgagattcatgcagtggcgggcaccaagcgcggcgcacatctggcggtaagtctggaacggctggagaaccttgtcgcggaatcgcgcaagcgagatgcaatcgatgcggatgctgatgagggcagtgataccgccatcgatgctggcctcagtgaccttcatatgcagcgcattggtctatccgctacggtgaatccgcctgaagaggcggcgcgattcctgggcggcggacaaccggttaccatcgtgaatcccggtgggcggcctgcaatggatctgcgcatgattgagccgttggaaaacatgcgtgatttgcagtccgtgaatgccaagcagcgtgtcggtggcgtggaggctgaacggtccgctccgcatatcagcggtgtcacgccggccatgcagcgacttgccgaacgtaggggcatcgtgccggtggatgatagagatgtttcttccacttctggggacgattctgatgcgagtgatgcgttcgattcctccgcgttggttggagcggcgggcgaccgtacctccggttccatttggcccgtggtggaacgcagcattttggatgagattctcgcgcaccgcactacattggtcttcgtcaattcgcgtggtgtggccgaaaagctcaccgcgcgcctcaatgatctctatgcgcagacccggcatggcaccaatcccgacactgtgcgggatccgggctctccggaaggccgcgaagggttctccacacattacgatgctgtggtcggttccaccaccatgcttgtcggctcgcatgagggcgatgatgtcatcgccatggctcatcatgggtcggtctccaaagaccgtcgcaaaatgattgaggaacggctcaagcgtggtgaattgcgctgcgtggtggccacctccagtttggagctaggcattgatatgggctcggtcgacttgatgattcaagtcgatacaccgttgtcggtctcctccggattgcagcgtgtaggtcgtgccgatcatcaggtcggtggcgtctctcacgcattgttctacccgctcacccgtcagcaaatcgtcactggggccgcaagtctggaagccatgattgccggcgatatagaaccattggccgtgccgcgcaatccgctcgatattctcgcccagcagaccgtggccgctgcctcgatgcacgatttgaacgctgatgactggtatgccacggtgctccgtgctgcgccgtttgccgaactgccacgtgacatgttcgatgccgtaatcggcatgatgtccggcgaatacaacagagaggaattctcggccttccggccgcgactggtatggaatcgggataatggcctgatttccgcccgtcccggttcgcagaaagtggccgttacctctggcggtacgattcccgatcgagggctgtacaccgtggtcctgcctgaggcggacgccggcaaaggccagcgtcgcgtcggcgagttggatgaggagatggtctacgaatcgcgcgtgggcgatgtcattacgctcggcacctccacatggcagattcaggaaatcacccgtgatcgtgtggtcgtgactccggctccgggccgcaccgcccgtctgccgttctggcacggtgaaggcgctggccgtgactacggtttcagccgtaccatagcccgcttcacccgagaaatcgccgccggattagacgtgaagcggactggggggagttctgccgcagaaggtccagctgtcccaaccttcatcccaacaatcctcacccgtctccaccgagacggcctagaccccaacgctatcaccaacctggcccgcctactctccgagcaacaagccatcaccggcacagttcccagcgaccaaaccctcatcgtggaacggacccgcgatgaagacggcggctggcgcatcgtactgttaagccccttcggccgccgcgttcacgaaccgtggtccatggccatcagccgcagactgcgccaacgctacggtttcgatgggcaggtatatgccgccgatgacggtatcgtcattcagctaccggacggtgacggacatattcctgctcaagacttgttccttttcgacccagaagacctcaaagcagatgtagaacgtcaagtgggcgagtccgtgctattcgccgcacgattccgcgaatgcgccgcccgatcactgttcatgccgcgatccgacccggaccgtcgcgtgcccctatggcagcagcgactgcgagccgcacagctcctgcaagccgcacgtatggtcaagaacttcccgctgctgctggaaaccgcgcgcgaatgtttgcaagacgtatacgacatgcccgccctgaacgaggtgatgaccggattgcaagccggcaccattaccgtgaaggacgtggagaccgagccgccatcgccttttgccgagaacattctctttggcttcgtcggcgtggtgatgtaccagtatgaccaacctcaggccgagcgcagcgcgcaactgttgtctctcgatccgcacgtgctcgaacgcttgctcggcaccaccgacatggcacaagtgctcaacccggacgtgattcgcgaagtcgaacaggaactgggggagcgcactttctggaatgaacttgccgacgatgatgtgactggtcgcgtgacccgttacgccaaaacccatggtcctttcaccgccgatcagctcatggccgatctgcacctcgatgctacggatgccgtgcatactttggatgtactggcggccaaaggcgagttgctgcaaggccattttgtagatgatgacaagcaaggccaacagtggctccataaggacgtattccgccgcattcggtctcgctcattggccaaggcgcgtaaagcagtcaagccagtagaaccagaggcgttccagatgtttcttatcgaccgacaaggtatcgggccggtcggcggcgaacgatatgaaggtgccgacgggctcatgcgcgttatcgagcagctggagggcatagcactacccactgcactctgggagtcggcggtattccccgcacgagtacgagactaccaacctgcattgctggatgagttgctgaccagcggcgatgtggtctgggtcggctcaaaaaccgggggaaccagtgcgatggaccccggtgaggttgctttctatccggcggattcaatattgctcagcggtgtggaacatggtacgacgtcgaatgcctcagacgccaccatgccggaagcgattctgaccgcactggactcagggggagcgttccatgcccgtcaactggtggatgccgccaaacgtgtgtggaatgaggccgcggagccggacatcaatccaaacaccggtgaaatcattccgcaagagtggagcgaacagcagttcaaggatgccttgtggagcttggtctggcaaggtaaggtcaccaattccagcttcgcgccggtgcgtgcattaaccgcaggcgcagcaagcccgcgtaaatccactacatcacgtcgtcgtgggcgtgtcgctccgattcaccgagccactacggatatgacgttaggaggtttgtggtctgccgtaatcgggcaagctgaagccgaagacactgatcagaccgagcaggcgctcgcactggtcgagacgttgctggacaggtatggcgtcatcgcgcagccggtgatcgacaaggaaaatatcccgggtggctactcagcgttgtatccgatattgcagcgcatggaggagcatggtcgactggtacgaggcatgttcgtccgtggtttcggcgcggcccaatttgccgagcgcgacaccgtggatgcgttgcgtcatccgtcagagcatcgcggccagtccgtggtggcattgagtgtgctcgaccccgcaaatctcagtggctccgccatcgcgtggccggacgcgcctgccggtgcgggtaaaccggcacgccgtatcggagccacggtcgtgctcaatgcgcaaggtgcgctactatacgcggctgccaaagccaagcacttgacggcgttcgatcaatcggtcggccatgaacccgccgccaatgattccgacgaacaaatgcgcaaggccgccacagaactgtcctacgctctcaaacgcaatggcaccggttccgtgacgttcagcgacatcaatggcgaacccctcaacgcgcgtcaccccttcgcccgcatcctccaccagtccggcttcacccccgttccccgaggcatgcggctgtactgattgagcccagctatcgaatgcggtagttggagccgcgttgggtcatgatgaggccggcgtgggtgagcttcttatccagtgtgtagagggcgttcctgaggagcccttgttgctcgaagaatgggccaccgacgagcttgaccaattcgctggtgttgacaaactggccatcagccttgaccagtgcttcaagcaaactgtattccagacgggacagtgaaattgcggtgtgtgtggatgcgtagtaggctttgcgattcgtggtatccaacgtgagattgccacgaatgatcatggtgggggagtcggtggcaagcgagccgacgtatgagagcagttcgccatcggagaatggtttgctcagtacggcatccgggcgtcgtacattagctcgtgcgctagcggcagcgttgtccgtgcactgttcggcttcggcatctgagttgtttgcgtgtgaatccgcgctgaaggagctgtagggcgtctcttcgatcggggcgtactcgtcaggcagcgctcgccagcggctgccttcgccgatggttttgctgagtggcgtcgaagtcagcagcagaatcttgacggaggcacgggcattgtgaagggattcgatgagttgctcggtggagatgccgagcagggattcatcgagaatcactgcgtcaaatggctccttggtgaccgcggcgagcgcgatactgccggtgcttgccaaggacacctcatgacgacaggcaagcagcgcaccacgaatggcgcgggccaacggttcattggatacggcaaccagtagtctcatcgccacctccttgatgcttagtgtaggtcgggtttagggtctcttctctatgtgtttggctcactatcgttcgctcctcgcctacaaacaccccactgggggtgtttgctttacggctcggcccatcagagggagcttaattgaggttacgcaatgaaggcgatgggggaggcgaggtccactccggagccgtctcggcgcatatcgggcttgggaagctcgaccggggagcctgcggatgtggaggcatgcaacgggtagagaccaacccaggcaagaatcagcgtgttctggcccttgaggaagcgctgggagcgtacgccaccggtagcgcggcccttggtggggtacatttccagcggggtgaccttggcggcgccgttttcggtgccgggtagtgcatcggagtcgccggccacggtgagcaccaccgcgccggagccggaagtcaaaccgttctcgccctcctcataggtccatgccaccttgccggcgggaaccacgttgaatgccgccacacgggcgccctcggccagcttgatgccggccataccgcccgcggtgcgaccctgcgggcgcacgttcttcgcctcaaaggtcagtagcgaggaatcggaggagatgaacaccagacggtcgtcatcctcggccacggcggcgaataccacttcgtcgccatctttcagatcaatgacgggccaggaatccatggtggtgggtgcctcacggttccaacgcttgatgacaccgttacgggtaccgatagccagcgacggcaacggcttggcctcggcggccccgccatcctcgctctcatccttggcactggccttgccggatgtcggctgctccatggcgatcgccgtaatcacgcgctcgccacgaatcggatcggtggattcggtcatgccgatcagttcgtcggcctgaactcctcccttcagcgacaatgtggcggcagcgggcaaggcaggcaaatcaaccacatgcgcgagcaccaggcggccggccgacgtgaccagcccgtatgtggcgcgcgtggaggtctcgaagattgtggtgatttgatcgtctcgcagacgttcatcggatgtggaccgtacattgaacacgtccatcgcgcttggcgtggtacgggcaatcaaaccggtggcgctcatcatcaccacgcacggctcgtcctcgatcttcaaggctccggtcagcgcggactgttcgccggtcttcttggctgcggctgcggctgcggccacatcggcttcggcggaggaaatcgtggtggcggccttcaccgcttcgagcgcggacttggacacacccgaagccccggcaccctgcgccacgaccggcgtcaacgtgccatccgggtcggcgtccagcagcacggtgcgacgcggcgagccccacttggcgaccgcctcgtccatctcgtcggtgaccacctggtcgagcgcttcggcggaggccagaatgcgggtcagctcctcgatgcgcttcttcaggtcatcgcgttcggcctcaagttcgatgcggttcatcttggtcagacggcgcagacgcaggtcgaggatgtactgggcctggacctcgtccaggtcgaacacaaccatcaaacggcttttcgcggcatccgcatcatctgaggtgcggattacctggatcacctcgtcgatgtccagcatggccagcagcaggccctcgaccaggtgcaggcgttccagcgccttcttcttgcgatattcgctgcggcggcggatcaccacacggcggtggtccacccacacctgaagcatctccttcaggcccatcgtgtgcgggcggccctccaccagcgccacgttgttcatggcaaaattgtcctgcaacggcgtgtgcttgaacagctgcaccagcaccgcatgcgggtcgaaaccggtcttgatctcgatgacgatacgcgtgccgttatgacgatcggtcagatcgaacgcgccggaaatcccctccagcttgcggttcttcacgccgtcggaaatacgctcgatcaccttctccgggcccaccatgtacggcagctcggtgaccacgatggcctgcttgcgggccgtgacatgttcgatatgcgtggcggcgcgcgtggtgagcgtaccacggccgttggcataggcctcacggatgccgtcgcggccgatgatcgtgccgccggtgggccagtcggggccgggcacgtaacgcatcagttgttccagggtggcgtccgaatgcgccatgaggaacttggcggcgttcaccacctcgcccagattgtgggtggccaggttcgtggccatgcccacggcgatgcccgagccgccgttgaccagcagatttgggatggcggccggcagcacggtcggttccttgagcttgttgtcatagttcggcgtgaagtcgacggtgtcctcatcgatatccgcgttcatgccgagggccgccgtgccaagcctggcctcggtgtaacgggaggccgcagggccgtcatccagcgagccgaagttgccgtggccatctaccagcggcagacgcatcgcgaacggctgtgccaaacgcaccatggcctcgtagatcgcggaatcgccgtgcggatggagcttgcccatcacctcgcccaccacgcgggcggacttcatatacgggcggtcgggagtcaggttcatctcgcccatctggtagacgatacggcgctgcaccggcttcaagccatcgcgcgcatcgggcagtgcgcgtgcgtaaatcaccgaatacgcatactcgaggaaggatttgctcatctcctcgttcagcggcgtctcgacgatatgctccttgaccgtgcgcggatcgtaggtttgcgcggacggtttgcggtgtgatgccatgaaactccctttcgaacgcccccatattagcgggagggcgcgaaacagtgcgcagagaacggttctcaataacaactgtgcgctggtttcggtgcgccaatcgcacatgtttgccgataaaatggcgtgattctagcgtttcagtcgatgtgcgtttgtttgattatgtgcgttggggcgcacagttgttattgagaaccgttctctgcgcactgagccaaggggaggggtgctacttgaatgggcaactatgagtgttgagacgctggatatggacgagttgctgcggctggtgcccactgtgggctatggggatgacgccccggccgatcggcgtgggggagcactgcacctgtccgccgtgctgcccgccttgtccgccgcgattgggcatccgactcccaccaaggtccacgccgatcccaaggcctgccagcgcgcgttgggactgcccgacgccgaatcggccatcgtggtgctcgtggacggcctgggcttctggaacctcgccatgcgcctcggccacgcgccctatctgcgttcgctgatgaacgaacgcgccaatcagcgtcccatcgccacctgcgctccaagcaccactgtggcggccatggccgcattcggtaccggaacctgcccgggactgaccgcaatggcgggctatacgcagctcgaacccgccagccataagctcatccaactcatccagttcaaagacgcgctggcacccaaaccagccaatccgcacattcctgtgccacccatggtcgatccgctcgaccagcagcgcgaggagacggtgttcgagaaacttgcggctcaagaggtgcgcgtcacaagctcggggttgcccaagttctccaaatcgccattgaccgaagccgcattgcgaggcaccgactatcaaggcaacgtcaccccacgcgatcgtgtgctggccgcctcacgtgcctcccgtacccccggcctgacctacctgtacatccgtgacgccgacaaagtcggccacaattacgggtgggattccgaacactgggtggccgcattcgaacatatcgacgcccagctcgcgctcctgaaacgcagcgcacccaaaggcacgctgatcgtcatcgtagccgaccacggcatggtgcaaaccgacgtggaccagcggattgacatcgccgttgaaccgcagctcacccgaggcgtgtcactggtcgggggagagcctcgctcgctgatgctgtatgccgagccggatgaacgacctgaggatatagcttgccggtggcgcgattacctgcaagaccgagccttggtgcggaccagggatgaggccatcgcggacggattgtttggaccggtctgcgagcgagtccggccgatgctcggcgatgtggtcgtgcaggcagcgggagccgtgaccctcgtcgattcgcgtacgcaaggagacaaagccacccacctgccgagcgtgcatggctcccaaacggcattggaaatggatattccctgcctgatcgatatggcctgattcggaaattcagtctccgaacagaatctcgtcccagcttggtacggccgaacgtcctgatttacgcttagccggtttggctggtgcctcgtgtttggtggcggcggattcggccgcccgctcctgctcggtggctaccagctgtgcattggggccacgccgtacggtctcgtccgaaatattgtcagaaccctgctctggtgccgtggcaggcgattgctgcaatcctgcggcagatgacgaaacaggtccggcggtctgcgaagagaccgggctgggggccgtagcgtcatgagcctggttcgtggccggtgagatggacgtggataggtccaccgggggcatggaacctgtggaagtgacggagggccggatcgcggcaggccgtgcggccggaatcgaaggcgtaggcgccgcccaagcagacacagcgcgctcgatacgcgcggaacgtacggagtcgccgggcagttcaggaatcgtcggcttgagtttggaatccgtggctgattccggattctgttcgccgagcagttttcgagcggcattgttcaggctcatcacggaattgtcgtgcatattccacgtccattcggcatggatctcacggcccgcggaagtgaatatcgccacgatgcgccaaggctcaagtccgcgccgggtggatttccaggtcactgattccatgccgattccagcagaggccagcgtgcgttccaccagttcgctgatggtgcgcaccctgctgtctttgggtgccgccacggcaaggaactgttcgatggcatactgtttctcggtctccacggccatggagaaacgacgtaccagcgtttcgctcagatgatatttctccgcgacacgggccggatcggcaccggcgcgaatcagcgactgtatctgggaaatcggcaaagtggactgctgatgcggctggggggcctgtcgcatctcgcttctgacctgcttggcctcaagaatcgcccgttcgagcgtgtcgtccacgctcacggccatttccctgccgccaatggagaatacgaggtcccccgtcttgctcacgcgcacgaaacgggctttttcaagccgatcatctggcatattcgcaccactttccgtcgcaaagacattacttcttttaagtatgccccacgtgtcgaactttacgagtatttcaaatcgtgtatcctatgggcgagtacggcgctgaccgtgctatatatatcgacttacgaaccaaagacgacgaaaggaccatgatggctcaggattatgattccccccgcaataaggatgaggacgaggaatcgctgcaggcgctggggaagtcctcgcagaacgcctcgagcgacatcgacgacgatgagaacgccatcgccgaagactacgaactgccgggcgccgatttgagcaacgaggattcctcggtgaccgtcatccccatgcagggtgacgagttcatctgctcgcagtgcttcctggtcaagcatcgcagccagctcgcctacacggacgaggatggccagccggtgtgtgaggagtgcgccgcctgatggcgttcgacgagacctacaacgagcccgaatccaccgaggtcctggtcaagagcctcgaccccgaacatccggcccagctgcactatgcccacgcgggcgatgccggtgccgacctcatcaccaccgtcgatgtgacgctgaagccttttgaacgggtactggtgcccaccggcgtggccatcgccctacctgcgggctacgtggcgttggtgcatccgcgttccgggctggccgccaagcagggcgtcaccgtgctcaacgcgcctggcaccgttgatgccggctaccgtggcgagatcaaggtgccgctgatcaacctcgatccggaacgcaccgccgtcttccatccgggcgatcgcatcgctcaattggtgattcagcggtatgttgaggcccggttcatcccggccgaaaccctgcccggatccgatcgcgccgaacgtgggttcggttcgacgggagtggcgtcctgaccggattgggccggttgaatgaccaaggtgatgacggcaacgacggttgcggaaccaatgatggcgaacaggtgcatgcacaaggctccggttcgcggctacaatgaacttcatgacgagggaggtgactggcatggcagagattgatggcgagcagtacgccgcccgtaagttgggttgtgagatcagtgccgatccgctcaatccgctggatccaatcaagaaggtatgcaagtcccatcatcccggtgaggatttgtccatcctcgaccgcgcgtaccggcgcgccgtcatccagcattgcacgcaacggcgcaagtctggtgagccgtacatcatccacccgctggccgtttcccagattctcgcggatttgggcatgggcccgatcgtggtggcggccggcctgttgcatgacacggtggaggacaccgactatacgttggatcaatgccgcgccgaattcggcgacaccgtggccggtctggtcgatggcgtcaccaagctcagccagcttgaagtgggtgattccgcccaagccgaaaccattcgcaaactcgtggtggccatgagccgcgacgtgcgcaccctggtggtcaagctcgccgaccgcgtacacaacgcccgcacctggcgctatgtgaagactacgtccgcccagaagaaggcgcgtgaaaccctcgacgtgtacgcgcctttggccaaccgactcggtatgaacgccatcaagacggagctcgaggaactgagcttcaaggtgctctacccgaagatctacaacgagattgtggtgctggtggctcgccgagccggccagcgcgatgtgtacctgaagcagattctggcggagatcaacgaggatctcgacgagcagaacatcaaggcatacgtcaccggacgcccgaaggactacttctcgatttatcagaagatgatcgtgcgcggccatgatttcgcgaacatctacgatttggtcggtgtgcgcatcatcgtcgacaccattcaggattgctatgcggcgcttggtgccgtgcatgcgcggtggaacccggttcccggccggttcaaggactacatcgccatgccgaagctcaacatgtaccagtcgctgcacaccacggtggtgggccccggtggcaagccggtggaaatccagattcgcacctgggacatgcaccgccgcgccgagttcggcatcgccgcgcactggaaatacaaggaaaacggccaggccggccgcgccctgagctcgccggacaagtccgaccgcaggcgtgacgagaagaaccaggagctttccgaagccgacaatctcaaatggattcagcagcttgctgattggaccagcgaaaccccagattccaacgaattcctcggttccctgaaggaagacctcggctcgtccgaagtctatgtcttcacgccgaagggcaagatcgtctctttgccggcccatgccacaccggtcgatttcgcctatgccgtgcataccgaagtgggccaccgtacgatgggcgcgcgcgtcaacgggcgtttggtgccgctcgacaccacgctcgacaacggcgacaccgtggagatcctgacttccaagtccgataccgccggtccttcgcgcgactggctgagcttcgtcaagagcccgaaggcacgaaacaagatccgccagtggttctcgaaggaacgtcgtaccgaggctattgaggaaggccgcgacgaactgacccgcgctatgcgcaaacgtaacttgccggtcaatgcgctgctgaccccggaagcgttggtgggtgtggccgacgaccttaacttcccgaacgcggacgccgtgttcgccgccattggcgacggacagatctccacgcagaacgtcatctcgcatctggtcaaggatgccggggccgacgaggtcgatgaggaggtcgagcaggaggctctgccgctcaagcccgtggagcgcaagacttccagcagctccaccggggtatccgtcaagggcgtgggcgatgtgtggatcaagctggcccgttgctgcatgccggtgcctggtgacaatatcatcggcttcatcacccgtaatcagggcgtatccgtgcaccgcaccgactgccagaacatgatcgatctgaaaaacaagcagcctgagcgtgtggtcgaagtcgaatggaccagcaccaagggcctgttcatggtcaagattcaggtcgaggcattggatcgccgaaacctgctttcggacgtgacacgtgtgctttccgaccatggcgtgaacatcatttccggtacgatcgccaccggttccgatcgcgtggccaccagccagttcagcttcgaaatggccgatccgcagcatctcaactcgttgctggcagccgtgcgcaagattgatggcgtgttcgacgtgtaccgcatcaccggtgccaaggaatccgccgaacctcgactgcgcaagatgaagtaggccgttgcttggctcccctccgggaggggctgtcagcgaagctgactgaggggagcagcgcgggcttgcggaactcccctcagacgtctgcggcgccagctcccctcagagagggagccaagaatacgaaaaggtcctgactggaataccaatcaggacctttgctgtatatgtgtcggtcttactcggccacgttcacggacagaattacggccggctcgagcgggcgatccatcggatcggtgtccagtgcttcgagcttatcgacgaccttcttggagtcgtcatcggcgacctcgccgaagatggtgtggtgaccgtccagccacggggtcggcacggtggtgatgaagaactgggagccgttggtgccatggaccttgccgtccatgccgcgacgcagaccggcgttggccatagccagcaggtatggcttgtcgaacttcaggctcgggtcgatctcatcgtcgaactcgtagccagggccgccggtaccggtgcccagcgggcaaccgccctgaatcatgaactgcttgatgatacggtggaaggtcaggccgttgtagaacttgccatgggaaggctggccggtgtacgggtcggcccattccttctcgccggtggcgaggcccaggaagttggccacggtgttcggggccttgtcgtcgaacaggttgatggtgatatcgccctcagaggtgcgcatgatgatggtagtcatggctccaagtgtctcatgggcttgagaccggggaagagacgtgattgcgggaatggcgcggagagctgggaatgggcgtgggcaatagccgggacaacatgccgcagcgtgaagcgtcatacgagttgtctcgcgatggccaacgcgccggcaacgaccatgagcgctgagaagagaacgcaaaagagtccttttgcgttctcttcccggtttttggatccgatcacgacggatatcaggaccaatccgacggccagcggcaccaaggccagcagaagcagtggcttttccatggcgcctcctttctgaacgctgtgattcagagatatctttagctaatcatgggatatgggcggcttggtgccgattggtgatggggctcgatcctgatgttcgtcggtgccggaatatggtgcattccgtcaaatagaggtgggcacttggatacggtgtcgctttattggatttctttgtttctatggtttgattatgccacgagtccaacaaaacgttaccggccccagcggctattgacaaacttgtcagtttggacgtattgcgtgtcgaacacgctgagccgcgacaaattagatgcctgctgctcggatgcgggtctattggaagtcatatttatcggcacatttcaatgcttgctttggaacatattactttggtcgatcatgatgttgtcactgtagacaacatttaccgtcaggattacgtgcgaacagacattgggaagaaaaaggttgatgtgctgaaatccagggcgtcaagatgtctttctatagatagcattgataaaatgataacttgtcatagtgaacttgatgaattaattgaccgagagaaaatcaacttagtaattcaagcggcagacgttccaagcaccaccgaagtcgcaaggatgattaactactcatgtgataagaaagatatagcgttcattgttaatccaggctattttggtaattcggtaagtttgcctgaattctattatccgaacaataaatatgactatatttcttcacacttggcaatcaaaggcaagctattgctgcaccatgagtccggtaagcttagctatcgattatgttcaacattgggatcgttggtagcggaacaggttgaagattatcgatgtcattgctgtcctgctcattatggagaaaagggttacttcgatatatatatgattatgcttggcatactgagcaagtttgtaaagaaccagtgccgcctaatcttctgtaggattccagtactggtagggtaaggataaattattagatgagtaattcgttaaagctcgtttctgctcctgtgcgcgaaagcaggttgtgggatatcccaggttacgtgccatggttcacggcggacagcgcgacggccatcggcgtggccctgcggtatctggcggtctctctgatcggatacaagctcaccggatcgaccacagcagcgggttggttgggctcgctggccgcgatcgcacagcaggcggccgccgtgttcggcgggacattcgccgaccgtcacgatcgcaagacactgatcatcgtgaacgcgacagcgggcgtcatctgttgggggtcagtcgctgcgctgctcatggccggcaagctggtcttccccgtgctgcttgccatcgcggtgttcgagtctgcggtcaacgggtttctcggccccgcctcggatgcgatgctcaaatccatcgtcgatattcgctcatatccgaaagcgcgcagtctcaacgaaggccgtgacgcgaccatcaacatggccggcagcccagtcggcggcctgctgtacggcatcgccccgtggttgccgttcctgtcggctgcggtcatgtacctgctggcaggcgtggctgcgacacgtatccgagtcggcggaaatccgcggaacggcagcgatagcggcaacggcgatagcggcgatgacggtgggaaagcgggcggcgcgtcatttttccgtgatttcgccgaaggatggtcgtggtcgctgcaccgcaggatgctggtgttgacgatggtgtcgtccgcgctggcgaatttcggggtcaatggcttccagtatgcgattcagctgcatctgatgcgcaccggcgtgaacgcgacgctcatcggattcgtgaatacgggcgtattcctcgcgatgctggcgggtgcgttcatcgccggacggatcagcgataccgcaccggtcgggccggtgacatgctgcggattcgtgttcatctgcatcgcttcgctgccgatgctgctgaccgacaactactgggtgctgcttatcgccaacgccgtgatgtgcctgccgttcccgatcatcaacgcgttgcagctcgggttcattttcggtaagacgcccgacacgatgcaggggcgtatcaccgtgacgcttaccgtaccggcccaggcactgtccgcgttctgctcagcgacggccggaagtctgctgcccgctttcggattcagcgggactatgctggtgttctgggcggtgatgctcgtcagtatgctgctaatcgtcagttcgcgcagcctgcgcaccattccacgcgccgaccagtgggatcgcacaccgctggagtagccgcggacggccaccaaccatggggactatgcaccgctgcgcgctgctctccgcacacgtcttccattccgcaaaccggctgcgctgacaggacgatgagtgcggtcagtttgcggcagtcagtttgggaagaactcaaaatctcgattcagcaggctcaaatcacgagttttcagattgtggtctggaaaactcggtggaagaggctgatcccgggagaaattgagaaatccggatgtccgtttgcgcgaccgattctatgaaaacttccggatgcgtgcgggagtttagcgcgaaacatgaatccggcgaagttctcccgggaacggcttcaaggtcgatttttgagaatcgcggaattccaacgtttttgttgagagattatgcatgagagtaccggattctcgtaaactctcgcgtccggcacgggagttcagcggcgaattcccgaagtcagcgtaaactcccgcagaatctgggagattatggcccgacgaggtctaccagaacgaactcccagattggccgccgttcagccagacgaaaacgacccagcaccggcggaatcgaacaaacaagcgccacaaccaccatcaagcagtcggcaacgtcattatgagctgataggaaccaaccttcttgtccgtcatcccagtaaacgttgcgttagttgacatgtcagggtattattctcgaacagtgtgtaaacacactattcacgtatacctctggcgtgtccggcgatgggatgcccgcggcggatatcggacacgatcttcccgatccggtcctgttcccggaccacgcagtccgcgaccatgcacgccaggggaaccggattgccgtacgcctgccactgctcgagccgtccggcgcaggtgctgccggcatcatgcctgatggcgatgggctcgtaccccgcctgcatgagcatcatgttgaggatctggcgtccggtacgcccgttgtcgtcggcgaacgggtggatgttctcgagtgcctccgcggaggcgcgctccgacggggggtaccatcatcggaaagtccgccggaagcggcggacttttccatatccgcctccgcatcgtccgaaacgcccattctcctcatcagagaatcatcaagaagttgttccgtgcttactttcaagaatcttgatgcattaaccaggtcgtatacagaccagcctgttttccccgacatctttagggacatggccgaacggccaattcccatcgcttcggccaagctggactgcgaataaccataagccgtcaatagcattttgacattgaaggtgattgtcgactccagctgcttttgataaggggctgcggacattttcttggagaccgaacggaaagattttcgtatgtccggtcttgaggaacgagagcgtgcggtggagttgtatttcaccacgccgatgacgacggcccaggtggtggagcatctgggttatccgaccaggcagtgtctggagcgttggctggcgatggattcccggtatgccggccatatggccaaacccatcatcccactggagaccaggcgaagggcagtcgagctggtgctgggcggcatgcagcagaagcaggccgccaaacagctcggcgtgagcgtaggcgcggtgcatggctgggtcagggcgtaccgcaagggcggcatggccgcgttgcagcccaaaaacaggaactccgcgcagggcaataagcccgcggactcccgccgccggccgtccgcagccgatgatgatgacgcggaggctttgcgccgcagggtcgaggaaccggaaccgggggaacgcgttgatgcgggaggtggcggaggctcgcagaaaaagaccccggcgccgacctgcggcgcctgtcgaacagggagaagaccctgttgatcgaccggttgaggccggcgtattcgcccggctcgatggcatgcttgcccggcatcgcgcccagcagccacctactgccaccacgcccggctcggagttgacaagtacgccggactcggggcggaggtggccggggcgttcgccgattccaagggcaggtacgggtaccgcaggatcaaggcggtgctcaagaccggcgtatcggagaagtcggtccgcaggatcatggcggaggaagggctcgtggcgcacgtgcccaagcgacgcaggtatagttcctacgagggcgagacgacgccggctcccgccaatctcgtcgaccgggacttcacggccgagcgtccgaacgagaagtggctga

SEQ ID NO: 23 - DNA, 30666 bp, Unknown
  R30_18m  MAG No. k141_6522
gagaaaccgaccgcggagaacggattggcaatcatcatcgcggagacggactgggtgccggccgttttgcgcatgggcgtggtctgggcaccataggagatcttgttgagcgcggaggccagggcctcggggtcgccggtcagcagactgccgtcttcgtcggcgtcgtattcgcgagtacgggagatggccatctgaatcagtgatgcggcaatcggcgcgagaatcacgctgaggagcacgccgatcaagccgagaccgcctgaattatcgcggtcgtcgcgcgagttgccgccgccgaaatacatcagagaataaccgaggtacgtgatgacggtggccatggcagaggcgatggcggaggtcagaatgtcgcggttgtacacgtgcatcagttcatgacccagcacgccgcgcaactcgcgggcgttcagaatctgcaggatgccctgcgtgcagcatacggcagcgtgacgttcgttgcggccggtggcgaaggcgttcggactcatggtgggcgcgatgtagatgcgaggcatcggcttgccggccttggcactcagctcgcgcacgatctggtagatttcgggggcttcctgctcgctgacctccctggctcccatggatgcgatggcgagtttgtcagagaaccagtatgagccgaacgtggtggccaacccgataatgacgtagatgcccagcgtctgctgcctgccgcccgtggcccaccatatcagcatgatgatggcccacatcaaggcgaacagcagcgtagtcttcaggccgttgaaatggccgtgcacccgtactttggcatccatgaggctcacactaaaatcactgcctgaatattggctggatgtgcgccgaggggtgaatcggatgggggttggcggtgcttacggtgcggttggcggggatcggaatagcctgtttacatgagattgacgatgcttgacagtgcggttgcttggcctgttttaccgctttaccgctttaccgattggtctgatcgggacgctttgcttgtttggcctgctttggctgcttggatcgtttggcccatcggcctgctcgactggcatgacactggcttttatataaataagaacgctggcgtataaccggcgttcttatttatcgatgtatcaatcgcgccgattgctgctggtgcagttgccggtgcgatgagctgatagtcaatcaggccagagcgagctcacgcatctggtcgggctcgatgaccttcttgtgctcgcggccctccttggcgccttcggcgcgctcgaaggcgtcgaccttcttccagccagcgaagtcaatcggcttgacgccgcggctttccagcagtcggtcgatggattcggggtcgcgatcctcggccacgcgaccaccttcggcggccttggccagatcctcaagcatgttggtcacgatggcaagtgcgtcggacttggtggagccgatcaggcccaccgggccgcgcttggcccagccagtggcgtacagacggtcgcgcacttcgccgccgtccgcttcggtggtgatgcggccatcgccattggcgttggccaggtgagcgccgtgctcgtcgtaggtgatgccgggagcctcggccggcttgtagccgatggcgtggtagacggcctcaaccgggtagtcggtgaactcgccggtgcggctcatcttgccgtcggcactggtttcggtgcgttccacgcggatggccttgaccttgccgtcctcgccgaggatttccgtgggtgcggagttgaagtgcacgtaatacttgcggtcggccggattgccttcgaagtcgacgtcgccgtcatcttccatgtcttcggccatctcgcggatggcgaacagttcctcgaccatctggcgggtgagcttgtccttgccggccacctcgatggtctcgtcgtccaaatcgaagtcgtcctcattgatgatgagctgcacgccgggcagcttctccatctcgcgcagttcctgcacgctgaacttggcctgggccacgccacgacggatgaacaggtgcagcaccttggccttgttgcggccgatgccctcgtacacgttgtcgggaatgtcggtcttggccttgaggtcgtcggcgttgcgcatgagctcgcgggccacatccatggccacgttgccgccgccgatcacggcgacgttctcggccgtcagcggccattcgcgggcaccggtgggatacccgtcgtaccattcgacgaacttggcggcgccatacacgccgtcgaggtcggcgccgggcaggttcagcggcttgtccttgactgcgccggtggcgaacagcacggcgtcgtagcgggcgagcaaatcatcgagggttacgtccttgccgaattccacgtcgcagtagaggtggatgtccggattgtcgagcgtcttctcgagtgcggatgcgatgaacttgatggacgggtggtccggggccacgccgtaacgcaccagaccgaacggtaccggcagcttctcgaacaggtcgatgcgggccttggtgccgaggccgagttcttcgcccagtttcttgagctggcgcaggaagatatcggatgagtagacgccggccggaccagcgccgattacagcaatgcggagttcagtattcacagattcagtcacgcgctctagcctaacgcaaagccttccgttgcaacagagggcgagtggtgggaattctgtgtattaggccatagtttgtgcgtttgggaaacctacgagcactgctaatgtcagattatgggtttccctattggtcaagttattgccgttctcattccaagaagcatgcgaggcggatcaggcccttacttcggatacgtttatgctgcaaggcggttatccacgcatttatgacacgagaatgccgctcaatctgttcttctcgaactacatcgacacttatatcgaacgtgatgtttccgaatatcttgatgtacgcaatttggctgaattccgccgattcttgactctttgcgcactcagttccggagcactcataaactacaccaacatcgccaatgaacttgatgtaagtccgcgaaccgtaaaggcatggatgtcgattctggaatcaagttacatcgcattccatctcatgccgttctacacgaacgcacgcaaacaggtggtcaaaacgccgaaactctatttttatgacactggcttgctgtgtcatctcttgggcattcggacggtcgaagcactggttgcgcatcccaagttcggcgatatatttgaaaacctcatcattgcggaaaccatgaaacagcatttgaacgccaatcaggagccacaattattcttctaccgcgatgccagcaaggtcgaggtggatttgttggatttcaccgatcctaacaaccgtatgctcatagaaatcaaatccggacaaacctatcatgaccggttcgcccgccatctcactttaattggcaatgttctcggtataccgtgtgagcaacagtacgtaaccagtcgggttgagcatagttatgtctcacaaggaatccgcgtcacctccgcccctcgattggctagaaggccgacggtaaagagccgccgcagagcagtaggaattctgtgcaatcagtgaatcccttgaggcattaaagacgtcacctccaacggctctttacgacctcgattgcattcattaggtcatttcttcgttcattaggtcggagagtgctgaagccatcccttggaacggcggggtttcaagggccgctccgaccaaggaccgacctaataaacgtcaaatcgacctaatgaataactccgatgctattgctgctttcgtgggtgggatttccgtttccgccacgtcaccaaccgtatcgccccgattatgtttcgatgcggtggactcgacatacgaccatcccggtcagtcaactgacctacaaaaacagcagaagcctcatattcttaatcagtcccgatcaattagggcagtgagggcccagaggatgctcaccacgtcgatggcctcctggaggaaggcaccgacgacgaccgggataaggttgaacgcggcggcaatcatgccgatggtggcaagcacaaggcccgcgattacggcttgaagcatcacgcgcttggtgcgacgtgcaatggcgatggcgcgcggcacggcggcgatattgtcattcataatgaccacctgagcgctttcggaagcggcggtggacgtgccatcggtcatggccacgccgatatcggcaacagcgagcaccggggcatcattcacaccgtcaccaaccatcatcgtgacggttttgccggctcctgtagcggccctgactgcggctaccttatcctccgggaacagttcggcgtgaacctcgtcaatgccgacttcgctggcaatgatattggcggaagcccgcttgtcaccggtaagcatggcgagctcggtgacgcccaactcatgcagtttggcgagcactgccttggcgttggcgcgcggcacgtcgcgcagcacgatgcgcgcgatcagccggccgtcaacggacacatacgacgccatctcatccggctgcagcaggccaaagcgagtgcgcaggtcatctttttgctgagctccccctcttagggggagctggccgcttcgcgggctgaggggggcagcctcgccgaccgccaggaatccatcctccccggcggccgcgaaagacagccggccaacgcgcaccgcgtggccgttcacctcgccggaaacgcctttgccggcgtcttcattgatgttcttgacgaccggatactcccgtccatggccgggccagctggcctccggctcggggcataggcgctgaccatcctcgaaccgctggcgcagtcgggccatcgcctccacgccagccttggcaatgcctttggacaggatgtgcaccgagtagctttccaccacgccggccatcatcagcacatggtcttcgttgagacgggttgcggcgccgggcagcatctcgacgcgcacgacctgcggctgcttgacggtgagcgtaccggttttgtcgaagaacacctgcgtgacgcggccaaggttttccaacacgtcctgcgctttgataagcacgccggctgcggcgaggcgtccggttccggcgatgtacgccaccggtgcggcgatgagcagcgggcagggcgtggccagcaccagcacctgggcgaatcgcgtcggcaccccggacatcgcccatgcgatgccggcaatcatcagcgagagcacggtaaagggcacagccaagcggtcggcggtttttaccacggccgggcgcgactcctgcgcggaggccacgagctcgaggatgcgctggtactgcgaatcggcggccacctgggtggcacgcatggtcaatgcagtcgagccgttcaccgcgccggacatcacgcgggcgccggcgaacacttcacgcggcaccggctcaccgttgatattgctcaggtcgagcgtggccgtgccggacagcagctcaccgtcaaccggcacagtttcgcccggcagcaccatgagtacatcgcccagctgcacctgctcgaccggcaccgtgtcgaagcggtgcgcggcggccgcagccgacgccaagcccacacgccggaagccatcggacgaatcgcccttatcggtagcaaacccacaccccacaccaggcaggttgacgacgtgtgcggtctgcggcgcggcttccataagcgcggtcagactgcgctcggccttggcttgggcgtattcctcaatggcctcgccggacgtaatcatcagcgtcaccgcccaacttgcccagtattcggcgacggccacggtggagaggatcgcgaccacggccagcacatcaaccccgacctgcccgtggcgcaaatcgtcaatcatgccgcgcacagtgtcaatcacgataatcagcaccaatgcgataaccagccactggccgaagcccggattgccaagtaccggaatcgccatcgcattgccccacggacgccaatcgcccagtaaagccagcggaattgcggcgatgacgacgaccggaagcatcggcacaagcttgcagatgtcgagaattttggtgaagaatctgatgagtgcgcccatcattgctccttacgctcgtatacggagtcgattgcggtacggcaagcgtggcccgcgcaatcggcgctgcggtcacgccttgttaacccaccggcggctttgcctggggcttcgctttgctcggctcccgcgcgaccttccgatacacggcgtaaagaaatgttcagttttgtattgaattatgcgctttgttcggagcaccgcccgaactcagtgcttgacctaccctatcaacgagcgttgcgcgacatgccggatatcgaaactacgttggcggcatgggcgcagggcacaatagcgtatacgaaaggcccgtggcaggagtttgctcactgccacgggcctttgcttgtctgacacggtgttcagcggttaccgctcaacaccgtgtgacgttgtcgagtcggctttaccacaggccgaatgggtcggagaagccgccgccgtcaccggtgccgccatcgctgttgccattgccgttaccgttaccgttaccgtaaccattccggccgttgccgttctggttgttctgcttattctggctgttaccgttggaatcggagctggacgaaccgttcaccgacgactcctcctgatcgagcgtcacgtccacatccatggtcttgccgtcgcgcacgatggtcagcgtcaccttgtctcccaaagccgcggcacgaacgtaaccaagcagcgagtagttgttgttcaccgcgttgccgttgaaggccacgatggtgtcgccctccttgaggccggccttgtcggccgggccgccggagacgaccgcgctgccggtggcgctggacttggtgatggtcgcgccgccgcgagtcacgccgtcggcttcaaccgtgtcggacttgatgaccacgccgagggcaacgtgcttgaccttgccgtccttgatgatttcgtcggccacacgcttgacgaggttggacgggatggcgaagccgatgccgatcgaacccgcggagtcggatgaggtggcggtcgaggcgatggacgagttgatgccgatcacctggccggccgcgttgaaggtcgggccgccggagttgccggggttgatggccgcgtcgatctggacggcgttggtgacgatctcgttgttgttgtcgtcggtcacggtcaccgggcggttcagggcggagacgatgccggtggtggcggtgtcgtcgtagccgagcgggttgccgatggccatcacgttctcgccgacggcgagcttgtcggaatcggcgaatttcacggccttgaggtcgctcggcgggttgtcgagcttgatgaccgcaagatcggtggtggtgtcggtgccgacgagcgtggcggaatacatgttgccgttggcaagcgtcacctgaatctgctgggcaccggagatcacgtggttgttggtgatgatgtggccttcggtgtcgatgatggcgccggagcccttggcggtgccgttgctcaacgcggtctggatggagaccacggagccggagacatcgctggcgacagtctgccagtcgggggcttcgccgctcttggcggtggcggacccggagccggacttattcgagctgacgttggacagcgaattgctggtcggcaaggtgatcaggccgctggtgagggcgccgtaaccgaggcccaggcagagggccgcagccagaacggcggcgaccacggcgatgaggatgttgctcgccgtcttggacatgccctgcttggcggggccgggctgaccgggatgtcccggctgggccgggccttgaccgttcggcgtaccggtaccgggagtgccgaaaccgaacagaccgccctgctggggctgctggccattccggccattctgaccggactggctggcaaacgggttgccgttgttctgctgcggctgcgtgggcggattgaacggattgccgttgccctgcggctgcgggttattggtgtagtagggattgcggttgccctgctggccctgtggggtttgctgtgcaggctgaccgaacgggaattgctgcgtgggctgggcattgctgccggcctggccgccctgctggccctgtgcctgagtcggggtcggaccataagcgccatattccggggccggacgatacagcggagttgtggccgaggtctggcctgcggccggcgctgccggagaagccggcgaggaggagaccaccgtgctctcgcccttggcggaggcgtagtccgggatgggctcggtggcggcagtgtcggtagcggcttgtgtaggctgctgatcggcagcgagggcggccgaggaaaccggggcttgctgctcgctggaatcgctggcgttgccggcatcaaccgagtcgccacccacaaacgggttcttcggctcggcgttgccggtatcggcagtactattggggttttcgttattccgcgaggtctggtcgacgccctgcgggttaaattcgtcagccattgctgctccttttcctaaattcctatcacgtctgttcggcggctattcgggcacttgcccattgccacttctcgtgtgctacctcagtagtaaaggcagtcaatctggaggttttctgaacgttgattgaaagtctatgcgtaatcatcgcagagtcttatgggcatctcggcttcgaggggctgatttcctgtttcgggaacatctacttgcacttcaaggggctgttcgcgcggtcaattccgagtatcaagggccctcatttaacgccattccgccatttttgcagccggcctacttgaccgggagccccttgaagcggaagtagacgttcgggagcggcgaaatccgcccctcgaaaccgagttcttcacaatttccggcccttttctggcccttctgcctaaagtgaacatatgacgatcagccttcttgaacatccgttgggcgcacagcccggacagcccggcgaccgcagcgccttccatttcgaaacgatcacccgcctgccatccacggccagcgggcttgggcgagacggtgcccgatacggccgcaccggcatcattcacacgccccacggcgatattcgcacgcctgccttcgtgccggtgggcacgcaagccgcgatgaaggccgtgttgcccgagcagatgaaggatctaggcgcacagtgcctgctggccaacgccttccacctgttcgagcgcccgggcgaggacgtgctggacgcggccggcggcttggcgcgtttcatgaactgggatgggcccacgttcaccgattctggcggtttccaggtcatgtcgctgggcgtcggcttcaagaagacgctggcgatggacgtgaccggcatgaagtcggacgacatcatcgccaagggcaaggagcgcatggcctgggtggatgaggacggcgtgacgttcaagtcgcctttgaatggtgacgcacatcgtttctccgctgagatttcgatgggcatccagcacaaaatcggcgcagacatcatgttcgcgttcgacgaactcaccacgctgatgaacacccgctcctaccaggaggactcggtggagcgcaccttccgctgggcccgccgatgcgtggacgagcaccagcggctgacggctgagcggctgggcaagccctatcaggcgctgtatggcgtggtgcagggcgcgaattacgaggatctacgccggcgcgcggcctcgcagatcgcctcgctggacttcgacggcgtgggaatcggcggcgcaatcgagaagcgcatcattggagacacctgcgcgtggatctgcgacgcgatgccggagaaccgcccgcgccatgtgctgggcatcgcctccgtggacgatatcttcgcgtgcgtggagaacggcggcgacaccttcgactgcgtggcccccgcgcgctgcgcccgcaacggcgcgatctacacgcgcgccggccggtacaacatcaagcgcgcccagcataagttcgatttcgggccgctggaggagggatgcgactgctacacatgccagcattattcgcgcgcgtacgtcgaccacctgctgcgcgcccgcgagttcaacgggtttacgttggccacgatccataacgagcatttcttcgtgaagctgctagacgacatccgcgcctcgatcgacggcggatactttgatgagttccgcgacgaagcgttggcccacttctacggcaacggcgagcgccggccagggttgtgagtttttctccttcgttgcggcttgtgccgaacttctctctgctcccctcgctgaggctgagacgttaagcaaacagcccagtgggctgtttgtagtcgaaggtgagacgatagtcgaaccagcaggttgcaggcaaggcccgtccttaattgcggacgagctgtcacgaagtgactgaggggagtgccgccaccctcaaagatcacggcgcccgcaggagacccacaagcgatatatccctgcctcccatgcgacacgccgaagattgcatgattacccagccgggtgtaagttagtcgattgtctgcgagtgtggcggaatggtagacgcgctgtcttcaggtggcagtgagtgtatgctcgtgggggttcaactccccccactcgcaccagcaactaaagggctggaatcggaaggttccagcccttttgctttgtccgggcaagcgccgtttttcagggggggctttaggacttgagacttatggcccaactttcgtggcggaaaatgtcccggtacctgcatcaatcgtttgacgttcaagccaggccagaatccgctgtcccggttcgcgatttcgggcgatctttgcaaaccgggacaatttttgttgccccggtataaatgtcaatcgatttatgcgaaaaccgggacaacgtgccaattccagaatcggccttattccgccgattccgtctgccagacgatatgagttgaggaaaccggagtgtcccggttcacgaaaacaagccgaaatcgccgaccgggacagcggattctgccccggtcgacaggtcaaacgattgacatatgaaccgggacaaatacagatcagagagaagcccatgaagcagatttaactttcctcaactttccatccgccataaactagcattacataacatcatgaaccgagacgaaaccaacgaagtatctggagtcaccgacgaccagctcggccgaacggccgagccgtacgaatccggcaactggcggggcggcgtcgggagcatcattcgcagcaatccgaaatcaggaaccgacacaagtcggacccagcagacacgcataatacgagttcacagactcagcgatgtattccgcaaccgcaccaccgaataccacaccacggaagaactgtaagcattacgaaatcaaccttgattattgcgcgggcctatactaggttacggtagcgtaagttagtggccgggagagcgtcgccggccatagcgaggtgatcagtatgagcgtttccatcagcacgccatctggacgaaacatggcttccgccgcaacagttgcgccttccacaaccgcgagtcaaaaatccagcgcaagcaccagccccaccgcactggaccacgcatcggctcagtacagggccgcgcaatcgcgctatcgccaagccaaggccgcgctgaaggcgatcaaacgccaaatcgtccccgtggacgcattcggcaatcgcaagccgcgcctgcgcggatggctgcacctcgccaccctgccgctgtgcatcgcggcgtccatcgtactgatctgtatcgcgccggcagggcccgtcaaagcggcgtgcgcggtgtacggcgcctcggccatgctgctgttcggcaacagcgcgctgctgcacgtcgtgccgtggcgcagcgcgaaggtgactcgcgtgctgtgcggcatcgattattcgaacatcttcctcatcatcgccggcaccaacacacccgtgctgttcgcgctcagcccggcgattcgccggccatatctgacggtgatctgggcgaccacggcgattggcacgatactgcatatcgtctggctgcggacgccgaactgggtgttcaccaccgtatacgtcgtgttggggctggccccggtaacgcttattccgcagctctggacggctcccgcagtaggcccggcgccgaccgtgctcatcgcgtgcggaggcgccgcgtacatcgccggcgccgtgtgttttgcgctgcgcaagccgaaccccgtccccggctggttcgagtttcacgaggtgtttcacttgggcacggtcatcgggtatgcctgccacgtcgtggcgatttatctgattgtctgcgcgctgtaggttcgctcgcccagcaccgaggcgggccttcatacgttacgagataggtccttgaccagccagccgtgacggccgccttcatagacctcgtcagtgagccggtagccgcactgctcatagaacttgtagtggtcgttttccgagtgcacggcggtcatggttccgccggcttgcgcgatgcggcgttcggcgtcagccagcagccgcgagccgatataccggccttgtgcctcgggcagtaccgccaggcgcgcgatgatgtatcgcccgggctggtcgggatgatcggggtccgcgtagaaccgacaggtcgctacggggtgattctggctgggctgaatgggctggctgcgtgaggccaattgcgcggacgagccagggcgattgggcgcatcattatccgaatcgaacaccagcagatgcacggacgcggcatcccattcatcgaactccggccgccagtcgcgttcgcggatgaacacctgctcgcgtatggcgcgggcggcggcgggcagccggtcgtatgcttcgattcgtatggtcatgagcgtcagtgtaatgcgtcacgataaccgacaaagcccggctcggtggacgagctcgggcccaagctcggcaggctcaggccgtacgcgcgatctgcacggcggtgccggacgcggtgaccatcagcatgccgttgtcggcgccgagcacctcgtagtcgatgtccacgccgaccacggcgtgcgcgcccatcgcctccgcacgctgctgcatctcggcgatggcctcgttgcgggcacgcatcagctcttcctcatagccctggctgcggccgccgaacatgttacgcaggcccgcgccaagatccttgaacatgttcacaccggataccacttcgccgaagacgatgccctggtaattggtgatggtgtatccgtcgacggacggggtggtggtgacgagaatcatggcgaggctcctttggcttgtctgcgtagataaatcactgccgagagtcggaccgttcccgaatctcacctcggaaacggatcgcttctcttggctaccacaatagtcggcagcgtccacaccgacattttcgacccgtccgatcgcataatcaaaagcatcaggatcgatatgcaaaaccaccgaggatcgtggatcgcttgtggatcttgaagcgttgtatcctggttgttcatggagcgggaacgcaaaatcattaacgtcgtgggagctgcaatcgtcaccaacggcaccgtactatgcgcccagcgtggcccgggaaagtcgttggccggatactgggagttccccggcggcaaaattgagcctcatgaaacagcgcggcaagccttgcaccgcgaaatcgaagaagagctgttatgcgaagttgaggtcgcggaagaggtatgtaccagcgaatacgcctacgactttggaaccgtggggctcaccacattcatctgtcacctcatcgccggtacgccgcatctcaccgagcacaccgatatccgatggctgaatcctgctgatatgccgacattgaactgggctccggtagatcgcgaagcagtcgcgattatcgcgaacaaacaactgacgctccgatgaacgcgccacagcgcagtcaggcagtcatcaaacgatccgaatcgcaagggaacagggcaacatgtctataaatctggtcagcacctcagactctccagccaacacgcaacatcacgattctgatccaaccccctcgatcctcgaagatgtcatctcaggtctgatcgagccgcgctcagatgctcccggcgaatataagccgaccctcatcgcaaatcgccccggtggattgaccatgcgcgaggaaatcggcaattccttggctactagcgattccttcgacatttctgtcgcattcgtctcggctgaggccgtgctcagcttatttgaagacttcagaagtcaccatgaaacagcgacccgagcgggcacactgattacctcaacgaaaaatcatttcaacgatcccagggcattctgggagctgctgcatcttcagaacaccactggtgttgacgttcgcgtgtgggaaggttcccgtaatacctcagtttccgcaatggctcaaggacaaccattccatcccaagggatatatcttttctcgccgcatgaaagacggtacaccctattacgacctgtacgttggcagttccaatctcactggagccgcattgaccacgcaacgcgaatggaatctcaaagtctcatcgctggcggatggagagctggtcgggcagttccaggatgaaatcgactcacaggtggctgattccgttccgctgaccgaagagtggatcaaacagtatgaggaagatttcaagaaatacgccccaccacgtcatgagattctgcagtcgcttgaggggcatgacattcagccaaacgccatgcaacaggaggcgttggcgaatctcaagaagattcgtgaacaaggcgagcaccgcgcaattatcgtgtcggccaccggcaccggaaagacgtacctttccgcattcgacgtacgcgaatgccagccgaagcgcatgctgtacatcgcccagcagcagatgattcttcaaactgcaatgaagtcttaccaaaaggtgctcggctgcgatgaatccgaattgggattgtattcaggcaccagcaagcaacagggccgccgctacgtattcgccacggtacagacgatgcggcagccggaggttttggcgcaattcaaatccgatgaattcgactacgttctggttgacgaagttcatcacgctggagccgaaggatatcagcgcgtcatcaatcatttcaaagatgccgacttcatgctcggcatgaccgccacgccagagcgcaccgacggcatcaacatcttcgagctattcgggcataacatcgcgtacgaaattcgcttgcaaaaggcgttggacgagaacatgctctgtccattccactactacggtgttgcggaataccttggctccaacgacgatccgaatggaatcgcccatcgtctcgatgtctccaagggccttgatgcgaaggactcgaaacagctcaagtacgagatcgagcagcttgccaccgaaaagcgagtccgctacatcattgacaagttgcaggaatatgggcagttcaacattccggtcaccggactcgtgttctgcagtcgacaggaggaagcccataagctatcccagctgtttaaccaacagtggaatcaacaagccgaacgcccctatcgcaccgctgccgttaccagcacggacgatgacggcaggcccgtgtcccaaacgcagcgagacgaatacgtccgcaagctcattgaaggcgaactcgactatctcttcactgtcgatatgttcaatgagggagttgatattcccgccgtcaaccaaatcgtcatgttgcgcagcaccgaatccagcattatcttcacgcagcagctcgggcgcggactgcgcaaattcccgcacaaagaaagcgttgtggttatcgatttcattggcaattacaacaacaactatctgattccggtggcattatacggcaacaccggcgaccgtgacagagctcgcaagaacctgcagagaaagtcaatcggcctgtcgtccatcagtttcgacccgatcgccaaggagcgcatccttaagtctttggacaccgccgactggtccgacatgaaaaagctgtccgaacagtatcgccaagtccgttacgagctgggccgcatccccatgcttacggacatctataactacgacccctcactgccgtataccatcgcatcgaagcgcagcaactatcttgatttcgtgcgttcccgtgaaaaaagcctgggcaaaggcaaacatcatgaagcgacatttgaggatcagttggagccggtgaccgacgttgaagacgcgatactcaagatggcagcggagctgctgctgcccggattgcgaccgcacgaattggtcattcttgctcagctatgccatttcgtcagcgaacggctcgacgacgacgtaccgcagcattggagtgcgggctcgccaatcggccgcagcgaattgctcgatgcaattcgtactgaattcccgcagtccgatagttcagacacgcaattcgactctgcgatcagcgtgctcgattactcatatttcaccggcccaaactgcaatcgtttcggcaatcagccattagtcgaagccgtgaacagcaccggcacagaaaacggtaccgcatatcggttgaacagcagattcgccgatatgcttgccacgaacagaacgttccgtatcttctttgcggacactctgcgcaccggtatggccaattgccgagatatattccgtgaggccgccgccaggcaacaggtctttgatcacatgttcttgtacgaacgcaaatattccatggcagacgtcatgcgactgtgcggatggaagaaggagaatactccgcaaaacgtgggtggttacctcctcgacaaggaaaccaataccatgcccatcttcgtgaaatacgcggcaagtcaatacgaagatgaattcctgagcacacaggaaatgaaatacttcagcaagaatggacgaactccgcagtctcccgaattccaatgggcgcttaacggcattggcccgaattggggccagacgcatttcgtcccgttattcgttatgcgcaaggcggaagaggccgagggtaagtactactacgttggccacgttgctgcgtttgacaaccctcagctcaccaccaaacctgacgcaagcggacaaggcagcgtgaaggtcacgctgtcgatcctgcggttggcccggccaatcgatccggagctctatcggcatttggtcagctgatgcctctcaactccgcaagcgtacggcggcggccattccgccgtcgccgtaggtggggtgggtcatgaaggcttggctggcggtggtgtcaccgcacatcaacgattcccacatggttaagcggctcatggagatggcttcaacgccgaggatggcgtcggcgatgtgcgcggcgtagagatcgcggtgcttggcgatcaggaagcgcatgagatcgaggcgcttggtcatgctggtcacgtttgaggaggccagggccgtgcggtactcgatcagcggctcgggggcgatgccgatatgggccgcgtcttttgcgggattctctgtatcccaggcactcccaaaacctccgacatgctcagtaccgccagtaaccccagcaccgcagatatcgttttccaccgtcaatccgcactccaacaacgacaggaagaagtcccagtcctcgaagccgccgcgcatcgactcgtcgtagccgccgcagcactcccacgcgacacggcgaatcatgcacgtggccgggcagcaattatgcgacacgaacgcggcggcattgccaccagtcggctggaccactgattccaggacaccgaaagtctgcagccagccggatacggcgaccatcgttttgtcggcggacaacatcgacaacgtgcgctcaatgaaggccggccgcaaacggtcatcgccatccaacaccactacgaacggcgtttcggcggcggcgatgccacggttgcgcgcggcggaaggaccggcgtttgcctggccgatgaggtcgatggccacaccattcgcatccatcgccccgtgccggcaatcgtcgagagtggcgttcagcatctcgacggatgcgtggtcatcggacccatcgttcacgatgatgatccgttccggacgaaccgtctggggccaatgacgactcgactgcctcgtgaatcaacgggccctgattgtagctggtaattaccactgtcactgctgccatggcggcaagtctatcggggccggacgtgggccatccaccggcgctgcgcgctgcctcccgccagtggggaggtggcgcgctatccccggctaacgctgatgcatgtgtgcgggcacgggtttggtgcggactttggtggtgaagtagtcggactcaatcttccacaccgtgacgctgcggacctgcgcatcagtgaattccacattcggcatatgcgcctgctgcgccatcagcgtctgcaagccgtggcggcattcatccagatcctcgaccagtgacgccgtgccattgccgacgatcgacttgaacgcctcaccccaattgcacgtggtgcggcccgccaccacctcgcagtcggtctgcatggtgaaagccacgggcagtcggccaccggcggcggcgcgaatcgcgtcgagcttgcggccgcgcggcgcggagtggaaccagagcgtcagcttgccagtcgcctcgtcgtaatcaaagccgaaattcagcggcacgatagtcaggccctcggcatccgcataggccacttcaacgatgtcgcaggcggcgatgatcgcggcgatccgctcgggatcggtcacctcgcggtccgcacggcgcatcatgcgatgctcgccggcgaccgtgtgctcatcctcacgcttggcgggcttgcgagcgcccgcgatattctccatgctcatgcctgatcgtccccatccacaaccgcaatccagtcgccgtagccttcctcggccatgcgcgagcgcggcacgaagcgcagggcggcggaattcatgcagtagcgcaggccgccgcggtcggccgggccgtcggtgaacacgtggcccaagtgaatctgtgtgtccgacgtgcgcacttcgatgcggtcgcggcccggaatgcggtggtcctcatgctcggtcagcaagtcaccggcaatcgggcgggagaacgcgggccagccgcagccggaatcgaatttgtcttgcgacgagaacagcggttcgccactgacgatgtccacgtagatgccgggctcaaactcctcgtcatactcgttgacgaacgggcgctcggtggcggcgttctgcgtgacggcgaactgttcgagcgtcagatcccagatgcgttccacgtacttctgacggcgtttcacgttcgcgattgcggcgatcggtacatggcagtagccgccggggttgttcaccagatagtcctgatggtgtgcctcggccgggtagaagttgcgcagcggttcgaccagtacggccgggcgctgcggctggcggtcgaccagctgctccagagccgccacatacacggcgcgctgcgtctcgtccgtgtagaacatgccggtgcggtactgccggccgcggtcctcgccctgctggtccacggagaacgggtcgatgacctccaggaacagcaatgtcagcgtccgcaggctgacctgtgccgggtcaaactcgactttcacggtttcggccgcatcggtgccgcccgcgcatacctgctcgtaggtcggcgattcgacggtggattgcgcgtagccgaccgtggtatccgtaacgccgtcgacgttctggaagtagcgctccagaccccagaagcagccgccggcgaagtatgcgacctgcgcggtgccgtcgccgcgctcgttgttccgttcgttcatgcgtcccacgttactacgccatgacggcgcgcgccgttcacgaccgcagcgtgctgagcatgccggccacttcggcgggcgtcacgctgggcacgtaggcgcgcaccaccgcgagcccgatctgcggcaacgccgccgggtccgggtagcacacgtagaccggcgcttcggtgggctggaacttgcgcttgaagttgaacagcgagtggaagccgtaggcgggttccatccagtcggccacgatctgcagcgcgtgttggagcacctgcgtgccttcgctggccggtgccccgtcctccccggcgttgtcccgatcgggattcatgccggccaggggcgccgcggacaggctcatgaactccacggcgcgcgtgggatcggcttcgccctcgtcacgcagccgctcggccatgcgcgcgatcaggaactccatgatgccgttggggctgtcggtgcgatggcgcatgaaatccaacgtccagccgacgatgcgcccgtcgcgccaggtgggcaaccagctggtgacgcccagcacgcgcccgtccgcgtcgatggcgtaaagcagccgcacgcgcgggtcgcgcagttcctcgacgccgccgagcgtgaacttcatttccggcagcgccttgagctgcgcccactcctcggagatgtcctcgatctgttcgcgcacatcgagcgacgcttccaggaatgtggactgcacgtcggtcacgccgtcgcgcttggccttgttgatggcggtgcgcacgtcctgccatttcttgccggtcgtcttccagccgcgcgggtcgaccaccatttcgctgccgacctcgatggagttccagccggcttccagcaacgcgtcgcgctgttcccgatgcacgccgtagaacaccggcgacagcgaacgttccgcacagtgctgggcgaaaccgttcagatcgtccatccattccgccggatcgccgaacggtccggtgcaggtcagggcgatgccgttgagcacgcgatacgccacggccgatctgcccgtgggggacagccagtagctgttgccttcccacgtggtcatgaagctcatcgattcgccgccggtttcgaccagacgttcggcgcgcgcccgggctcgctcgtttgattcgctcacgtcgcccatccagtggatcaccacggccagcaccacgatccagaacaccaggccgacgccttggtacatgatcgaggccatcggagtgcgcggcacgaacgacagcttcatatggctcaggaagccgatgggcaggaagcgtcccggcagctcggccagcagcgacgaggccgtagcgcgtggcgagaaggtggcgggttgggcgatgccgtatatcaggtatatggcggcgcacgccagccaggccagcacgatggcgccgatgccgccgaccagcctgcaccagccgatgcggatcgggaagtgtttcatcgccgccagcagggcgatggcgaacagcagcgggggcaggacgttcgccacgcaggccacgatcgcgccgtgctgcagcagggaggccatgccgtccggcgcgaagctcagcggcacgaccagatagtaggcgacggcgatggccaccgtgaacagattgatggccacggtgcagatggccgcgaaccgacgtccgcgatacaggccccacgccagcaccagggtcacggcggtgggcagcaacgagcgcaacaccgcgccgggcatcgaggcccgcagcagatcgaactgcaggaagcagccgccgtgcgtgtcaccggccaggcatttggccagcatgccatcgtcgacggaaaccgggctcatgagcaggccgatcgtgctgagcgggcccgcatggttatgggaggtgatggcgatgaccggccccagggccagtaccacggcgatggccgcgaatatgcgccgcgcctcgaaggaggtgctgcgcagccagtgccattcggcttcgacgtgcgcgggcggaccggccatcacacggccggcggcatggccgatcagcgcggcggcgagtatgcagtagccgctggggttgccgctgtagagcaacgtgaccaggatcgccacatagccgacgagtcggatgcgcctgcgccataggtggctgcagaacgcgctggccgccatgagcgcgccgaccggcaacaccagcgggctcaatgcgaaccgcatgcgggagacgaacagggagtcctggaacatccatccggccgccgcgcacagggtcaggcccgccagcacgccgccggccgcgcaggcgagcgcggtgacgacggtgcgcacacggccgagccatggttcggctatcgacaacatgacgagccacaggatggcgtcgaccatgagttggatgacgccgcgcgccaggaacagcgagcagatgagtttgccggcgttgaatgcggccatgctggtgctgagccgcagcggaaacgcgaatccggccatcgcggccaccagccacgccaccagattcagcgccaccagcgccgccgtggcggtgacggccaaccggtggtcgtccgcccactgccgcacgtcaccggccagttcacgccagctttccgccgcatggctggaccttgccgtatgcggtttggtggcgcgggaggtcgtggcgggcttcgtccgcgagggttccgcgtcccgcaggggccgccgcgtctgcggcatggccgccggccgcgcgttcccatgctgttgttcttcgctcattgcaacacctccacttgtgggtattcctccaacgatttcgtcatttcgcccagcccggttcgcgcgccgaaccagtcgagaccggggttccagaccgcctgcaccgcatgccagtcatggtcggcgccaggcacgaccagttcggtggtctccatgccggccgcgcgggcggccgcggcgatggtgcgcatgttggctaccgacttccgatcccctttgccggcgccggcgaacagcgcctggccggccgtgccggtggcggcgatggcgttgaccggcacctgcccgtcgtaggccttgcggtcgccggcgaaatatcgccggaccatcgtctcgacgctgccgtcggtcggctcgagctcaccatccaccggcagcatcgcaccgtagatgtcggggtgacgcggcaccagctgcgtggtgcaggtgccgccttgcgagaacccgcccatcgcccacatacgggccgacttggctaccggcagcgtcgccctggcccagttcaccacgtccttggtgaggtaggtttcggcgttgcctcgggtggtgtcggcgcacaggctgttgtgcatggccgaaccgttctggtcgggtgcgagcacgatcggcgccagcccgtcatgttcggcggcgtaagcgttcatcgtggcggcgatgttgccagcgtcgatgaggcgaccgggactgcccggctgaccggcgagcagctccatcaccggcagggccggcgggcggtcggacagcgcggcgggcggcaggtagaccatcgccttgcgcgccttgaacttggattcggtgttcgggatgctgacgacgaacaccctgcccgagtcgggcatggatggcagagcgtccttgcgcgccttgtcgcgccactcgccgacgctcatcgaggctttgcgcacggtgaccgaaccgagcggggggtatggcgtatagccgacgagactgccgatggtctggtattcgccgtagatcgagtccacgccgagcgcggtggacgccagcaccagcggcaccagcacgacggccagcgcgcgacgggccccccgtaacgtcacggcggcggccagcacgaagccgaggcccgcgaagcctcccgcgacggtgaggatcaccggccagcccaacgatacgccgaacaccatgaacacgtcggacatcagccatgtggccagtagtccgcccgcgccggcgagcacggcggcggccagcgcggcggccagcggatgcaagtgacgacgttgcggcgtacgcaggccatgggaaataaacgtctcttccgtcgaagctgcggatgacgccgtagcagccgcgttcgtaggctggttggccggctggttatctgggtcgacgggcgattgggccgacgattcgccgtccggcgccaggccgtccggcgccaggccgtctgctgccgggccgcgcttcttgctcaatgccagcccaacaatcagtatgattgccgcgatcgcggtcagtccgaacacggtccacggcacgattccgcggaccagcgacaattccatgaacgtcttccaaacggagttcttcatccttcgtccccgcgctccaggctcctcgtcttgtaagctcacgcaatactagcgcgcgattcatagagcgtcacccaatttcacaaaaattgtcgcgagttctcatggtttccccagactccgttcagctcctgttcacatccggcctggacgtccgcagctcaaggccagtgtcggcgctggattagcggtgcgcaggcttgtcccagctttagccggaagcagggaatatgttggtggatatgactcacgcaaacgaacaacgtccagcagcgaccggcaatgtcgccgataacgtgtctgacgcccctactgaccccgcgacgagcgcggcggcaaggcccacgaccggcacggctgatggcacaacagccacaaacgccgcggccagttcaacagcaaaacccgcagccagcacctcttggaccagggaaaccaacccacgtcgagcactgttgacgattatcgtcacggtggtggttgtggtggccatcgtactggggctcggattcttcgtgaactggggattggcggccctttcggtgatcattatgattccgggggcgatttcgctggccgttctcgccaagcaccctgaatccaccggcgggcgcagcatgttcggcatctccgatccgaatacgctgcttgacccgattcgccgcccgtccgagcgccgcggcgagtaagttgctgctgcccatcgggcggtaatttacccatggggcggtaaaaggcccatggggcggtttgaagaaattgtgaaacggcagaataaagccattttgggataccgccccatgagggttttaccgccccatgggattattaccgccccatgagcaaagccaccccgctatttgcgcgcactgaccaagtaattgagcaccgatccggcggccaccagcagcgcgccacaccaaaacggcagcgacagcgccaaacccagcagcaccgcaccggccccggtggacagcaccggcgtggcataggacgcaatagccagccgctccatagacccatgcagaatgccatagccccagcaggcataaccgccgccaatcgccgccgcggcaatcaacacaaacagccatgcgaccagactcggcggctcggccggccacccctgcccggacgcgaagtggataatccacaacgccacggccacgcaggggaagaacaatgaagtgccgtccaccccatgactcatggctggcgtgaacaccgcgtacaccgaccaagcgagcgcgcccgcgaacgccagcgcatagggcaaagggttggcggcgatatgctgcacggccgcatgccagtcgagcccggaattaccgccgaccgccagcaccacgccggcagtggccacaatcgcgcccggcagcaccttgacgaccgcgtgcttgcgatgggatacgcccgccgacagcagcaccatcatcgtgggccacagatagttgaccaggctcacttccaccgaggatgcgtcggtagaggccagacccagcgagagggatatcgacgattcgtaaaatacgaacaacaggccgccgataatcaagtatttcttggggaactcgcgaatcgggaccgggcgccggaacatcagcagcaggatgccgccgaccgtgtagatcagggccgaaccaagcgtggcaccgaagttttcggagacgatgcgcacggtgccggccatgaagctccacagcaggatcgccatcaggccgatggtcgtggcgcgcgcggatacgacgtggccgccggaacggctcgccgccggggccggcgtgccgcttgcgttctgtgcgccgttcgccatatgtccgcctctcttgcctcgtttcgaaggcattctactcatcggatgtgtacagctgcagaacggcacacgaccggcgcgcgaacagggtggggttcggtgattgaaacagcaaaatgccgggtagggtaaatccctactcggcatttgcattggctatgtttcccgccgtctgtcaggttagtcggcgttgaaagcgtagggcaggcggcgtgggaagcatggtttggttacgatttatctctcccccacccgcttcgcgggagctccctcgtcagagggggcaaagctactcgaagcgggacttcgggacgaatcaagtatcgtcagccctcaatcgcgatttggtgcttggactcgacttgcggctgggcctgcatcttcggaacctggatgcacagcgtgccgttccggtagctggcgtggatgtcggactccttcacgtcctcgccaacgtagaaactacgcgagcaggagcccatgtagcgttcgcgacgcagccacttgcccgaatcggacgcgcaagcgcacttgctgtcggaagcctcgccctcagcggccggagccttgtcctcatgctcgctgcaacgcgaggcggacacggtcagatagccgttgttgagctcaaggttgatatcttccttcttaaagccaggcatatcgatgtcgacgtcgtaacccttgtcggtctcgcgcacatcggtggtcatcatgttggcaggcattgcggcactcatcgtgttgtccgtgttgcgccaaccctcaaagaacggatcatcgaacagatccgagaacatcgtgtcattcatcaaagccggaaacattgccataatcggtactccttgattaggagagaatcggcttggatgccggccgccaacccgtatcgcggggctagcagcggttatcgtggccggttccggaaccctcccgggctctcaacctttaaccttcacttcacccaattcccgagcgcggcaatcattccgggattatgcccacagagaaattgcggcggggaatggttgccggtaaagccggccgagccgagcgccgtgaccaccctcagccagtcttacggctgccagctcccgccagcgggagcatatatacgcacaccagtaggcgtactcatatacctctgccaacgggagcatgctggcgcgcgaacggctcacatctgctgggcgttttcgagcaaggcgtttttgaggtcggactcgatttggcgcatcttgacctgggcggcctcgcggttggccttgccttccttctggatctgcacggtctccttcagggtggcgatgagttcggcgttgatcttctccagcgtgtcgatttccaccacggaacgctggttggccttttccgcgtccaccgcacccttgtgcagggcggccgcgttacgcgccagcagcttgttggtcacatcgtcggccttgttctgcaggtcgagggccttgcgctggttggacaggcccagcgcgatcaccatctggctcttccacaccggaatcgtggtggagatggtggtgtcgatcttgtccacgatggtctggtccgcgttctggatgattttgatctgcggcgcggtctgcaaggtgaccacgctgatgcggtcgaggtcgtcgagtcgcttggcaaaacggtcgagcttggacttgaagtccttcagcacttgcgcctgcatggcgtcgccactggcggcggcctcggcctccagcgctggcagctggttggcgttgaagtcggcgagcgccttcttgccggccagtacggtcattttcagctcgcggtattgctgggcgttctgcgtgtacatcgtgtcgtacatggagatgtcggccacgagtttggcttgcgcggattcgagacgcactatgatttcgtcgatttgcgcgtcgactttctgatagcggcggcgcagcttatccacgctgacggccacctggccgatgatcggaatggtgcggaagccgccgaggtcagcctcgtcaatggtgaccagcatggtgttcagtagttcgcccgcctcgccggtgtctttggagcgggtgtcggagaggatttcgtcggcgaaggcggaggtggcgcgctgggcgtccttgccgtagctggattcgatgccgtcgcgagtgaagtcgatctggccggccatctggttgaccgtggcatggtcggcttcgggcaatttggcgatctgctggtccggggtcagggccgcggcggcttgggcttcggcggcggtggggacgagggtggtgttgggggcggcttggttggtgttgagtaacgggttggtgatgggggttgcggagcttttggcgaggtctgcgagggtgatgttttggggcattctggttccttttttgatagttatgtttgggtctctccccccacccggctttgccgggagcccgaacgcaattaaggacggcctacagccgatttcttatttgctcgctctcgctcgccttcgtctgcaaacagcccactgggctgtttgctatacgactcagctcgtcagagggggttaataaaaacaccgattgggggctggcaaaagagctattgcgtggattggagggtggcgatgagttgttgcatggcgtcgttgttgggcagttcggatacggcggggatctggtcgagcgtgccgggcacgccgaatcggctgatcgaatcggtgccggcgaagttggccgcgcggaagccgtggcgctcccacgccagcttctgcaccgccggtgttttcaacaggttcagcagtgtgccgcctttctcgtccaaagccatcagcgtgtgggtgctccacacggtcggcgtcgggtagacgatgaccacgtcgtccttgatctgcttgaacgcatccggttggttcacggccaaatcaagcagctgcgattcgtagcccaccatcatcggcttggagcccacgcccaaggtcaggaactggttgaacgaatcctcggaagaggtctccatccaaccggatttggcgaagatggaggcgatggtcttgccgtcgcgcgccaccgaatcgaccgtggccggctgcccgccattgagcaccgtggcgagcagcgccgcgtattcgttgcctgagttcgacttcaccggatcggtcgagtcgatgcggaactgcccgtagcctgccgtgtatccgacgtcggcccaggttgtgttggcgaccatcgcgtccacggctttggccatatccatgtggtacgcgcccgaatcgtccttggccataagtccgccgttcacgagcccgtccgccacggccttgtgcgtgtacagcacaatcggtgagttgaagacgatgtcgctttgggtggccttgacgcctttcgcattgccgtattcgacggccgcgcgcgaggaggggaacaggtaatccatgcctttccggtccgcatccatcatggccagcgatccggccttgcgatagtcgatggcgatgccttgcttggcggcaagcgccttgaacttggcgtcatcgaacaggccgattttctcgccgcccaggtagccggtgatgctcacctgttcggtcggttcggccggcgctggttgcgattgccgccacaccagcgtgccgcagaccacgcccactaccgcaagcagggcgatcagtccgatgatttttgatttggagagtttcattgtgcgtccgttttctggtccgactggtgagccgggccgccagatggagtctgactgggtgcatgccgtccttcatcagcagccgaggaaggcacaggcgaaggtgcgacgtcgtcgtatccatccatgcgggccaaccgttggatggcgtcggagtcggccgtaatgcccaacgtcttggcgcttaccgcccggctgagttcgccggcggcggtctgttcgagcacttgcagcgcctcgatggtttcgattcgtaccgtggctatctgatcgcgtgcgccggaactttccacgtccacgtaggagcgcaacagtttctcggtctgctcgccgtacacggtgatgtagtggcgcaacgtcgggtaggcggaggtgtctcgggtcacgtattgcactcaatctttggtagcggcgatgaagtcgttggcttcggctttgacggctgggtcacgtacttgcttggtgagcatggcgatcgagttgagttgagcgttcgccgcgtcgatcgtatcggcggtcttctgaccgttgggcaaggcggaaaccagcattttgccgatgcgtcgctccggctcggtgagcgtggaggcggcgatatacccaagtgcggccagtaccacggccacgatcaggccgggcactccgccgccgaccagtccgaaaccgagcccggcgagcagcagtccgacaacgaatccacagattacctggagcatcagttgaagcccttgacttggcggaagacggcggcgaggtcgccggagcggccgtcgaataccttggcgttgctcagggtggcgagagacttcagctggctgggatcggcatcgccgaacagggttaagggtcaaaaagtgtgtccggaatcgcggattttcacggattgacctgtaggtttccggaaagtatatgctccggaagcatatatctagcccccgacgggaaatcctcggtgtggcagccgtgatgtgctatgc

SEQ ID NO: 24 - DNA, 3914 bp, Unknown
  R30_18m  MAG No. k141_7779
gcggtgacggacgggaagagccaaccgaggatggcgatgacgacgccaccgagaccgcagcccaccagcatgcgcttgtagatgagcttgtaacgcaggtgaatgccgtacagggacggttcggaaacgccaccgagcaggccggctgcgagcgcacccaaagcggtctggcgcatgtccttgtccttgtcacgcacagcaaggaagagcacaccagcggtagcaccgaagcaggcgaagttccacacgcccatcgggccttggatgaagtcgtagccgagagtctggatgttcatgagcatcagtgcgttaagcggccagtgcaaaccgagcggcacgaggaacgggtacagcatcggaatgatgatggcgaagatgaacggagcatgggtgttcatccaggacaagccgacgccgaggccgttgccgacccacacaccgatcgggccaatgatgaaggcggtcagcgcaccaacgatgatcatgcagaagaacggcacgaagaccagctggacgctttcggggatgatcctcttcaatccgtggcagacgagagcaagcacggcggccatgagcagcggcacgaacacgttgccggaatagtcgctcaatgccatcggcagaccgaatatgttggccgtgcaagacttggtgcccagagcggcgttctccacgcacgtggtggtcttggcgtccatcaagccggtgaactgcggggtcatgaggatggccatgatggcaccacccagccatgggtcgaccttgagcttcttggcagcgttgtaggcgaccatgatcggcaggaagtagaatacacccttccagatagctttcacgaacacccagcccgcggaggcctcgtcattcggaatgacgttcaacgaaataagcaggttgaccagcgcgatgatgatggaagcgccgagcagcacacccagaatcgggcggaaggaatcggcgagatactcgaagaaggagtccagccaagccaccttgccgcgggccttggaacgggcttcggccttgacgtcggcattgctcttctgaccatcgctggatgcggaggcaccgccgacaccggccatttcgggcagatgcatgatgttttcgtacacggttgcaacgccaccgccgatgacgatctggtaacggtcaccgctctgcggcaccgcaccgagcacgccttgcgtgtgctcgagactgttctgatcaaccttggatgcgtcaaccaattcaaagcgcagtcgagtggcacaatgcgtcagactgcgaacgttttcaggaccaccgattgcagtgatgatctgcgatgcgagtgagtcagccatcctgttttcctttctttcccttacaaccgattcgatccaagcaacactgcttcgggcaacaaaaaagacctgagatatagctatggttaaggcacatctcaggtcttgcgtcattatgttgactagcaaccctgcttcagtcgaatagcacagaactatacaccatcatctgacattgcgcaaatcaaccgaggacacaatccatcgctagcgaaaattcttatatttacatccgaacatgcaataaacagacaacgtattcatcgcacataatgggacaattacgcacattcacagcaaaagcgtggcagaatagtggctatggttgcaaacaatgcgggaatgcccgccaccccagcagatctgatcaatgtcgacgaggtcatcggcaagtactatgacgtcgtccccgaccccaacgttcccgagcagcgtgtctccttcggcacctccggacatcgtggctcgtccctgaagacctcgttcaacgaggcccacatcgtggccatcacccaggccatcgccgaataccgcaagaaggctggcgtgaccggcccgctgtatatcggccgcgacacccacgccctgtccgagccggcttggaagaccgccatcgaagtgctcgtcgccaacggcgtgaccgtgcgcatcgactcccgagacgacttcactccgactccggttgtgtcccaggccatcctgacccataaccgcgcagcggacggcacgcagcgtttcaccggcgaaggcctggccgacggcatcgtcgtgaccccgtcgcacaacccgccgaccgatggtggcttcaagtacgatccggtcaccggcggcccggctccggctgacgtcaccaacgccatcgcagaccgcgccaacgagctgctcggcgatttcaagaacatcaagcgtgttccgttcgagcaggccgtcaagtccgatctggtcgagcgcttcgacttccgtgagcactacgtcgcagatctggagaacgtcatcgacttcgatgtgatccgttcctccggcgtgcgcctgggcatcgacccgctcggcggcgcttccgtcaactactggccgctgatgaacgagaggttcaacctgaccatcgacgtggtgcgcccgcaggtcgacccgacttggagcttcatgaccatcgaccacgacggcaagatccgcatggatccgagctccccgtacgccatgaagggtctggtcgattcccttaacaacggcgcttgggacaagtacgacctggtcggcggcaccgatccggatgccgaccgccacggcatcgtatgcccgaactggggcgtcatgaacccgaaccactacatcgccgtgtgcgtggagtatctgttcggcggcaatcgcccgggctggccggaaggcgccggcatcggcaagacgctggtttcctcctccctgatcgaccgcgtggccgcttccatcgacgccaagctcgttgaggttccggtcggcttcaagtggttcgtcgacccgctgttcaagggtgaagtcgccttcggcggcgaagagagctccggcatgagcttcctgcgcaaggacggccgcgtgtggaccaccgacaaggatggtctgatccctgatctgttggctgcggaaatcaccgccaagaccggcaagaacccggcacagctgcatcaggagcaggtggaacgcttcggcgaaagctggtacaagcgcatcgacaccccgaccacgctggagcagaagcagaagttcgccaagctttccggcgacgacgttgctgccaccacactggccggcgaagacatcaccgccaaactcaccgaggctccaggcaacaacgccaagatcggcggactgaaggtcaccaccgagaacaactggttcgcggcacgcccgtccggcaccgaaaacatctacaaggtgtatgccgagtccttcgaatccccggaggccctcgacaaggtgctcgccgaagccactgaagtcgtggacaaggccctggccgagtgacattcggcttaatcgccacacaataatcgcggccgatatgcggccgtgacgcgagcaaaaggtccgttccgtaaaatgggacggaccttttgccgtctattggaaaacgcgacgaaggccccgcctcgacgaaacacggcggcaccggcctgggcaccgaaaccgtacaaggggacagccgaacggcaccacggcacggccacattcgattatggcgacggcgtgttccaggcttcgaccatgctgtgtctggacgatgagcacccgcatggatgccctttgcgaacgggcgcggagcgagtcgcatggctttcgtagggtagaggcatgacgattacggtttctacagacggttccgctttgggtaatccgaatggtccaatgggttggggttgggccgatcacgaactcgcgacgggtggcaaaccggggcaccaccatgagggcgattgcgacgccggtggagcaacgaacggcaccaaccagatcggcgaactgtgcgcggtgttggaggcgttgcgcgcgcatcccggttccgaaccgttggtgatcgaaaccgattcgcagtatgcgatcaactgttccacc

SEQ ID NO: 25 - DNA, 3341 bp, Unknown
  R30_18m  MAG No. k141_8145
aacagtgaaaataatctggggcatcttcaagcgggacatgtgccacgccacccgcaacgtgatcgccgtgatcgtctcgatgggcctggtggtggtaccggcactgtacgcctggttcaacatcgcggccagctgggacccttacggcaacaccaaggcattgaaggtcgccgtggccaataacgacaagggttacaagtcggatctcataccggtgcgcgtcaacgtgggcgaaaccatcatcagtacactgcacgccaacgaccagctggactggcagttcgtgaaaagcgacaaggcaatcgacggagtgaaatccggcgaatactatgcggcgatcgtaattccgaaagatttcagcgccgacatgatgacgctgttctcccccgacatcaaacacgcgcagctcaagtactatctgaacgagaaaatcaacccgatcgccccgcatatcaccgatcagggcgcgacaaccgtggtcaacacaatcgacaaaaccttcgccaaaacgatcgcgcaagtcggactcgacctggcctcaagcatcctacactattcgcaaagcccgcaaatggccgaatacatgcgcaacctcaacggcaatctcaccactatggcggatacgctgagcggcgcatcgcagcaggtgacgtcgtattcgcagctgctcggctcggcgaacgacatcgtggattccacgggcaaactgctcgcctcagcgaccaaggcgggcaaacaggcccagaacgcgttgaagcaaggcaaatcaggcgccacgtcgttcacttcggcaggtgcgaacgtcacctcctcggtgaacaccgcgctcgaccaggtgacgaatgcgctcgaccaagtggccgccaaaacaaacaaggcgttcgatgcgctcggcaaggactcagacaccgcagccagccagttgataacgttgagcgaacaagtctccagcggcgaatcgctgtacgacacgtacatcacaagcctcaaccacatgcacgaatcggtggaacaactaccggacagtgattccgcgaaacaggcgctgctggaagccatcgaccgggagatcacgctgctggaagccgccaaaggcgattcgcagaagctcgcgcagcagctgaaagacgcttccacgcaggtcacgcaggataccgcagccgcggaacgctcccgcgaggagatcctgaaccgcatcacctccgcgaagcagtcgatcagcaatgtgcgcgacgattacgccacgaacgtcaagccgaaaatcgacgcgctcgcctccacagtcagcacgctgatctcccaaaccgacagcatgatcacccagctgagcggcaccgccgacgatctggacgatgtgacgggcgatgtggggacgaatgtgacgtccatccgttccgcgctcggcgcgatcgcgaagaaactcgactcgtcggcagcgacggtgaaggagctgatcacgaagctggagacgggcgggaacgccggtgacggcaacagcgatggtggcgacggtggcaacgacgccagttcgtccgattcgggtgaatcggacgaactacgtgcactggccaccgccaacgcgtccacactgtccacgctgatttccgcgcccgtcgcactgcatcgcgtctcggtgtacccgatcgcgaactacggttcggccatggcgccgttctatacgatcctgtcaatctgggtgggtgcgatcatcctgtgcgccatgctgaaagtgacgatttcggaccgcgagaaggcgcatgtgctgggcttgggcgacacgctgccgcgcgtcgccggcccgtccggcccggggaacgcctcacgttggggactgcgcctcgaccacgagtatttcggacggtacacgatcttcgcactgctcgcgttgctgcagggcacactggtttgcctgggtgacatgtatttccttggcgtgcaggcgaatcatgcgctgcagttccttgccgtggggtggcttgccgcgctcgtgttctcgaatatcgtgtatacgctgaccgtgtcgttcggcgatataggcaaggccgtggccgtggtgctgctggtgatgcaggtcgcaggttcgggcggtacgttccctatcgagacgctgccgaagttcttcaaaatgctctacccgttcctaccgttcccgcacgccatcgatgccatgcacgccgcgatggccggatcgtacggcaatgagtacctgcttgacatggtgtatctcgccttgttcctgattccttcgctgctgctgggattggtgttgcgcaagccggtgatccggttgaacaactgggtgagccgcaatctggagtccaccaaggtgatgtgacgaggcggatttgaacgggcgggtttgagccggtttagatcggtttcggctggtacacggtctgggagtccgattcgggagaaacggacaaccaagatgggcgcattacaccttagacgtccgattctgcagaatcggacaatcagcggcgtcgcgcaaaccacacgttgatcagcgagccgaccaccaccagcgcgacaccgatccagaatggcatgcctaacgtcacgcccaataggagcgtgctggaagcagtggagaacagcggcgtcgcatacgaaccgatcgcaagcgtttccatactgccatgtagcatgccatacccccagcacgcgtagccgccggcaatcgacgcggcacatgcgagcagcgcaatatagccgccgatgccaggcgctacagctggcaaaccgtcgcccgaaacgaaatggataatccacagcacaacagcaacgcaacagaagaaaatcgtcgtaccatcgtaaccatcggacatcgatggcgtcacggtcgcgtaaatcgcccaaataaaggcgcctgcgaacgcgagcgcgtacggcaatggattgctggcgatattggcaaccgcttcctgcacgtcaaggttttcaccgccgaccgccattgccacgccgacggtggctacgattgcacccggcagcgcttcggagaccgagccgcgtttgtgcgacacggcggcggtcatcagtaccagcagcgtcggccacaaataattgacgaggctgacttccacagattgcgcgttcgttgtggccagaccgatcgacagcgagatcgacgcctcgtatgcgatgaacatgagtccacctgcgacgaggtacttgcgtggcgcttggctaatcggtttcggccgtcgcacgatgagcaggagcatgccgccgacagtgtagatgagcgccgagccgagcgtggcgccgaacgattcggaaacgagacgcacgaggccggccatgaagccccacaggacgattgcgaacaggccgat

SEQ ID NO: 26 - DNA, 37043 bp, Unknown
  R30_18m  MAG No. k141_8262
gagacgcccggtcccattccgaacccggaagctaaggcctggcacggcgatggtactgcacccgacagggtgtgggagagtagcacgccgccgcaccacacgtacaggaagccccgatacccctcaaaggtaccggggcttcccgcatatcaggacacttgcgcgtgggggggggtgtatctcgcgttcttgggcctcagcatcttgggcctcccccctggtccgccgcgcggacgactcccctcaaagaggagagccagagacctcttgggccccggcaggagtatcccgtcggggcccagtgcgttttgggcggcaacccgctgaatacccggtaagatgtctgaggtatcaacaaacaggtcaggaggtgacgcgcatggtggcgccaagccgtgatgaccgtagcgtagatgcattggtgaaatccaaggcagtacttgatgtattggcggaactgggaccaagcaccgcaaaaaccataagcgaacgtactggtgaacccgtaagctcaacgtatcgtttgctggataatctcgtcgcagtcggttgggtggaacggggcatcaatcgtggcgagtatcggcttggcatcgattgcgtacgtatcggcggccaaatcgaaagcagactggacattcagcagatcgctcgccgtaccttccgcgcccatcacggccagttcggcatctggggtctgttcgttcggaggcgattgcgcacggtgtgcatcgagacacgcacccgtgagacattgcaaagctatgcacagctggtgggcaatagcttgcctctgagcatgagcgctccctctcatgtactgacggcctggcttcccccggctcgctacgagcagctgttggaacactatgcctataccaacgagctcggcggcacattctccacgatgcgtgccacagcaatgggacaggctcgtcatatacgcgaatgcggcttcacctatgacgtcggccagaccatggccggctccgtgactatcagcgtaccggtattcaatcacgccggagagattcaagcggcaatcgccctgagtggcctttcccgctccttggaacctgagctggcctgtctggtagatgggcaaccggcaacggcatcggctcaagacatggtgcgattggtgcggactgccggccgtgaggtgtcgcgaggccttggatacagtggtgatcatcttggcctgaacagttgaatatgatgagtcagggataagtcaggggaaggaacgtcgacgatggcggaagacaaacgtgaaccgacccgcgctttagacaaggcgagtcgtgtgatggacgcattggcggcggagaatggcctgtcgccggcagatatcgccgacgcctgtgatatcccgcgatcctccgtataccgcgtgctggatggactggtcgatgtggggtgggccgtaacggatacggatggtaactactcattatcactggactggctgcgattggctgatgccgctcgcacgtctcgtaccgaatggcagcctgcgattgcggtcatgcatgccatcaccgcgcaaaccggcatgacctcattcctcagtgtggtctccggcactgaattggtatgcgtggaatgtgcgcaaggtcatgccatcgattcgctgatcctgcgcccgggccgcgtgctgcctctgcatgctggcgcggccggccgcgtggccttggcgtatttcgaggatgccgatgtcgaacgctatcttgcaggagtgccgtttccggcatataacgagaacacgctggtcagtgtggaacagttgcgcgaggatattcgcttgactcgcgaacgtggatatgcactgtcggatgaggatgtgacgttgggtgtcggtgccgtcggtgtaccgattgtggacaacgagtccggtcgcgtgatcgccagcctgtccgccggtggattcgtggacgaagtgttagccactcaagaatccttggccgcgttactgcgcgatggcgtacgcgaaattcaggcagcctgattcggcccgctaggctgtcgggctggacggttatgtccggtcagctatggcctttgccggctacggttctgctggttatgcttctgcccgactacgctgcggtccgttacgcttcggccacacgacccaacgcgatggcggtgatcagcacgtacgcctcgcgcgggtcggtggcatcccagccggtggattcggcggcgcgcttcaaacggtagcggatcgtattgggatgtacgttgagctccttggccgtggtctcgagcgaaccgccgaacttcaggaatgtggagacggtgagcagcgtcggatcatccgggcctgctgctgtcaggcttccgtagaccacgcggaccagttcgtcacgggcgtccgcgtcgccgatcaacgcacgttcgggcagggcgtcgtcggtgcgtaacgggcgcggcaatggctgcacggtggcggccagggccggcgcggcctgaagacagtagagcgtggcctgaatcgaacgcatcgcgccatcggcaccggtgcgctgtggacccaaggcgattggccgatcggcggcgaacgacggggcgatggtattgcagatgatttccggcgtggccgcaccgaccggacgaatcaacgccactacggcggtgctgttgccgatcgggcgcttggcggtcagacacacaccgccgaaatcggccacgattttctcgatttccttggccgtacgtgcggcggaccgggcagggtatccggcgatggtgtaacaatcgaagtcatgctcgaaaccgaggatggtgaacagggactccactcgttcgtcggccagatgattgaacaggcactcgaacagcacggtgcgtacgcggttggtcgcggtgatgccgggtgcggccgaatcggatgaatcgggcgcacccggcataccggatgcaccggacgaatcggcaacgtcggcagcaagaagttcgagaaaatctgacatagtcactagtgtagcgtcgctgattggcgttgcctttcagccaaagactctcgccaatacgtcagcaccacgaatccgaatacaaacgcaaccggcaacatgtgccgctcgaaattattggccggcgcggtaatcatcacgcccatcagcagtagcagcggaatatgggtcatgagggtgagccaacgtcggcgaatcacctcggccgcgccgatcagcaatgtcatcaccacgtagaaattgccgtgcgtaggccagccgagcacgggaatactgccccatacgcgagtgaagccggcgatgtgctcacgccagtcatggttgtaatccttgatccatgtggagtttttctgcacgtaatcgctggccacgtaataatccatcgatacgtacggctgatcgttcacattgaagtatccgaagcatttggccagcaacgcatccagcgcgatgatcggattgtccttgacgatttcgaaccatgccttgttgaaattggtcatatcctcgggcgtcaccgtgcgccacttgtagctgaccttcttggcctgaataccggaggatttcaccgggtcggcatcctgctgggagtaagcgtcggccatctgatcgagattgaagacgggcgcgaggttctttttggcttcgtctgaaataccgtccggattgcgctgagccacgcgggcgatcatttgcagctgtacgccgcggctttcgattggatcgccgccgatgatcgcaccagaggagatggcgaaggagatgccgccgtgaatcagcacggtggggatgagcagcgccacgacgtaagtcgcccagcgcttgcggtcggcgatcagagccagcacgatttgcagagcgatgatgtaccacgcatatttcgcggaaatcagcatcaccgacgtggccaggataaaggcgatgaaactgtggcgcggcaagtggacgggcgtggcgatggcagtggcctgaggatgtttgcgggtgccgacggggtgccaggtctggacgagttcataccagacgctgaaccaccagacgaacgagaacgcgaacagcggcgatttggtgatggagatagtggaaaacacggccagcgggcagaccatgaagaacagcagaatcaggaatctggccaatcctccggcctgtgggggaacggcggaatccgttgccgtttttcctatccaaggccggttcaggaatcgattggcggcggcagcgcagcagaacacggcgaacagcgtctgcagggcagccaacgtcacgatgccggcatcgtttgagccggtcagatgcctcgcaaacgtgactatcgcgccatagaacacagtgagtaccacattgtgctgatcggtcagatacgtgggatcggacggccacatgtagtgcgcggtggggtagatgtccatcggcacgaaggagaagaagccgatatagggctgtttcaggccggtccactggttccaggcccagctgaattcgcggatctgtgagcggaggtccgcgccgaatgcggccagcagagtggtcggcacccagagccagccgacaaaaaacaccagcataagcttccagaaccggttcgtgccgcgtgtgatccagcggtccagaacagtgacggtggacgtgacgatagcgcgaacggtacgacgggtcttggctggttggctggcctgctgatcggcggcgggccgtgatgtttcgctattctgctgatggtggcgtaggcgctcgccgatggtcttcggcagtatgcgctggcctgctgcgaatcgcgccatcagcgtgatgattccgagatatatcaggaacgacacgacgaatattgcggtattggcccagttccaatgggcgagggtgccgttctcctcgtcccggtacagcgggccgaccgccgagcacagtgcaagccacaggcaggccagcacggccagtgtccagcgcgcggcagcgcccacgcgcgcaagatgcgggtgggactggcggctggatacggcggcaagcttcgcggtggctggtgacgtcatgacaatatatggtagccgcacaggtcaacggttgatattcgatgtctgccgggcatcgccattgttcgcaagccaatacgacggtcgggtgcatgcgtgggctcggcgaatgcggaatttccgaagttgtgaacgctaacacgggctgtccggcccaaaatggttgattttgtgcgcttttccgtggaatatcgcgggcaaaaaacggcgcaaccgaggtaacgtagtgtccatgatgattgcattgaaagctgcaacgccgcagctacccagaactacagccgtcgcggatcatgtggtcgccgtggacgaaaccgattcgaccaacgcgctggccgcgcagatgatcggcgacgggtcgttgacgctgcccgaccaccaggatggcgaactggcggtggccgtggtggccgccgaccggcagaccgccggccgtggccgcaatggtcataagtggatcagtcagcccggccgttgctcgacgatgtcctatgccgtgcgcattccgcgcgcgatcgccaccgacgaatccgtcaatggctggctgcagatgatcgccggactggtcacgctggacgccctgaacggcatgatcgaggaatacggtgccgcgccgaaccagccggactgcttgctggaactcaaatggccgaacgacgtgttctgccacgggctcaagctgggcgggctgctctcggaactggtgattccgccgtcgtccggtactgatgctgatgccgatgacgacgtcgtcatcgtgttcggcgtaggcctgaatctggcgctgggtgcctgttggctgcccacgccgcagtcgacttcgctgcagctgcatgtcacgggcttgccgtcgtttggcgagatgcgcgatgcggtggccgaacgtcaggtcgagggcttccgtgaacgactggcgaagttcatcgccgacccgaagggccaggccgagtcgttgcgcgaggaaatgaaggcggtgtgctgggcgcgcggccgtcaggtcgaggcgcatttcacggacggcaccacgctgaccggcgaagccatcggcctcaacgaagacgcctcactgatcctgagaacacaagacggcacggaccatacggtccgcaccgccgatgtgggagtgctgtaatagccggccagtagctagctagtagctcaggtcagcgaccgagcttggacaggccggcggcggccagagaggccaccacggccttgatggcgtcgccgacgacgaagcccatggaggccagggccacggcggcgagcggcgcaccggtcaacgcggactggatgatgaagccgaaggcgtacaccaccacgacgccgccgaccagcgcggccagcaggtagcggcccgcggtgcgcgcggcggccgcgaaggacgaagtgtcggacttgccgcgcagcagggcgatgaccaccacacccggcaggaagccgaagaggaagccggcgctcgggccgaccagggccagcgtggaggtgccgccggcgaacaccggcaggccgaccgcaccggccgccagataggtggcgacggcggcaccggcctgacgccacggcagcatgagaccggcgagcatcaccacgaacgtctgcagcgtgatcggcaccggcgtgcccggaatcggaatctcgccggcggccgcggacagccacatcagcacggcgaacagcaccggcttccaggatgcggcgacgatacgacgggcgagcggcgtggtggccgctgcggatgcggtggtgtgtgaagtctgcatatcaataacccctatgttgtgtgatatcgccgtgaacggcgggcggtatgcgatggatgaggggaggttccggcgggccgtgcggtatccccgacagcccgaaccgtccatatggtggacggtcccaaatgaatccggccctgtgcgggcggatcgtgcggcgatggaccgatgccggtccggtcgccttccgttcgcccgcagatgagccttcccccgaacttacggttgccatcgtagaggtgttcgatttcgtgcggtttcgtaccaacttacaaaattgtcgatttcgatttgtcataagttgacgaacgcaaccgtaacgtcaacttcttgaaccggcgtgcaaggatgtgcaatcggcggatttgcaacgtttttgatagccggcgccaacggttacgttgccggaacctacgcgcgcgtttgttcgtagcctacaaaagggcgtgaaagcttttgtgcgaacgcggcttgccctctcctctatatggagagcacaatttgacactatggctcatactgtcaaaaaactgctgattgcgaaccgaggtgagatcgctctgcgcgtggtgcgcacggccaaggagatgggtatctccaccgtggccgtctactccgaacaggaccgcaatagccgctatgtggacatggccgacgaggcatacctgctctccggcgacacctacaaggacacgtacctcaacgaggatctgctgatcgacatcctgcacaaaaccggtgcggacgccgtgcaccccggctacggattcctttccgaagtgccgagcttcgcgcagaaggtcgaggatgccggtgccatctgggtgggtccgcaccacaccgcgctggtggatttgggcgacaagatcaccgcccgccgagtggccttgcgcgccaaagtgccgccggtgcctggcctgtccgaaccggtgaccgacgtgcgaacgctgctcgacttcgcacacacccacggctacccgattatgatgaagcgcactgatggcggtggcggccacggcatcaccgtggtgcatgacgacgaggagctgcgccgcttctacatgaaccacgacgcgctgcaaggcggcgatctgaaggaatacttcatcgagaagttcgtggacaaggcacgccacgtcgagacccagtccgggcgcgactcgcacggcaacttcaccgtgtactccacccgtgactgctcgctgcagcgccgcaaccagaaactcgtggaagaggcgcccgcgcccttcctgtccgaggaaatcgtcagcacgctggaggaatactcccgccgcctgttcaccacggtcggctacgtgggcctgggcacctgcgaattcatggtgaccccgaacggcaaagtgtacttcctggaagtcaacccgcgtctgcaggtggagcacaccgtctccgaagaggtcagcggcctcgacctggtgcgcgaacagctcaatatcgccgccggtggcgagctcacccgcgcccccgaaccgcgcggccacagcttcgaactgcgcatcaccagcgaagacccggccaccaacctgacccccggctccggcaccttggagaagatccagtggccggccggccccggcgtgcgcatcgataccggtgtggaacagggcgacaccatctccccgaagttcgattcgatgatgggcaaggtcatcgtcactgcccagaaccgtctcgatgccgtggcccgtgtgcgccgcgtgctcgacgagctcgtgatcgaaggcgtgcccacgccgattccgctgttcaaggagatcttccgcaacgacgacttcaccgccgagcatggccatccgttcgccgtgtccaccaagtggctggagcgcacgtacctgaaccgcacgccggcttccgccgcctccggccagccggcctccttggccaccgccccgggtgccgctgccccggccgcgcccgacaagtccaagtcggagacgttcgtcatcgagatgaacaaccgccgcgtcaagctcaccgtgccactcgacatcgtggagaacatcaccggctcggcccgcgcccgcggtgccaagcgccccacccagccgttgcgcggcgcaggcttgcacaacgtggcctccggtgccgccacggccaacgacggtgccaaatccggcgtcatcgcctccccgatgcaggccgtggtcacgcgcatcaacgtgtccgaaggccagcaagtggccaagggcgaccttctggtggtgctcgaatccatgaagatggagaactacgtgtacgcgccggccgccggcgaagtgaagaagattttcgttggcccggccgatggcgtggaggccggcgacacgctggtcacgctggacgtgaacgccggcaaggccaaggccgccgacgccaagaaggagggtggcaatgactgacatcatggattcgccggccgtgaaggccgcggctgcggcctcggccgccaacgccgcccagccctcggcccaccagccgctgcgcaccgccgtggtcaaggccgccgaactggcccgcgccgccgaagagcgcgcccgcgacaagcagcacgctaaaggcaagaaaaccgcgcgcgaacgcctcgacctgctcttcgacaccggcacgttcgaggagatcggccgcttccagggcggcaacatcgccggcggcaacgccggtgcagctgtcatcaccggcttcggccaggtctacggccgcaaagtggccgtctacgcccaggacttctccgtcaagggcggcaccctcggcaccgccgaaggcgagaagatctgccgactgatggacatggctatcgacctcaaagtgccgatcgtggccatcgtggactccggcggcgcccgcatacaggagggcgtggccgctctgacccagtacggccgcatcttccgcaagacttgcgaggccagcggcttcgtgccccagctgagcctgattctcggcccctgcgccggcggtgccgtctactgcccggccctgacggacctcatcatcatgacccgtgagaactcgaacatgttcgtcaccgggccggacgtggtcaaggcctcgaccggcgagaccatctccatggccgaccttggcggcggcgaagtgcataaccgggtgtccggcgtggcccactacctcggcgaggacgaatccgacgccatcgactatgcgcgcaccgtgctcgcctacctgccgtccaacagcgaaagcaagccgccggtctacgcctacgccgtcacccgcgccgaacgcgagaccgccaagcgactcgccaccatcgtgcccgccaacgaacgtcagccctacgacatgctcgaagtgattcgttgcatcgtcgattacggcgaattcgtgcaggtgcaggaactgttcggcgcctccgcgctcgtcggcttcgcctgcatcgacggcaagccggtcggcatcgtggcgaaccagccgaacgtgctcgccggcatcctggacgtcgactcgtccgagaaggtcgcccgattcgtacgcctgtgcgacgcgttcaacctgcccgtggtcaccctcgtggatgtgcccggctacaagcccggctccgaccaggaacacgccggcatcatccgccgcggcgccaaggtgatctacgcctacgccaacgcgcaagtgccgatggtgaccgtggtgttgcgcaaggcgttcggcggcgcgtacatcgtgatgggctccaaagccatcggcgcggacctgaacttcgcgtggccctcctcccagatcgcggtgctcggcgcggccggcgcggtgaacatcatccaccgccacgacctggccaaggccaaagcctccgggcaggacgtcgatgcgctgcgggccaagtacatcaaggagtacgagaccagcaccgtcaacgcgaacctgtcgctggaaatcgggcagatcgacggcatgatcgaccccgaacagacccgtgaggtgatcgtcgaatcgctggccacgctcgccaccaagcggcgcgtcaagcgcaccaccaaacaccacggcaaccagcccctctgatttctgaagacatcaaccaaacacaagtaaggaaagcaatgaccaccttcttcctcaatcgcctggccaccgagccccatgcgctcgccttcgccggccagtccaccccgtggccggtagccctggcagaccagaccaccgatcccagccttgacgaggccctgcgcggccacatcgccgcagccaaccgactgctcaccccggtcgccgccgacctgctgaccaccaccggacgtccggtcgacctgttcggcttcactccgaacccggcccgcctcggcgccgcagccgacgccaccgcgtccgtggaaggcgtggcactgacccagctcggcgccctgctcgacctcgaacacctcggctacagcgtggcccaggccaagccgctcgccgtgctcggccactcccagggcgtgctcgccgtgcacatggcccgcgccatcgaggccgccggctccatcgaggccgccggcaagaccctcgacgagattctggccgtcgccgccctgatcggcgccgccggaacccgccgtgtgcgcgaactgggcctgaaccccaagtatggcgaagccagtccgatgctctccgtcaagggcgccacccgcgaacaggttgaggctctggtcaagcgcgtgaacaacgcccgaggcccgatctccatcgccgtcaccaactccgacaaccaccacgtgctttccggctacccggaagacctggcagcactcgccctcgaagccgagcgcgagcaccagcaccaggccaagctgcgtgaacagaagctccacggcggcactgtgttcaaccccactctcgaatacctcgaagtcaccctgcccttccactctccgctcatggccgacgccgtcgagcagaccgtggcctgggccggcgcctgcggcttcgaccagaagcgcacccgtgcgcttgccgaggaagtgcttctgaaccatgtggactggaatgcccgcgtcaaggcgctgttcaacgccgccgacccggccaagctgtggatcgtggaccttggtcccggcaacacgcttggcaagctgatcggcaatgtggtgcagggcaccggcatcggcgtggtcgaagccaccacgctgtccgaacgctccacgctctccacgctggaaagcgagcctgagcgcacccagaactggaaggcgttcgccccgcgcgtcatcaacaccccggccggcgccaagctggtcaccaagttctccaagctcaccggcaagccgccggtactgctgcccggcatgacccccaccaccgtggaaccggaaatcgtggccgccgcggccaacgccggctactgggccgagctcgccggcggcggccaggtgaccgccgaagtgttcgaccgccacatcgccgccctcgaagacgagctggaggaaggccgcacggtcgaattcaacgcgatgttcatggaccgttacctgtggaacctgcagttcggctcctcccgcatcgtgcccaagaagcgtgcttccggcgcgccgatcgacggcgtggtcgtctccgccggcatccccgagctggacgaagccgtggccctgatcgagtcgctgcaggcggacggtctgccgtacgtgagtttcaagcccggcaccgtggaccagattcgccaggtcgtgcgcatcgccaaggccgtgtcccccaccaccatcatggttcaggtcgagggcggtgaagccggcggccaccacagctgggaagcgctggacgacctgcttgccgccacctacgccgaagtgcgcgcctgcgacaacctcgtgctggtcgccggcggcggcatcggcacccccgaacgcgcggccgactacatttccggccagtgggcccacgcctacggcctgcccgacatgccggtcgacggcgtgcttatcggtaccgccgcgatgaccgccaaggaggctcacaccagccccgaagtcaagcagctgctcgtcaagacgcccggtattccggccgacgccaagtccgacgacgtgttcgccccgcaggccgcccactgggtgccgtccggcaagtccgtcggtggcatgtcctccggcctgagccacctgcacgccgacatttacgagctcgagaacgactccgccgaatgcggccgtctgctcgtgcgcgtcatgaagcaccccgaagagctcgactcccgccgcaaggaaatcatcgaagccctgaacaagaccgccaagccttacttcggcgacctggcctccatgacctaccttgagtgggcgcagcgcttcgccgaactcgccttcccgtgggtcgacccgacttacgccgaccgcttccagcacctgctgcagcgcatcgaagcccgtgtgaacgacacggactccggcgaattcacctccaagctgttcgccgctgatggcgtttctgctgaagaggcagctgccgctggcctgctgacccacgacgacattctcgccgacccggcccccgcgctcgaaaagctcgcactggcctacccgcagaccgccgaactcaaggtggtcccgaccgacgtggcttggttcccggtgctcgtgcgcgaataccccaagcccatgccgttcgtacccgtcatcgacaacgacctgctgcgttggtggggtcaggaccagctctggcagtccgaagaccagcgctactccgccgattccgtgcgtgccatccccggcccgatctccgttgccggcatcaccaccatcgacgagccgatcgccgacatcctcggccgcttcgaaaccgccgccatcaagcgcgtgcaggacgaacagcaagccgccgatgccgctgagaacgacgatttcgccgcacttggcgaggccaccagcgccgaagacttcatccgcaagtccccgaacatctcctgggtcggccacatcaccgacaacccggcctacggcaccgccctgggcgaccagtactacgaaatccgcgcgtttgacgccgcggccggcaagtacgatctggacatccacctcgacacctactgggacaacgacccggacggcggcacctccaagcacgccgtgcgcgatatcgtcatcccgctcatcgtggaaggcaccgagcccggccgtgtgccggtcgtggaccgcgaacgcctgattccggacgtctacgcgatgctcgccgccaccgcaggcatcggcaacaccgccatcaccggcgacaagctcaccgagatgccgcagcttgacgacaagacctctgacgagcgtccgttcggtaccgcaaccgcaacctacaccctatccgccaacctcggcttcgaccacgaagcggccactggcgccgctctgccgaccaccctgcagcccagccgcatcgcccccgatgcgctggtcggccctgcctggccggcaatctacacggcgctcggctccgtgtacgtcaagggctacccggtgattgaaggcctgctcaacgccgtccacctcgaccacctcatcgaacttgaggtgaacgaggaggacctgctcaagcacaccggcgaaaccatcaccctgaagtcttgggccgaggattacttcgagtccgcctccggccgcgtggtcaccatccacgtgacccacaccgccgccgacggcacgccgcttgcccgcgaaaccgagcgtttcgcgatccgcggccgcgtctactccgatgctttgcctgcagacgcccccgagtatggtggtgccctcctgaataaggaagcggatggctccgtcgccggacagtccactggactgtccgcctcctcgcgcggcctgcaagtagtgcaggccactccgcgccgtctgctgcgccgcgtgaaggtcgtcgccccacacgacatgaccgccttcgcccgcacttccggcgacttcaacccgatccacacctccactcgtggcgctcgcatctccggcctggccgccccgctcgtgcacggcatgtggctgtccgccaccgcccagcacgccgtgcaggcgaccgacgagaagggtgcccactacgagattgccggctggacctacaacatgtacggcatggtccagcttgacgacaccgtcgaaatctccgtcgagcgcgtcggcaaagtgcgccacggcggcatgaccctcgaagtcacctgccgtatcgacggccagctcgtctcccgcggcaccgcactggtccgtgcgccgcgcgccgccttcgtctaccccggccaaggcatccagaagcagggcatggttctggacgagcgcgccaagtccgccgccgcccgcgacgtgtgggagcgcgccgacaagctcacccgctccaagctcggcttctcgatcctgggcctcgtgcgtgacaacccgaaggaactcaccgccaacggcgtgacctaccgtcaccccgaaggcctgctcaacctgacgcagttcacgcaggtggcgctcgcgacggttgcttttgcccagaccgcccgtctgcgcgaagccggcgccgacatctggcccgcctacttcgccggccactcgctcggcgaatacaacgcgttgtccgcgttcgccgacgtgattccgctggaaaccgtgctggagctcgtgttccaccgtggttccaccatgcaccacctcatcgagcgtgacgcacagggtcgctccaactaccgcatgggtgcccttcgtccgaaccagttcggtgtggacgacgcgcacgtcaaggaatatgtggaatccgtggccaaggcgtccggcgaattcctggagattgtgaactacaacctcgccggccagcagtacgccatcgccggtacgatcgccggactcaaagccctgaaggccgattccgcccgccgcgtggccgcattcggtggcaagcccgcgttcatgctggtgcccggcatcgatgtgccgttccactccacgctactgcgcaagggcgtgccggaattccgcgacaagctcgacgcgctgcttcctgcttacatcgactaccgtggccgtctggtggaccgctacatcccgaacctggtggccaccccgttcgagatgaccaaggaattcgccgccaagatcctcgaagccgtgccgtccgaacgcatcaaggccgtgctcgacgacccggccgtgtgggattcctacgccgccgacgaccagaagctcggccgtctgctcttgaccgaactgctctcctggcagttcgcctccccggtgcgttggattgaaacccaggcgctgctcttcggtcagcgcgaacagggcggcctcggcgtggaagaatacgtcgaagtcggcctcggcaacgccccgaccctggccaacctcggtaccaagaccctacgtctgcccgagttcgccggcaacgatacggtcgtctacaacgtcggccgcgatgaaggccgcgtctacatgaccgacaccgattcgctggttcccgacgacgagccggaagaggctgcggcctcggccccggtcgaaaccgctcctgccggtggttccgccgtcgccaagctcggatcgggtgctgctccggcaaatgccgcgactgaggctgctcagacaacggatggctccgtcgccggacagtccactggactgtccgcctcctcgcgcggcctgcaatcagggcaggccgctgctggcgcaccgtctggtgccgccgtcgccgacctgcccttcaaggcttccgatgccatcggcgtactcatggcctactccgccaaggtgcgcctcgaccagatcggcagcaacgacaccaccgacaccctgaccaacggtgtctcttctcgccgcaaccagctgctcatggacatcagctccgagctgggagtcgccagcgtggacggtgctgctgaagcgacgctcgacaagctcgcccaaatcgtcaacaaggccgccccgaactacaagccgttcggtgccgtgctctccgaggcgctgcgcgaccgcctgcgctcgctgttcggtgccgccggcgtcaaacagcagtacatccgcgaccgcgtgaccaacgtatggcagctcggcgaaggctgggtggccagcgtgctcgccgcactgctgctcgacactcgcgagggtgccagctcccgtggcggcgacctggccaagctgcccaccgccgccgtgcagaacaagccggaagccgacaagctgatcgatgcggccgttgaggtcgtcgcccagctcaagggtgttgccgtggccctgccgtccgccggtggtgccgctggtggcgctgtggtcgattccgccgcgctcgacgccttcgccgagaaggtcaccggttccaacggcgtgctcgccgccaccgcccgcttcgtgctgaacgagctcggcgtggccgctccggctccggaagaatccgaggacgagaacgccgccgtcgtggccgcggtcgaagccgaacttggctccgactggcccatgcaggtcgctccgcgcttcgacgccaacaaggccatcctcttcgatgaccggtgggcctccgcccgtgaagacctcgcccgcgcctactacggcaacgaccccgccgccttgaacggcagcttcatcggccttggcaagaccatcgccgccgaagcccagtggttcgccaacgagtcggagagcgaggagcttaaggccgccttccagaaggccggctccgaggccctcgaacaggtcgcttccaacaagaacgcctcccgttacgcgaatgatatcgccatcgtcaccggcgtgagcccgaactcgattgccgctcaggtggtcgaaggcctgctcgcaggcggtgccactgtggtggccacctcgcacagcttcaagccgtccatcaaggcttgggccaagcaggcctaccgcgagcacgctaccggcaacgccaagctgtggctggttccggccaacctctccagctaccgcgacgtcgacgctctggtcgactgggtgggccacgagcagaagaagacctccggtgccaccaccacgattctgaagcccgcgtgggagccgaccctgttcttcccgttcgccgctccgccggtccatggcacgctcgccgactccggcgacctgttcgaatcacaggcgcgactgatgctgtggggcgtggaacgcgccatcgtcggcttcagccacatcggtgccgacaccaacgtgcagcacaagctccacgtggtgctgcccggttccccgaaccgcggcgtattcggcggcgacggtgcctacggcgaagtcaagagcgcctttgacgccatcgtcaaccgtgcccgcgctgaaaaggtgtggtcgagccgcgtcaccttcgctcacccgaagatcggctgggtgcgtggcaccggcctgatgggcggtaacgacccgctggtcgccgtcgttgagcgtcacggcatccacacctactccaccgcacagattgcggccaagctgctcgacctgtgcactgccgaatcgcgcgagcaggccctcaaggccccgctcgatgtggacctgaccggtggcctcggctccgagcccatcgacatcaaggcgttgcgcgcggaggccatggccgatgcggagaaggaagctgctgcggcctcgtctcaggaaacggatggctccgtcgccggacagtccactggactgtccgactcctcgcgtgggcagcaaatcaaggcgctgcccaccccgatcatcaccaagcaggcttcggtcgacctcaacgactggaccaacgtcaccgccaagccggaagacgaaatcgtcatcgtttccgtcggtgagctgggcccgtggggctccggtcgtacgcgcacccaggccgagctcggcatccactcggacggcactgtcgacctgagcgccggagcagtgctcgaacttgcgtggaacatgggtctgctgacttgggccgacagcccgaagcccggctggtacgacaccgacggcaacctcgtgcccgaagaggacatcgccgagcgctaccacgacgaggtcgtggcccgctccggcatccgcccgttcgaggaaggcatgggcaacgactacaaggacggtgctgacgaagaagaagccgaggtcttcctcgaccacgacgtcaccttctctgtgcccacccgcgaagtcgccgccgaatacgtcaagttggacgaggctcacaccaccatcgccccggatgaggaatccggcgaatggaacgtgacccgccacgccggctcgatgatccgcgtgccgcgccgcgccaccatgacccgcacagtcggcggccagttcccgaagggcttcgacccgacccgttggggcattcccgcctcgatggtcggcgacgtcgacaagatcgccctgtggaacatcgtcaccactgtggacgcctacctgggcgccggcttcaccccggccgaaatcctcgagtccatccacccctcgctggtggcttcgacccagggcaccggcttcggcggcatgatgtcgatgcgcaagctgtacctcgaccgcttcctcaaccacgagatcccgaccgacatcctgcaggaggccctgccgaacgtggtcgcggctcacgtgatgcagtcctacatcggcggttacggcaacatgatccagcccgtctccgcctgcgccaccgcggccgtctcccttgaagagggcgtcgacaagatcgccctcggcaaggccgatttcgtggtcaccggcgcgatcgacgacatcggcgtggaatccgtgatcggcttcggcaacatgaacgccaccgccaactcggaggaaatgtacggcaagggcatcgacgcgcgcttcttcagccgcgcgaacgatcgtcgccgtggcggcttcctggaatcccagggcggcggcacgatcctcgtgacccgtggtgacatcgccgaaaagctcggcctgccggtcgcggccgtggtcggcttcatccactcctacgcggatggtgcccacacctcgatcccggctccgggcctcggtgccctggctgccggcctcggtggcaaggactccaagctcgtgtacgacctggctaagctcggcgtctcagccgacgacatcgccgtggtctccaagcacgacacgtccaccaacgccaacgacccgaacgaatccgagctgcacaacacgctggcccacgccatcggccgcaccgacggcaacccgctgttcgtgatctcgcagaagacgcttaccggccacgccaagggtggtgcctgcatcttccaggtcaacggtctgacgcagctgttcaagtccggcgtgattccggcgaacgcggcgctcgattgcgtggatccgaagctccagcgcgacgaccacatggtctgggttaggaagcccctgcgcatcggcggtggcgaggacgagttcggtcgcgagaccgctggtcgcccggtcaaggccggtctggccacctcgctcggcttcggacatgtttccggcttcgtggccctggttcatccgggtgccttcgaagcggccgtggccaaggccgatggcgaggccgcgctggaagcctggcgtgagcgtgccaacgcccgcctggccgccggccagcgtcacctcgaggaaggcatgatgggtcgcgccgcgctctacgagccgatcgacaaccgtcgcttccgcgaggatcaccgtggctacgaccaccacgaggtcgaaaaggcgatgctcctcaacccggacgcccgcctcggtgccgacggctactacgaggcctgattcctctggctcccctcggttgaggggagccagtagcgcaccggatctcggctcccctctttgaggggagctcccgcgaagcgggtgaggggagtttcccctggagctttctcgctggcacaaactcagtgagagaaatatgcagaacatacgaaagcccctccttcaaaggaggggctttctgcgttcaaagaggtacatttgcctgattgcggaatactatctgctttcaaaggggtatcgaaactctgacatcgcgagtatgagcgttgatattccaacgaccatactcgcagttttgcagtctaggtactcctttgaaagcagatagcattccgcaagaccccgaatgtacctctttgaacgcagatagatgtctggggcgctgatcacgcccctcgactgagatatgggttatgttttagcgggtgctgcgcagctcgtggacggtgatagtcccgctgagctccgtgacggtcagctcggtggtgaaatccggggcgttgacagtgtcgcaatcgaagagaatcgcgcctgcgtcttcgccgttgttgacgaacacttcggccacaccgtgatcgtagaagacctcgacccgttcgatctgcttggtggcggacacatagtcgaatctgtcagtcggtaggccggtggaggtcaggtgcacggcagcgccgtcgctgaccaatcgcagcgagacctcggccgtggctccatccggctgagtgcgtgtgcccgaaaccagtgtcgcagagaacgcggagccgagttcggggcggatatccgcgtaataagcgtgattgggcacttggaacgtattgctattgcctgctggcgttgcagtaagaacatcgcccaccaacaggtcgtagacctcttggatcgggcgagagataagccgaccatcgaccacgtgcagttcgcgtggcaggctcatcacgccattggcatagtcaggccgttcgatgcgtacgccgaaccagtcgcacaaccagccgatggcaatacgacggtccacgtcggtgccgttcaccgacgtatgacgatcgaggaaggattgcaccgcgtaatagcatgagccgaaatcgcaccaaccggtgtgctgcacgtccagacgcggagcgtcgagcgaatccgcgataacgcctgtgtaccagcgaattggctggaaacgaccggtcgaatcatgcagtttcatcatcgatccgaccgccaccgccgagccgtccagcgagaaggcatccgggcactcgtaggtataggtttcggcgagtcccgtctcgaacagcagtggaccggcatactcccatgcggccttgcctaaattggtgtcggtggcacggaacaatgccaatgcaggcgtgcgggttgggtcaggctcttgctccccggcggcggcgaacgcaccatcgccgtaccagtattcgccttccggccgcggcgtggagccggagtctcctgcggctggtgcctcgccggatggtagatttgtggccaccacaatagtgggagtgcccgcaagcgcggtaccatcgaacaacgtgttatcagctttcgggtcgcggaaatcaaggccgaaatcttcgttcgggcggcgaatcaccgtggtctccgggctgaaggacaggccgtcggtgctgatggctgtggtctgcgtttccaccacagagccggggtcgccgcggcactcccagtgacgggtcaggaagatgcgaatggcgctcgcctcatcgccgggcacgatatgcccggtctcgtccacggttacggccgaaccggagaatgccccgccgctcagcgagccgtcacggctcagatcttcttgcgggagcagcgtgatcggcagatctgtccagtgcaccaaatcgcggctgaccgcgtggccccaatgcatactgtcccactgccagccgtacgggttgaactgatagaacatgtggtagcgcccttggaaacggcacagtccattcgggtcgttcatccagtgctgggccggttcgaaatgtgcgctcggccggtgcgcggtggcgcgcgtatccggggtgatgatgcggatgcctcgatccagcagattcgcgcctccagtcaggtacgcaaagcccagcgtcaggccttcgcaacgtagtgcgtattgctcgccgggcttgattggcagggtgagtcgcatgcgacggtcggcggcagtcaggtgggcttcgatcggtggtgtgttcggatttgccggggtcaagcgcagggttgccggggcagcattggcacctccggaatattcggcaaacgcctcgaacgcggtgtagccatcggcattgatgatggtcataagaggactccttgagttttcgataccgggaattgctggatataaaggcgccggatgggcaaaaagggaaatcccacccagcacgtattgattcgccttcggccctgcaattgtgggttcgctttcagcgaggctcagtgttgccttcgcttggctttcgcctcgctcaggctgacgctacaaacagtccacaggactgtttgcttaacgcgtcagccctttactcccgaagaggcgattgagctgacgaattgcttttgaaagatcacgaacacgatgatgatcggcacggtgatcagtgaactgtatgccatgatctgaccccacgacgtggtcatctgctggaagtactgcacgccgatcatcacgggcctcaggctctcggactgcactaccatcagcggccagacgtactggttccacatgggcaggaagctcaaaatcaccacggtggcggtggccgggcccgacagcggcatcacgatacgcgagtagatgcggaaccagccggcaccgtccacgcgggcggcctcgtcgagatccttgggaatcgtctcgaaatactgcatgtacaggtacacggagaaggcgttggcgatgaacggcacgatctgcacgggcagcgtgtcgatccatccgcgcgtgaagtacaggccgaactggtccaccaccgggcgcggcagctggttgacccaccacagcagcggaatcgcgtaggtctcgaacggcaccatcaatgtggccagaatgaacgtgaagatgatcttcttgccgcgcacctgcagacgttggatggcgaaggcggccatcgagttgacgattacgccaagcaccacggtcaccagcgtgatgatcaccgagttcatgaggaaggtggaggccggcacgcgggtgaatacctgcgcgtagttgtcgagcgaaatgtgccccaccggcaggaacgccttgaacgagccgaggtccgccataatctcatcgtccggtttgaacgagctgacaaccatgaagatcagtgggaaagcgaacaggcaggcgaacaggatgcgtacgatccacccgcccacggacagccggttgtgcttgtaggcgactttcttggcttctttcgacgtgcgcttgtcgtgcgcggtttggtcggcctgcggggatgcggccatagttgttgcgttgctcatcgtcagtccctttccttacttctctcgagtcagataacgctggatgccggtgatcaccatgatgatgcagaagaacacgagtgtgatcgcggaggcgtagcccatctcctgctgctggaagccggagcgcacagcctcgaacaccacggtggtggtggcgtcgcgcgggccgccttgcgtcatcacgttgatctgagtgaacaggctcatcgcggcgatggtgatggtgatgaggatcatgttgcgcgtggagcgcaggcacggccaggtcacgttcttgaactgctcccaggcgttgcagccgtccagttcggcggcctcgtacagttcgccggggatggtctgcaggccggacagccagatcagcatgtgctggcccaccgcttgccagatggacatgacgatgatcgcgcccattgcggtgcgcgggtcgttcagccagtcgactgcctgccagtgcccgaaggtgagtttggccatgacctggttgagcatgccgtcgttctggtagatgaacatccacagcagggagacgaccaccatcgaggtgacgacgggcaggaagtagaccgtgcggaagaacacggaggagcgcacctgcttgttgatcagcacggcgagcagcaggccgagcccggcttggacgggcaccacgacgaccgcgaacacggccacgttacgcagcgcgtaccagaacgtcgggtcggagaacagtcgggtgaaattgtcgatgccgatgaaccgggtagggttcgggctgattgtgcgcgcgttggtgaatgccagtccgaaggccagaatcaccggaatgccgatgaacagcagcagtaggatggatgcgggcagaagcatcgcccagccgacggcgttctcgtggcgctgttcggcggtggacttccggcgcgtggcgacggtgccggttttgccggcgctggttccgggggtgccggttttgtcggcaccgactccggtaccggacgtaccgcgagtggttgcggttgatgttgcagtggtcatggttggtccctctcagttcttccggtagccgtcggcgccttggatgttgccgtcgatatggttgactgctttgtcgagccaggtgtccacgtcggcaccgttcatgatgtcgccgatggtcttgcggaactcggtggagatgaaattgtatgccggggtttcggggcgcattttgacgtacttcttcgaaatctcggtgaagatctgcatgtcgccgccgtcggagaactcgggcacgagcttctgtgcgccttcggtggtcgggatgttcataccggccttggctatgttggcgatgtacttgtcttgcagggagaatcggatgtagtcctgcgcggcttcaggtgcggggcaggattgggtcatgccgaccgtccacgagccgccgccggtcaccgagccgtggccgaagtcggtcatcggcataaccacgatgtcgtcgtaatccttggcgtacttctggaaagtgctcatcgaccaaatgccgccgtacagcagtccggacttattgttcacgaagtcgagcgcggtgtcggagccgcccttggacgagatgtagcccttggccacgaggtcgcgcatccagtgggcgaattccttgccttccttgccgttgagcacgccgtccgacgactggtagtccgtgcggttcaccaggtcgccgccgaaggactgcaaaatcggtgcgtaagcgtaggcataccattcgcttttgttatcggccgtgccgatttcaaacgggtaggtccattcgccgcttgccttgagcttggccaatgcgtcatccatttcggccttggtccacggctcgtcgaccgtagccacgcggacgccgagcttgtccagcaccgacttgcgggcgaacagggcgatggtggcatcgaaatagccgacggtgtacaggtcgtcgttccacgtgcccttggccgattccatcaggtcgtcggcgcgggacaacaggtccttgtcggtgagcggggcgaggatgccggcccacgcccagtacggggtgttcggctggtctacgtcgatcagacagggcaggttgttggcggatgaggcggagatgatcgagtcgttgtacgagctttgcgggaaggactgtagtttgacggtggccttcttgtctgggctggcgttgtagtcattgatgatctgctgcacgccggcaagctcggcttcgctgcctgccgtgtgcgtccagatggtgatttcattggcgttggctttcgccgccgcgcgttccgcctcaccgcagccgcccacggtcacaaggcttgcgatggcaagcgttgcggccagagctttgacggctgagcgtcggatggtatggggcatgatgctcctccttatctcttgtttctttcttccttgaataatggggtcgaaccggttcgacatacagtcgaaaccggatcaagtaggatagatgcgtgatttttgggcaggctatcgctgggggtggggccggacccaggattgcttgatgcgcagctggcattcaatctggggtgactgctcgctcagtggcggcggctgaaccttctcgaccgggtatccggcacgaggaaagggatcgggtgcctcgccttcgatgagcgaggccagcttacctactgcccagtagcccatctcgtaatgcggcagttccacagtggaaagcggcggatccagcgcttcggccacaacctggtggttgtcgacgccaaccaccgcgatatctttgccgataatcagcccgcgacgggtggcctcggtgtagatggcccaagcgcgggtgtcgttgaagcagaagaagccgtcgacatccgggtgtttgtcgaagaacgcgggcatgcgggcggcggcgtcgctgccggtgtccatgttgatcatgagttctgggtcgaacgagatgccgtgctcggagagggcgtcgatgtagccggacactcgcccgggctgagcgaccatattgtgcatggtgcccacgtaggcgatgcgggtgcagccggcgtcgatgagatggcttgtggccttgaatccaatgctgtgctcgtcgggcacgatgctgggcgctacttcggcggcatcggtcgaatcggcgagcaccactttgcagccctgcaacgattgaggcagcatcgtcttctgattaaacatgcgtgcgtagatgaagccgtccacgccgaactgccgcagcgtgagaatttcgcgatcggagcttttggctccgctgttgatgcccacggtgagcagcagatatccgagtgtgcgggcggcgtcttgcgcgccctcaatcatgcggccggcaaacggcgtggtggccacttcgtcgctgaggaatccgatggtgcggctactgctggtgcgtagcccgctggccagacggttggtcaggtaaccgagttcggcggcgatggcgcggactcgctcggcgacatcggggctgacgcggccgatatcgcggttgttgagcaccagagagacggtggagatggaaacgccggcgcgattggcgatttgcttcattgtgaccacggttctacctccttgctggcttcattggctggttgtggttggttgttgtgaagttgtccttcattggatcgttatgttaaccacgttaaaaagtcaaacgtttgacgtcaatcgatttacgtatcggagtgtcggttggaatatcaccattttacgctgtgccaaccgttggtcaaaagtttgacttggtgttgactttcagagttcagcttgcggggtggccgagggttttcgtttgtggatgccgcgttccgtgtgaacctcgttattctggatgtgttgtaaacgtgttgaatggctgataatgggtgctatgggcacatttggtttgggtcatgacgtggttgacgtcgccgcattcgccgagcagctgtctgaatccggctcgcgcatgcgctcgctgttttccgttcgtgaggtacgtcaggcggcggatcgtgcacggctgaagaacgatgacgaggccgtgcatctggccgccaaatgggcgggcaaggaggcgttcctcaaagcgtggtgcgattatcttggcaatgccccctatccgttcacgcttgataatttcccgtggcctgaaatcgagatcttggatgattcccgtggtgtgccgcatgtgtctctgggtaagggggcggcgtcagtcttccaaactgattacgcgaattcggctgccggcgctcgctattcctctgcttgttcccctgcttccgataacgggccttatgcagtgatgcaggagcggcggaatgcgcgttcggcgcagcgctcggctctcggtgcggggttgatgccgcatatccatatttctctgagccacgatggtccgattgcttccgcggtggtgacgatttctgtggaatagcgccggtggctcggcgagtcttgggttgtgattatcgaaccggtttgatgtattgtaatacaatacgtcaaacgattgatgcgggcaacggatagagacaaaggagtttccggtggctcaaagcaaccagtcggcacaggcaggatccggactggtgcaagcgcggcgatatgttcggcatgaccatgtacaccgacctgttcgccggcgacctcaagaaacttgccgacaagattccgtacttgaaggagcagaagctcacttacctgcacttgatgccgttgattgacatgccgcacccgaacaacgacggtggctatgcggtccaggacttcgacaccgtggacccgaagctcggcaccaacgaagacctcgccgcctacttcggcacgcccgaggcccccgagtgccacatgctatacaacgtctccatcatggtcaacctgtggagcgcgctcgccagccgcgacgtgcgtctgctcaagaaccagatcgacaagctcgactcgctgcccgaaaactgctggttcgtgattctggacgcgatggacgccgacctccaaccatacgagtctcagctcacccatttgtgatttcgacggtttctagctcccctctctgaggggagctgtcgccgtaggcgactgaggggagtcctcggcaaagccgcaatccatcaactagattggctggtcctgctgcaaccacacgcgtttgccatcctcgaagaaatatgtataataactcaagtcgccaaaagcgacgcttaacgcggatgtagctcaatggtagagcctcagtcttccaaactgattacgcgggttcgattcccgtcatccgctccactgaaagaggccgcaaacccttggaattgcttggggttgcggccttcggtgttttcggtgcgaaaaacatgccgatgcaagttttccgcccaagtccaccaatttccgcccgaaatgtttgacctaatgtttgacctcgaccgcacgaaaaggaagaggcctgaagcccatgacacagcagaagaacacccgtcgacccaacggaagcggaagcgaatggcgcgacgacaacggagtctggcacgcgaagaagagcgccggcgtcaatccacgaaccggacgacgccgctggatcgaggcgcaggcgcagaccaagaccgccgcccgacaaaaactccagaccaagctcgacaaacttcaacgagaaggcgatctgcccctcgcagacgtccccaccctcgacgtgtggatagaccgatggctcaacaccatcgcgcccaacgtcaaaccccgcaccctcgaaacctaccgatccgactgcaacaccatccgcagcgtcatcggcggaatgcgactcgacagaataacccccgccaccatcgacggaatgtgcgccaaactcgccaaggaacaccgaagcaaaaccgtccacaaccactatctcagactcaggcaggtgctcgacgcagcggtccgcgaacgcctcatcccatcgaacccggcgctcgccgcaacgccaccgcgctacgagtcgcaggccacccaaatcctcgaacccggacagccggcccaggcggcgcaggccgcactcgaccccaagcgtcgcaaatacagccacctggcagataccgacgacgaccgcgaaatgtggagcctcatgtggaacatcatgttcgagaccggcatgagagaggccgaaagattcgccatcctgcccgaagagctcgccaccgtcgacggtgtgcacggaatccagatcatgtgggagctccaacgcttcagatccgatgcagaagtgcccaactggctccgctcccgccattacgagggatgcttctggctcgtcgaaccgaaaagcaagcagggcaaccggtttgtgcccgtcagcaaccagacgtggctcggactctgggcgctcgtcggacgcaggcaatgccagcccggccagctcatattcacgcgcgagggacacccgctcaccaacaccgtggaacgccggcgctggaaacgctctctcgaagacgcgggactgccctacgtcaccatccgaagcgcccgccacttcttctccacgcacctcgccgaagccggagccccggaagacgcgagaaaagcgatgatgggccacgcaaaaatcagcacgacggccggatacacccactggtccgccgcaagccttgcggcacttgccgacaaggctcgtcaggcggtgggggaatcggcctgattgcgattcttgcgcggccttcccccgcccgcaccgcgaccgggacgagcggcgttccaagcatcgatggtctcaggcagccagccgcgagtcgtgccgatcagcgcgtccggctccggcagatgataccccctcgcggccggattgctcgtgccgatgcgctcgccgacctccttgaggctgagatatcttgcggtgctcatttccggcctcccgacagatagccgaacaccccggcggccatgccgaaggttccggccgcgatggcctgaccgccgatggcgagaatgaggcacatcgcgccacatatcagcgagacgagcctgtatgcgtttgttgtgttcatgatgttccatggattagtctggggatagggagccgcagctccggatactaggactattcggaatctgcggctcttgtactaccggcgaggccttcgccgtatatgcggcggcttgggcttcggtacgggtgacggctcatcgcctttggatttcaccgccgcgatgactgcggcgattccgacaagcagggagccgatggcttctatcgctttccagacctcatccatgtctcacctccttccactgttccgtttttgtttacataataattatagctcaactaagtaagttatgcaagtcagaacggcaaagatctggatgtgcctattcgaatgttctccattactcgcacatggtgtaacaagtgcatgtaaaaccggtagaaaatcaggataatgataagacgacaaggaagcgtctggccgttgtttttgcgtcggacgccagccggaaaaagtggagatgaattttagaataataaccagtagaattgttaactatgagtcaatttcgcgtgggagcctatatagatggctttaatctgtattacggaatgcgttcgcatatggggcgttcgacgcctgaatggcgatggcttgacatacgtggaatgctacagccgtatgcgcagtattgggatcccaacgcctctctgacggtggtctattgcaccgctcgtgtgaacgcctcttcctcgcagtcggcggcgattgaccagaatttctatctgaaagcattgcgtgcgtctggttcggtagatgaaatcgttttggggcattacgtagttcgcagcaattatgccttcatggttgataagttatcacgcagccgagtgcctcaactgctgagcgtaacggcgcagcagttcagcaggataatgccacgcggtccacagaattggcccatctcactccggaatggccatgtcggagtggatatacaacgaattgaggagaagggctccgatgtaaatgtggcttcaagactgttgcgcgacatgtacgagaacacaatcgatgcagctctcgttctgactaacgactccgatctgtcggaacccatacgcattgcgcgagaacgtatacctgttggagtgttgaatccccataaagggccgatcgcgggcagtctgaaaccattccgtaatgcgcagaacagaattggcagctggaacaaagctctctctccagccgattttaaagctcaccaactgcccgatgaagtcaacggaatggtcgacggaaaatacgtgtttgcgcgtaagccagcagaatggtgacatgctggaatacttgacgacatacgcctaccaaggtatatttaccactgtacccaccccgattgccactggcgacggggttttttcatgcccgatcgatcggcagacaaaggcgaaccatcggtatggtcatgttccgtattctggcaatcggagtatggatattcgccctgctgattttcgttggcggattgagcaccgatttcctgacatgcacaatagtcgcgctgatcatcgcattgaataccctgattccgtcaagccaaagccccggcgcccgcagagagcgatcggggcgattccgtatatacggcggtagaatctaatcaagccgcatcgagacggccgagagaacaacgaggttgggggcatgatgccggaacgagagaacgggaaaatgggcaaaatcgtgaaatgggtcaaagacaatggtctggccttcgcacgcgaaatggccggtcggcatgacgccgatatgagcaacgaaggggcgagtcgccaatttcgccgtgatatggaacgagccaccgcggcattcgccgagcttggcgcagacaagcagaaaatgtacgaactgctccgtaaatggttcggagtggacagcatggaagaagcggactcctacatcagggacggagcccagttcgaataccccatgacactgctcgaagaatacctgaaacatgaaggatacgagacaatggacataatcagattcaagaaagaccacaacgtagcggagagactcagacgagacccgtcactgtcaagcctcaccccagaacaactcaaacaacgaatggagcagaacaaataaaaacgtctccagcgctcgcctgtcgaacggtagaatctaaatatgtcgcatagaggcgggtgagagaacgaggggcgttgagctcggcagccatctggtggagttcaccgtcatacatgcgttactcatggtgccacatccgtatcattttgcgacacgcgcgggcgacctgaatgagccgaacttatgcacattttggccgaaaatgtgcataagttcatcaaaagtgtgtaaattgagcatacggagacgtgatgacaagccgaaaggagactgacatgactgcagtggcggtggctccaaaggcccataaaatcggcaggccggtcatgctggacagcgaggaaatccgaaagcgcaggaatgtcctcgaaggcaagtacggcactcgtgaacagctttctcagaagcgcgacctcatcggacttactctcgaggagcgcatcgcattgtacgacctcgaggatctcgacttcctagagggccgatgagcacggaatccgaccagaccgaggaacaggccatcgatttcgcccagagactcgagaacatgctcactgaggttctcggccaaccgtcggacgggcaatacaccgccgacccgcagggcgcgcgcaaaaaacgcagcgccagctatctgatcaagacgcgggatccgcaaggcatttctctcaccgtgggcggcagcaccatactccgcctctcgtaccgttaccaatgctcctgccgcgactcgaattcatacctccaagtggatgagtctgcgatcacgctgcgagccgaaagcgaccccgcacccatcatccactacgattacgtgcgcgacccccatagcgccattcccgcggcccacatcaacattcacgccagcaacgacagcgccacgaaagcgatgctcgcatgcggcagcaaaagccagggcaagaacagacgaaaagcgttccttgaaaaaggaaccttccccacattctcctccctccacttcccggtaggaggagaccgattccgccccggactcgaagacgtcctacaaatggcaatctacgaattcggcatcgacgcacagccgcaatggcagcaagccatcgaacagagccgggccgaataccgcacccgccaaatcagcgcccttgtatgcgaattcccggacatcgcataccaagccctctcgcaaaacggatacctcgacagcggcacaccgccacaacgacccgaacgagaagacaccaaaagtcgactcaccaaatactgacgccaaaccgccccggcgctcgcaaagagcggccggggcgattccgtatatacggcgcttgaatctaatcaagccgcatcgagtcggccgaacgaacaacgaggttggaggcatgatacccagagaacacaaaggggccagcgtactggccgacagaaaagattacgtagccttggacctcgaaaccacgggatatgacccacgattggacgaaataatcgaaatcggtgccatcaaagtccgaaacgggcaacccatcgaccggtacggacaactcatcaaccctggtcgccatatcccgaatatcgttaccgaaatccatggaatcgacgacggcatggtaaaaaacgcgccaacgctcgccgacgtgctctccgaattccttgactggatgggcgacggcctgattctcggccacaacgtcaacttcgacatcaatttcctctatgacaacgccgaagatatctgtggcaagtatgtcggcaacgacttcatcgacaccctccggctcgccagatacctctaccccgaagaacgtcacaaccgactgcaagacctcatcgtcagagtcgatatcgccgaagaccaagagcatagagcgctcgccgatgtggaacagaccatcgcgtgctatcggtggatgattcggcacatgaatgagaacggtattcccttcccggccggagatggccgcagccgcagaggcttatcttcgctattccgtggcggagatcaactgctgcagatagccccacaggacgaagtcacccctgatcccgcattcgaaaacctcacattcgtattcaccggcgcactcaagaaaatgacccgcgccaacgcacaacaggccgtcaccaacctcggtggcatcaacggtaaaaccgtcaccaaagacaccaactacctcatcaccggcagcaccgactacaatgccgccctcaaaggctccaaaagcagcaaatggctcaaggccgaaaaactccaactcgccggacaagacctcaacatcatcagcgaagacgtgttctacgacatgctgggggacagcatcgcccaagcaccaacgcaaagccaactgaaattcaaaatcacgcaaccagcttgcaaaaagattctggaaatacccagcggaaacctagatgcggaagaagtcagcgtattggccgtcgatgacagaactaagcccagcatcgttttgaaaactcaggacggcgaaattctcgcagaattcagctccagaatgaaagcgtatgaaaccatcgccgccctgaacggtagaacaatagaattaaccgcaaccaagcacgatgaattcgggtctgccccatacttcaacgcaaaagcaaaaatcattcgatagggcaaacagtcacaaacgccccggcgctcgcagatgagcgaccggggtgttttttgtttattcttacaagaattctagtttctgatatgaaaagccctggcgctcgcagatgtgtggcaggagacgccacggttacggccaaggcggcggcgtgcgtcgctggcgtcatcaggatttcggctgctggcgggtcggactggtcgcctcgatgccgcgcgtggattgtccggaatgcggcgtcgtggtcgcccgggtgccgtgggcggaaccgggcagccggttcacgagggatttcgaggcggagtgcgcgtggctgatgggcgtcgcgaaccggaagaccgtcagcgggttcctgcacgtggcgtggcgcgccgcgggcgacatcgcccgcagggtcgctgatcggctcaggacggcgatgccgtcgccgttcgacgggctgacggcgatcggcgtggacgggaccagccaccgcaaaggccatacgtacatcacggtggtcgtcggccacgagcgtcaccgcgtggtctgggcgcacgacgggtacggcggggacgtgttcgacttgttcttccggcggctcgccgaggagcggaaggcgtccatccgcgtggtcgccggcgacggggcccgctggatcgactcatgcgtcgccgcgcactgcccgaacgccgaacgcgtgctcgacgggttccacatcgtctcctggatgaccggcgcgctcgaccaggtccgcagacgcctgtggaaccaggcgagacgcgccggcaacgaggaggtgaccaagcgcatgcgcggcgtcaagcacgccgtcctgaagaacccggacgacccgaccgaccggcagaacgacgcgctcggcgtcatcaggaacacggacccgaagggccggctctaccgcgcctggcagctcaaggaactcctgcgcaccctgctcagacaccccctcgaccaggcgcgcggcgaactcgaccactgggtgttccgggcctcgcgcagccgcatacccgagatcgtcgaactctccgaaaagatccgacgccgacgccccgacatcctcagggccatccggccgggctaccccaacgccagactcgaagcatccgacaaccggatcaaggccgccatccgcatggcctacggcttccaccacgtcgacaacctcatcgccctgaccatgctccgatgcggcggactcgacatgcacctaccacaacccgcaatctaacccacgaaaacagcagaagcctccgttattacgaatacacgctataccgcgctagcgtaacggtaatgcctgacgcctggcgtttcactgagttccatgttggtgccaaggactgccgctggatgactcttgatgagatgcttgccgaccccggcatcaacaaaatcaatcatgatgtcgttgcgatggtgcgggataacttgtaattgttgccacttcgggcata

SEQ ID NO: 27 - DNA, 68731 bp, Unknown
  R30_18m  MAG No. k141_8398
ccatgtgttgcgtttgattccgcggctgaccgtggaggcgtgtctgccgatcaggccggcgatccgccgtatgctcgtcccgttgccgatctctatccggatgatccgccgttcctcttccgacaggtgcgaatacacttgccccaaggcgcgacaccccttcactggttatctggacaatctccaatctaaagggtgtcgcactttcaaatagacaacgggccacattttcatgctttatgcaaaaaatgtgaggcatacgcacatttcccatcaaacgcacaggtgcaagaatggcagcaattcgccattttttgaaatcaccatgtgcgtttgacggcgcgtaagcctcaccttgttctcagcaggaccgaatttctgtgagctccctatagcgctcccctacgcaatatgtccgcaaacgaccacaccacatgggcgatacgcgccaattcggcgtagcggccgatggacagccactgcacacggtaccgttcgaaccacaactccagatcggcggcaagacgggcgcggcgcgaggcatccagcgcacggccggtcacatccttggtgtcacaggcgtcctcgccgccagccagtaccagcagttcctcgcccagtctattgaacaaccgctgcccatccagcatcacccacagcagttccgggttcaatcctcctcgtgccgagccatcgagcaccgcaacaaccgcactgccgcaatcgatcaacgcccggtcgcaatcccggcgtcgttcgagtcgggcatggttccgcaggagcagccggcggcgcgcatcggcgcatcccagcgtacggtcaaacacgagctctcccccgcacgaccgttccacatacgatgccacatccgtattcagcatgccggtgccggaaccgtattccagctccagcacctgcacggcaaggtcccaggggaatgacaccccatcggagtcgatgcggacgaggcaatccatgatgcgaccggactcgtcgccatacaccagaacggagatccgacggttcatctcatgcgcatcgatctcaatcggattccacgcgttctgagcgccataacacaggcccggcacgctcagacgcggatcgttgacgtggccgtaatcgccccaatcggtgaccaccatgccttccgcgccatacttgacacccgccaatgccatgtgatacgtgttcagccaggcacccgcataatcggggaagaaccggctccaagcccgcaccgcggggcacacgaactggcgacggccctgcgcggcgatggtctggatgttgctctcgtcgatctgcggctcgtacatccagttgagcatcgtgatgtcgccgggcagcagatccatcgtgcgcgggctttcgagcgcgatgtccgcccacaacatcggctgccgaccatggcgggcgagcgtttcgcacaaatccctgacgaaaccggcatacagttcatcgcggccggcttccggcgcgtcctgcgcggacctgccacgtcccaagtcgaacgtctcatcgccgccgatattgaaggacttcgaacggaacagcggcgcgtattcctcaatcaggcgcgaggcgaaatcatgggccttgggatcggcggcgttcagcgtgtgatgctccatgcgttcgatgaagctgaacgggcggtcggcgtcttcggggaactcacccagcccgcgatgctcacgggtgcgcagattcatgtacatgtgcccgaacgtggccaacgacggcaccaactcgatgccgcgacgcgcgcagtactcgtccagatacgtgatgtcggcggccgtgagcggatcggtgccacgccacgcctcgctgagctcgacgaacgcgaaggcatgctcgacatacagctggaactgattgtatttatataaggccagctggtcgacgaaccaggtgaggaactccatcgtcggcactcgtccgcgtgtcacgtcgagactgtaggcgcgcaccgcgaacgcgggcttgtcttggatatgcaggcagggaatggcacgcgaggtctgcccgatgatctgccgcagcgtctgcagaccgtaccgcagcccgctttcgccgccgccacgcacggcgatggtatctgaggcgaacacatccagcgtgtattcgtcatgcgccaatcgtgaatccaggcccagggatatgacggtgccgttcatcgctgccggcgcacccgcacgcgcatctcgcgcatcttcggcggcattggcgctggcgtcgtcttcacctgtggctgcacggacacggcgcgtacggacggtgacgccgcagtaacgctcgagctcgctggacagctgctcaatcggcagcgtttcccaagtctcatcggcaccttcggtggcggcatattcgggaattcgtttctcgatcgtcaccagggacccgatcatagccgtgccatgcgtgtattccaatgtcaccggagcgggaatcaggataagacgccgcgttgcgtcgtcggccttatgttcggaagtgggcacagctactcctttcatgtggttttcgttagcacgccaggggatattgtacgacaccggcgaataggcgcgaagagaaccgttctctattggccgattggcaccgctcctggaccatcaccccttagcaccgctccaacagccgttcagccaaccctcggaaggtctggccaatgccatccgtgcgcaaggcgccatcgacatccagcaccgcgggacggcctgcttcgccgatctcgcgcacttcgggttccagcggcagctgggccatcagcggcacgtcatagccaagcgccgcgcttaactgttcagacacgcgctgaccgccgccggcaccgaaaatctccagcttctcgcccttgtgctcgtagtagctcatgttctccaccacgccacgcaccttcatcggcacctgcagggccacgagtccggagcgcacggcgatgtcggaggcagagggctgcggggtggtgaccaccacgagttcggcgttgggcagcgcctgggccacggaaatcgccatgtcgccggtgccgggagccaagtcgagcaagaggacgtccggctcgccccaccatacgtcagacaggaactgttccaaggagcgctgcagtcgcggcccgcgccacagaatcgcccggtcggcaccggcgaacatgccgatggagatcagtttcacgccccacgcggtgaccggcataagcataccgttcagattggtaggctgcgtgtgcacgccgaacaggcgcggcagtgagaagccatagatgtccgcgtcgatggcggccgtgtcgaagcctagggccgcaaacgtggcggccaggttcgcggtaaccgaagacttgccgacgccgcccttgcccgaggcgatggcgaagatgcgggtcttgacgcccggcttgctgaaggggttccgcttgcgttcggccttgaggtcggcaaccagatcggccagcttgtcacgactcattgaaccgacttcgatatgaggcagcagctgtacgcccggataggagctgaccgcgccgttgatctggttgatgatggtctcgctcagtgggcatccgggaaccgtcagctcaacgtgcacggtgacgtcgtaagtgccggcgtccgacgatgcgggcgcggcttcgatagcggcaatcatgccgaggtcggtgaccgaacgaccgagctcggggtcgatgaccttgctcaggcgttcgtagatgtcggcttcgatctgacgtgcgtcgctcataaatccgtatcctcctttagggcctgttctaccctagcgtgtgatgcggcggcatgccagagggagtggagtaagtcacactggggcgggattcgctttttctctcccccagtcagcctaaaggctgacagcccctcatcagagggggttaatgaagcgtctgagggggctattttagatggtgccggtggctaggagctgggcgaattgggcttcgcccagcatggggatgccgagttcctcggccttggtggccttggagccggcgtttgcgccgatcaccacgtaatcggtcttcttgctcaccgaaccggccgccttgccgccgcgctcgataatcgcctctttggcggagtcgcgcgaatagccctccagagaaccggtgaccaccacggttttgccggccagcgtctgcggcagcgaactggtctcggcctcgtcgacgcccacgccggcggcctgccaagcacgcaaagtcgcgccgcgccagtcgccgggctcgcgggcggcggcgaaccagttcaccaccgattcggcgatttccgggcccaccccgtcgatggccgtcagatcttcaatcgtggcgttttcgatggctgccagcgagcccatcgccgaggcgatcaggcgtgcggtaggcggaccgagccggcgaatcgacaacgcgaccagcacacgccacaggtcggcgtgacgggccttgtccatttcgtcgaacatcttgcgcgtgttttcgccgggccgaatgatcaccggcacatccgtgacgccggtgcgcgtggtcttgtggtccacgcgcacgatgaccgcgtcggccggcacgtcatactcgggataggaggctgcggcaaagcccggcatagtaccaagtggagcctcagccccggtaggtgcgccggtcgtctcgctggcggcacctccctgtgtttcggcagattcgattgcggcctccctttgcgcgcgttcggccagctgcttggccgtgagcttcttggccggcgtgggcgcggtccagaaggcgggcacctgatgccacaggccagagccaccgacacgcttacgcacctttttcttcttaccgttcgcaccgaccgtctcatgcacttcgacgattgcggcctcacgccacacacgcacgtcgcgcagatcggcggcggtcaggtcgaacaacccggattcgttggacaacaccggcttctgcgcggccggcaattccagcccctccaccggctcgtacggttcgggctcttcgccgggggcgaccagaacctcggtgatgttcggcgcgtaggtcgccaccgaatcaggccggttctcctccgggttggtcagagcgatggccgactgttcacccagatgctcgatgtcgaacgccttgcgtgaggccagcgaaatcacgcgctcggtcaactgggccgggcagctttccacattcgggcagcggatgtccttgtcaccctccttggcgggtgccagtttcgcgccgcatgaaggacagaactcgggcatgacgaattcgcgcagctggccctcacgccctttgcgccgttcaagcaccggaccgaccagttcgggaatcacatcgccggccttgcgcaccaccacggtgtcgccgatcaggatgcccttgcgtttgacttcaaatccgttgtgcagcgtggtacgagccacggtggagccggccacgtagacaggtttgagcacggcgaccggcgtcacacggccggtacgccccacctgcacggtgatgttgagcagttcggtgttgacctcttcgggcgggtatttgtaggcgatggcccagcgcggcgcgcgcgaggtggcaccgagggtgcgctgcaggcccaggtcatcgaccttgacgacaatgccgtcgagcgcgtgctcgatgtcgccgcgatgctcgccgtagtactcgatcatgtccaggatctcctggaatgaggtcaccgcacgattgtgcggggagaccggcacgccccacctggtgtatagatcgtaggcctgcgactggtcggcgaccacatcatgggtgccgcgcggatggtccgccccccaggtgagctgccccagaccatgcgcatagaagctcaggcgacgggtggcggtgatgcgagggtctttttgacgcagcgagccggcggcggcgttgcgcgggttggcgaagggcgctcgtccggcgtcctcctgctcgttgttcagggtgtggaagtcatcccagcgcatgaacacttcgcctcggatttccacgaagtccggaacgtcttccttggggccgccgaggttggcgggaatggagccgatggttcgcacattcagggtgatgtcttcgccggtaacgccgtcgccgcgcgtcaagccctgttcaagcacgccgttgcgatagatgaggttcagggcgaggccgtcgattttgacctcgcagctcatgggcaggggcttggattcgggccaatcgaggtcgcgaatcaccgaatcgtaccaatccttgagctcttcgatggagaagacgtcatcaaggctcatcatgcggctggggtggcgcacggaggcgaagtcgttggagaaggagccgccgacgcgatgggtgggcgactgtggattgtccaatgaggggaacgccgcttcgagtcgttcgaggcaacgcatgcgcgcgtcgtaggcggcgtcggagctgacgggtgagtcgtcgatgtagtaggcgatctgatcggattccacccatgcggccacgcgagcccacaggcgggcggcggcctcagcggtcatcgtgttcacgtcgaaacggtcgaggcgtatcgcgtcgtcgtcagtgggctgcagtgcggctatccattgttcggagccaggggcaaaacgtgcaataccggtatcaggccggacctcggccacatccccatcgtcgaaatcccatgccagttgttcgttcgtgctcatggttgtctatcctagcgggctcggctcccctcggccggctataccgtcaactcccctcaggcggctacgcggatagcgagcgcaggaactgggcttggatgatatcgatgttgtcgccttcaccgtcattcatgcgggccacggccaccgagagcgtgcgggccggcacgaacatgccctcatccacgcacacgcgggcggcgtcacgcacgatgtcggccacttcgatatgcggccagaccggcagatcatgcgtggcaagcacatgggcggccacctccaccgattcaggcaccggtatgcactgcgagtccgcacgggaaaccagttcctgcagttcgctttccaacgaaccaatggccccgggagcgatgtgatcgctcataatgtaggctgcggcggctgtgtcgaaccggtcaagcatccattcggcgtacgcgaaccggtagtaggcgaacgcggcatcgtcgcggtccaaggccacgcgcagagcattcaggcaggcggcgcgtgccgaatcccaatcctcattgcgggccagttggatggcgagcttcagatgtgagagcgggtaggcgggcgcgtacgccaccatacggttgaggtgcggaatggccgcctcggcacccttgatctggctcaacacgtcagccagctccatgtgtgcgtagaacagattgtccgggatgagcaccgtacgctcgtccaatgtggcgaacagtcggttgtagaccacgcgctcggcataggagttgaagtatcgaggtacgccatggcctgccgcatacacctgatccaaatgggccacagccgcttcggccgcttcgatggcctgatcggcttggcccgagaacagcatgtctcgggcgcgcagacgctccttgtcaagatcgtcggcaagcgtgaacgtgaagtccggggtgtccttgccatcgatcaacgcactggtgacctgagaggccaaaccggtcagttcgggatcgcatatcgattcgatgatctgcatggctcgctgggccttttccacggagccgagcgacgtgttcctggcgatatcgtggaattcgttgacgccatgctgcagtaagtccactcgctggatagccagtccggcactattctgtgcgcccagcacgtgagcggtcgccgggctgaattgacggtcggccagttcgggctcctcctgggatccggtgggagagaaccggctgtccgccaagtcgaagtcggcgctgatgggtttcaggccgccttcgccgtccacgtccatcacggcaccgaacatgcggtaggtttcctcgggattgtcaagcccatcggtgtccagtcgcttgaggaaggcatcacgggtgaaggtgacggtgaccatattgcgcacggtgggattgcggcgcagcacgctcatcggatcatcgtccatgccggcggccccatcagcatcgtcagtgccgacgccctcgccgccgataccgcccaggtcgtcgcctgcgccggtatcgtccggcatgccgaacgccatttcgtcgatatcgacgcccttcatcaggtcttcgaactgcgaatcgatggacgcggcgccatcggcgtcagcggattcggccgcggcctgatccgtagcatccgcagacggtccggtaccgttgcctgttcccccggccgtgccgcgttcgtcaccggacgccgcctgcccgaacgtctcctcatgggtgatggggcgggtcgggtcgccatggaaatcaccatctttggggtcggctttggaacccacacgccccaaatcgccactgcgcagatgttcgaaggcgcttagggcctcactcatcatcgcctcgatggcggaatcctgttcggcaatcgcctcttcaagaccaatggaatcgatgtgcaacgacacctggcgcacggattcgctggtgccgaaactcagcgctgccatcatcaggccgacacgcaggttgtaggcggcgctcatcgacgcgcgttcggcgctgctcagcgcacgccacgtacggcgagtggtgtcataccggctatcgggcatcatcgaggtgccggcagtggtgaagccaatggccacttcacccgaatccaagcgcgaccggaactccacatcaaaccgatacggcaaccgtaaccggcgcaacagtgaggagagggtctgacgatacacccattcgtcgctcctcgccggcgaatacgaaggccgagcggcttgagtgttggtgtcgctcttattggtccgctctacagcgccctcaacactctcagtactttcagcgcccgcagcattcgtcacacccgaatccggcacgttctgctggatcagcacatctcgaggatcagggaattcactgcgaatctgcccagccgtgcgtgcggcgatatcgaccaggctcagcacggcccgacgctcctgctcgccatcatacgggtcaagcgccataatcgcagggttctcaatgagtttcatgtcgatttgcgcggcctcggcacgggtcaccgtatcttccgtagggttgcgccccaaggaagcgttgcgctccagccaagcgctcaccgcagcgaatcggttgaggttgccttcgatcttcaaggatttcagcgcctgcccgaatgccaaggacttatcccacgtaaagaaatagccgctcgaatacgtcgaggtgtacaggtgcaacggttcggcgccatgcaccgcttccagtcccggcgtggtgtcgagggcgccggcttcgcgcatcagatcggcgaagtgatcctccagaccggaggcccgcatgccgtgggctcgtgccgccaaagtgtcacgcaccgaacggcgaatcgcaccgattggcgcctcacggttgagacggcggaagatattgccggaaccgaatccgatgagcagaccattgatctgcggcaacatatacgtggcgaagaacgcgatggtaatggcatcgcggtattccaaatcatgacgcatcacaggcggcagattggcacgcatctgctcaagcgtgtaccggttgccggccttgagccatgaggcgagccacgtcatgcgtccggtgtcgtcacgccccaccacgccaccggtaatggccttcacgccgtcagcaccatgaccaaggccacgccccaaaccacgcccatgatgcagcgcacttcccaggccatggcctgcacgggagaaaccggaacgtgaacgcggctcgtcgctttcgcccagccgctcaccgtccggcagagtcacttccttttccttgccgaacatgaatcgcgcctgcatatcctgcacgtccatgttggggtcggtgcccacgaatacgcggccatgcgtatcggcgaacgccacctgcgcaaaatgatcgcggtcggggaaaatgccaagcgaaaagccacggcctctggtggagggcagctgcgcccatccaagcaccagcccttccggcacgttctccaattcggggaaggtgcgtcgcttgattacaggactcagcgccactgcatggcgagtcagttcgtcgataatgccgcctttacgctcactggtctcccgcaaggcatcgccgaacggattcgtatcgtgcttcttcggcttggacagtcccagatcggccgcgagcgcgttcatcgaatccttcagcccgcccagcagtggcgtgcggttgtgcttcccatggtccgatgtacgttttggcatgattcacattgtctcttgtttgcccgacatcaagcccgaataaagcctatagaataaatgcgtgcattccatagaccacactcgcgcagaccgtccgatgccgtcgaatcatgaacggcacctgcccagccgcccggatacccggcaccggctgcgtttggtgcgcctgctgatcgccttgctggccgccgtcgccgccatcgccgccatggagtgcatcgtgttcaacctgccgttctggcgtacgctcggagcgagcacggatacgaacgccgtgcataacacgctgggttcgggtctcacgcgccggaatgatggcatgttgaccgtcaccgatccgaccaaggcctatcttgaactgaccgcggacggcacgtcggattacctacgcatcgataccgagagcagcaaggtcatcgataaggcccgcgagcaggccgaggccgaatccaaagcgaacgacgataaggaagtcttcaaaccgctggcgaccattcatgtgcgcgcggatgtcgatggcatcaccggcaaggcccagtcgatgaatcccgacgctattcgcagccattatgtcaaggcgccgggtgccggcatcgtgcgtatttggattcaggaagagcgcggcgcgatcgtaccggtcaccgacgcccgcgccaacgtgcgcgtaccgttcgtcatcaattggatgcgcgtgctcgccatggccttggtgttgctgatgattgccgtctggaggccgggatcgcgcctgtggcgtatcacgcttgacccgtccagcactcggcaacgacttgctttcgtggggcttctggcgattcctaccctgcttatcggcgtatccatcatccacgaactgtggtacgcgtcttcgctcgtcttccacgtttccggcgattacacctatgatttcgaccagtatgggcatgtggccgatgcgctggtcgccggccggccctggctcgacttgccggttcccgaacaactggccgccaccgagcacccctatgacgtagccacacgtgcccagctactcgccaatggagccagtccgctctactgggattacgcgtattatgacggtcactggtattcctattttggcgtgttgcccgcagtgctgctgttcgtcccctatcgtctgctggccggtcataatctgccgacatccgccgccgagtatattctcgtgctgctgttcatcatcttcttctccttgctggtgctgcgcgtcatccatcgtgtgatgccgaagacttcggtggcggccgcgtcgttagtagtggtctcatcgttggtgagcgcgcaagtggggtatttgctgtatcgcacgaacttctatcagataccgttcgccgcatcgctgacgttgacgtcgctgggactatggctatggctcggcgcggacacgtcccgccgtccgctgagaccatcggaccgatggcaggcgggcgatgccaagcctctctccctgccacgactggccttgggcgccttgtgcattgcggcgaatttcggatgccgaccgacgttcaccttggccgcattgcttgcgttccccctgttctggccgcagattcgcgcgctgggcaccggtctgcgcacacgccgcatcaagccgttgcaggcgttgcgcgcgccgctggcggtaatcattcccgccattctcgtcgtgacgcctctgatggcgtggaacatggttcggttcgattccccgttcaatttcggcaatgcgtatcagttctccatatccgatatgacccggtataccaccccgtccgcggatatgcccgccaacatctggtattacctgttcctgccgctgcgcttcatggatcgtttcccgtggctggcgggctctcccgccccgatgccgcaatggggttattacgaggtgatggtcggcgcgattttcacggccacgccactgaccttgatggctttggcgctgcccctgctgcgcagattggaaacacacggcatgcggccatggctgatgtcttgcttggccgtggcggcggtgctggtcgtattcgacagccgcgtcggcggtttgggatggcggtattccgccgatttcggctggctgatctcgctggcgtccataccggggctactgtggctggtcaatgggcgcgaaccgagccggtcattggcgggggccaacgacgccgcttcaggcgatggcatcgcccgcgtcactccgtggcgttggctgatgcgctgggtcgtggtgctggccgtattgtgggcgctgggcatagccatactgagctgcttcgtgcagtcgcgcagcgatgcgatgatcgacaacaatccgacgctctggcatcaggttcagtcctggttcacgatgctctagtctcgtatcggcggcgaatcagatcctcataaaacgccacagcctcagccggcgctccgtcaaacacgaccgcgtgctcgtccagcaccagtatgcggtcgatggcgtattcgggccggcggatcatatccgtgtcatgcgtggcgaaaatcacctgcttgttgtagctgaacaacgccttggccacatgcgcggtgccaatctcatccaatcccttgctcggctcatccgccacaatcgcactcggctcaaagctcagcgcggccgcaatagccagcaggtgccgtttctcggagtccaattcgccggccttggccttggagacctgcgccaaatcaaaatgcgcgaacagattaccgatgcgcgcatgacgttctgactcgggcaccttgtgctttttcaacgcttcggaaacagcctcggaaatattcgccgcttggtagaaactgttcggaatctcctcgcggcgaactttgccgaccagattatcgatgcgcttcgcgtccttcttcacagccgggtcaagacgttcctcaccgcccgcaatggtcaccgtgccggcgttggccttcaacgaaccgtccagcagacccagcaatgtggatttgcctgcgccgttcagtccgatcacggccacccgccgctcgctgatggtgatgtccgtgggagcaagtcccacgtgcccatcatcatacgtatgcccggcctgttccaaagtgaacgtcagcgatgccgggtgtggcagttctttcggtctaaacaagaatcccatgccgccattgtacgtggagtacaggtgtggtgccggcaaacaccggcctatcgcagcaaagcggcgacggtattgagcacggcgcggatgccacgctcgaattcgtccggttcgggcagcagggaaacggccaggtatccattggaggtcatgtcgaagaagtagccgggctgtccggtgagttggtgctcgtcaatcagccgcaacaccagttcgttctcatcgatgacggaaggcactcgtaacagcacgttccagccgccttcggcccgtagcacgctgaccagcccgttgggatcggcgtcaagcaactcgtgcaacttggccaggttattgcgcacgcgctcccccacccgtctggtctgtgcgggcgcggcgttcaataatgcgggaatccgttcggcgatgatgtcgcccatcggcagataatcgtcggcgatgacgtccagtcgacgctgggcctcggcaacgtcctcggcaggtccggacacctgaatccacccgactttggcgtgcggcgcggccagcattttggagaatccgtctagggcgaaggtgagcacgccgcgctcccccgcgagccgtgcgtcgccggggaaaggttcgagagagtaatcgaagaacacttcatcggcgataagggcgatgccgtgctcacggcacaatgtcacgatacgtgcacgctcggttggttttacgtacgaaccggtcggattgttcgggttgatgagtaccaatgctctgacgcgttcgccaccgggctcgctgagtagccgctcgagttcggcgatgtcgatgaaccaggagccatcgaattgcaactggtattcgaccgtatcgacgcattcaagccgtgcaatcgactcaatcagcggatagccgggtttgggtgccagcaccgcgtcgccggcatcgcaaagtaacttaatcagccacgaatacgcctcggacgtggagctcagcaggtacagggcgtccgggtcggcgccctcgatggcggtattcacattggtgaaagcggcatggcgctcgttcctgccctcgccggcggcgggcgaagccaactgagggctgcttgcgtctaccacgtttgccgtattgaggaatgcggccaatgattctcgtgccgcacgcggtccacgcgggtcggccgtatacacgctcggcaccaattcgggtgccaacccgtggcgggtcggattggaatcgttgagtttgctgagtgcgatgccgtttgccttggctgccgcctcggccgccgcaatgggattcggcgcagaaatatccacacgagaagagaaatgcacgctcataccctccacgataaaaccacccctgccgagccaggtatatcgaggcctcatatccaccagcatccagcactacgacaatcgtgcggcacggcagcggagtcgtcagacatactatgacttcaatccacatcgaataacggcctagctacattcattaggtcattttcgcgctcattaggtcactgctagtcgagcctcacaattgttgatgcttgaaacgccgccattccgagcccattgcaattcaggtttggaatgggagtgacctaatgaacacataatcgacctaatgaacgaattactcattaaaaaaggccgcccgaaatacttggacggccttacacatggtcaatacggctcctgcgccagcagaaataactcagctcactgctgcttggtgctggcgtagtaggcggcaccgacgatgccagcctggttacgcagcttggcgggcacaatcggggtcttgatatccacgtacggcaggaacttttcgctctgacggctcacgccgccgccgacggtgaacaggtccgggttgaagtacttttccataaggccgtagtacttggtcagacgcttggcccacttcttgtagcccagttcctcgttctcgcgaatcgcggaggaggcatacttctcggcgtccagatgcttggcgctcaggatgatgtgtccgagttcggtgttcgggatgagcacgccgttgtagatcaaggcggtgccgatgccggtgcccagtgtggtggcgatgaccagaccatcctggcccttggcggcaccgaactggacttcggccaggccggcggcgtcggcgtcgttcaccacgacgaccgggcggccgcaggcttcggagaacacttcagtaacgtccacgccaatccaagactggtcgaggttggccatgaagtcgagcttctggccgggcttgatcggcgcggggaaggcgatgccaacgggtgcggattcaggcacttcgaagtggtcgagctgctgcttgacgattttggccacggcctgaggcgtggagacctcgggagtgagaatcttcaatcgcggctcggcgaaatcgcccttggtcagatcgacaggtgcggccttgatgccggaaccgccaatgtcaacaccgaaagcctgtgcagtttcaatcatcgttgaccttcctttccatacgttttcatcagttcgtagggttgcgcccagtctaacgcgaattgtgctcaacacgaaaccattacacaccaattgtgcaaacgtgtgcatcgccgccggtcactacgtaccctatccgtatcgtttttcaagccccccaatgggcaatgcgcgcgatttcgatactaggaaaattcggcgtctgtggcggcctgactctgtgtcgcgcgcgatgaaccgtcagccgatcaccttctcgtataatccggccgacgataccgccgccgcgcatatcgaccagagtgcgggagacgcgcaccacgcgttcaatgacatgggcatcgccaagctgcacttccagatcggtgccggccaaggccagtgggcctggggcgacggtggcctgttcattcataagtgaccgtaaataagctccctctgatgagggagccactactacggctacttcagcgacggcatgggcttccaggtggggtcgtgcatcagcttgcgcgagtcccaccagcccttggcaatctgcaccaaaccggtcttgaggtgctcgcgatccaccatcaccaggcgaatgacttccttggccgcggtgagcacggtacccagcccaaacaccagcggacggaagtcaccataggtcatgaagtaccgggccatgtatccgcggttgcgcatgatgtggtaccggttcatgtcggacgtggagttgagctggcgcacgccggcgatatcccagttgccgatttcgcgcgtacggcgcaggatcacgtcgggcaccacaatcgggttggtgaccttgctggcgcggtagccatacatcgtgtcatcccagtagatgaagaagcgcgggtccggcagaccgatttccgtgaccacacggcggttgaacaggccgccttcgaagcacagcgtgtccatcactcggtatccggccgggccgaatgcggcgggcgcgatcgggttcgggatgcccagcggcacaatgaagtcgtactgccagtagaacgggccgccatcgtaatcgaatcgggatccctgaatcacctcgtgcttgtcggtccacttggacagcttggcaatggcgtccggcagcacggccacatcgtcatccatcacccagaaccatgcggcgcccagatcatacgccttggccacgccggcggagaaaccgcccgcaccacccaggttctcggtctgcggcgcatagaccacgcgctcttcgttgccggactggtcggccacggtggtgccccactggccggtcaccttgccggcaaacgcagcgaccatgtccgccgtctgatcggactgctcattgtccacgatgacaatgcgccacggtgcctgctcaagcgccagaatcgaatcgaacagtacctcgagcagctgctgacgtttgtaggtggtgacgatcagggcaagcttgtcgatggtgttgttgggtttcttcacttcagccatggctcccattgttgcacttgaccggcacaagacgaatttctgcacagtgaaacgcgggttgcgtacgtccggcgcatggcgtatgaataagcctgtcagtttcagggaaggtgcaattccttactggcggtaacctgtaccccgggtttcataacggggatggcgggaagcccgcgacccgcgcaagcggctgatccggtgagattccggagccaacggtatagtccggatggaagaaacgagggctcattatgagcgtatcttcgcgtatccgcatgcaagttgttcgttctgtggcgcccgaggccgagggttcggccagcgcgtccaccgccagcaccagcgccaaactcggctcgcacaccactggtgtggccgattccggccgctggtccacgcgccgtatcgccatgtatgcactgttcgtggcgctggcgatggtcaccagcttcattgaattcccgattacgccggtcacttggctgaagtacgacccgtccggcatcgtctgcctgatcgccggctttgcgtacggtccggccgccgccgcaatcgtgtctgtgctcggctttgtgccgcacatgttcgccgacccgtggggttcgctgatggctgtgctggtggcgctgttcctgtctgtgccggccgcgttcatctaccgtaagatccgtacgcgcaagggtgccgccatcggcattctggtgggtgcggtgctggccatcgtggtggcgctggtgggcaacctcatcgtcacgccgatttacgcgcacatgacctaccaggctgtggccgcgatgattctgccgattctgctgccgttcaacgtggctaagatggcgattcacgccgtgatcaccttcctgatctacaagccggtctccaacctgctgtccaagcagcagtgaccggcctgagacgggccgctgcccgccacgactaacgaccactcaacgaccactcaaagaacaagaacgcagaactccggcccttgccgggattctgcgttttcgcctatcagttacggattgctgtttcatgaccgttgcaccccattccttcgacgccgacgagttccacgattccgccgagcccgctccccccgccgccgtactcaaggacattcgtttcagctatgaccgcggcacttcatgggctttggatggcgtttcgctcacggtccatgccggcgagcgcctatgcttggtcggtccgaatggatcgggcaagtccacgttggcccgtctaattgcgggattgaccgcgccggacggtggcgaagtgacgctactggaacagcgcgtgtacgcagccggcccgaatgccgacgcctatcgcgctgcccgccgcagcatcggtatggtgtttcagaatcccgaggatcagctggtcaccaccgtgttggaggatgacgtggcttttggcccggagaatctcggtctggagcgcgggctcatcggcgagcgcatcgttgattcattgcaggccgtggggttggcgaacttgcgtcagtccgacccgacccgtatgagcggcggacagcagcagcgcgccgccatcgccggcatgctggccatgaacccggcgatgctggtattggacgaaccgaccgccatgctggacgaatccgcacgcgccgaagttatgcgcattttggatgatttgcaggcgcgcggcaccactattgtgcatgtcacgcatcatccggatgagaccgttcatgccgatcgcatcgtgcacatggaggccgggcgaatcgttggtgtcactgcagccgccgataatcgacccccgctagcggaggctgtctcgcaaagcgagaccgagggtggtatcggcacagaagccgcccccagtcgtcctacgaacgacagaccccgccagcggaagcgcgaagacggctccgaactgccgctgctctccgacggcatcggtgatatgacgaaccccatcattcgcgtctcgcatctgacctatcgctatccttcggccaaacgggcggttatcgatgacctgtcgttcaccatcgcgcgcggtgaaaccgtggcactgatgggcgtgaacggttcgggcaagtcgacgctggtgcgcatgctgtgcgcgctggccgcgccgaccgccggcagcatcgaggtggccggcgttccggtggcctcgaccggcaaacgcggtagcaacgcacggccgaagccggcgaatcgcaggcaattggcgcaattgcgccggcatgtgggttacgtgatgcagcatccggagcaccagttgttcgcggacacggtggccgaggacgtggcgtacggcccgcgcaaccaggggctcgccgaggccgaggtggccgaccgtgtgcgcgaatcactggacctgctgcatatcgggcatcttgccgaccgctcccctttcgacctgtccggcggacagcagcgattggtggccatcgccggcgtgctggcctgcaatcctgacgtgctcatcatggacgagccgaccgcgagcctggacgtccaggccaaggagcgcatccatgagctgttgcgcacgctcaaatcgcgcggcgtgaccgtgctcatcatcacccatgaccgagcggaggccaagcatatcgccgatcgcgtggtacgtatgccgattgccggcgcggctggtgctgagagcatctcggcagccgagactgccttccccgccgagtccgtctcccctgacaaacccgcgcactcggtgatccaccgacttgacccgcgcgtgaagatggtgggcttcctggccgccatgttcacgatgttcgcggtgaacacacccctccagcttgcgctgggcatcgccatcaccctggccgttatcgcggcggcacgcctgaacccgttacgggtgctcgaatccattcatccgattctgattctgctggtgctgatgggcgtggtcaatctgtttgtggtgcgcaccggcacgccggtggtggcgctgggcccgctgagcatcaccgatcagggcgtggccatagccgtgctgtacgcctgccgtttcgcgttggtgatcatcttgggcgcggtgttcctcaccaccaccacgccgaccgccatgaccgacgccttcgccaccctgatcagcccgctcaaccggctcggcatccacgcccaggagatcgcgttggtcatgagtctggcattgcgattcattccaacgctgaccgacgagacccgtgccatcgtcgacgcccaatccgcgcgtggcggttccatcgaaaccggttcgctggcccagcgtatcaaggcgatgagcgcgattatcgtgccgattttcgccggcacgttgcgtcacgcggacaacctgagcctcgcacttgacgcccgctgctacgaggagagcatccgccgcacccactggcgtgccctgaccatcgccgcgcaagatctcgtgttcgccgtcgccgtcatcgcctacatcgccgccatcatcgcgctgtagggcggcaaacagcacagacagcaccggttgctatgctggtgtggttatacgaaagatgtaaggaaattcccatggcattgaccaagaagcaaatcaagcagctgcgcgcgatggcaaactcgctgaagcccctgttctatgtgggcaagaacgatttgaccgagtcggccgtcaatcaggccgatgaaaccattgagaagcacgagctcatcaagtgcgcggtacaggacggttcgggcctgaccgccaaggaagccgccgccgagcttgccgagcagctgaacgccgaagtggtgcagtccatcggcaatcgtttcgtgctgttccgtcgctcccggcgcgacgatgtggagcatatccgcttggtgcgcgagtagcgttcgctctgctcgatcccgtagcttgatatgagtaatggcggttggaatcagtccgattccaaccgccattattcatattcgcccagcgagcaccgtcactgatccaagatggacccgacgattcccgcaacaatggtcagaaccaaggaccccagtaccgaccaccagaaaccgtgtacgaagacgcccacgccgaacagactgaccgccagccagctggcgagtcgcatgaacagccaattgataatcaaggtgaccagcccgagagacagaatcgcaaacggcagtgcgatcagatgcacaatcggcttgattgacgcattaatcagcgccatgaacaaagcgaacgcggcgatgccgagaatcggaggctcccccaccggggtcatgccgggagtcaccgcgaccatgacggcggcggcgatagtcataatcaaccagctggtcaggaaacttttcatggcccaatcgtagcgcggcaggttttactattaggcaaaacatgagatgatgttgtgcagaaacggtaagaaggtactgccgttcccgattgagaagggatagacccacatgactgataatcaacaacaaccgtacggttcggacagtgttccgcagccggcacagccggcacaacctgcacagccgtcgtacggccaagatgccgcacggcagccgcagggctatggcgccccacagcccgccgcatacgctcaacccgccgccggaagctacggccagcagcagccgcaatacggccagcccgccggcgcatacgctcagtctcagtacgctcagccgcagtatggccagccgcagtatggccagcccgcacagcccgcagcgggctacggccagcagcccggctatggacaggcctaccagcagccgaatgcctacgcacagccgcaatacaccgccgctccgtatgccgccgccccggtgtggcaatcatccaagtccaagttggctgccggcctgttgggcatcttcctcggcggacttggtgtgcacaacttctatctcggcaacaccggcaaggccgtggcccagctgctgctgacgcttgtcggctggattctgctcggacttggcccaatcgcagccgccatctggggctttgttgaaggcatcatcattctgtgcagcaagcccggctcgccgtggcataaagacgccaacggctacgaactatcagactgagactgacctcgggccacgttcattgggcctctgatcaaccacgcctctgcaggtatcatctcgatgccgcagtcgtagcgggatgcgacacgccggccgtgtacatgagttcatgtacacccgatacaggcgaatcagtatcgcacgagattcaacagttcctgctgtttggcatagcgggaaacgttggtcagggcgatgcggatgatgtgttcggaagtcttttccaaatgattgccgccggccacatgcggggtgatcaggcaatgcggctcatcccacaacggactttccgccggcaacggctcaggctcagtgacgtccaatccggcaccgtggagccgtccattgtgcaaggcgtcggccaaggcctcgggatcgatggcgtcgccacgcccggcattgatcacgatggctgtggatttcagacgccccagacgatccgcattcagcagatgatgggtctgcggcgagcgcggcaccgccatcgccaccacatccgccaatggcagcagtgcttccagccgctcgaagccatacatcttttcaatgcccttggccggcacgtccgcatgacggcgcacgccgaaggtacgcatacctacggattgggcaagctgagcgaaatgcgacccgatgtcgccgacgccgataatcagtgcgatgccaccttccgggctcaataccgggccttcatcctgccactgatgatcacgctgattggaggcataccggttgaggttcttcatcaatgcccacatggtggcgaacatgtgttccgacacgctttggccatacgcgccgctcgcattggtgaccatggtgccgcgaggcagcacacccgggcggatgtacgcatccacaccggcgctgaaggtctgcaaccattcaagacgggtgtattgagcggcctgcgagaccgggaagttgccgatgactgcggtagcttgggagcgaagctcctcgggagcagcggccgaccagaccatgtcgccgcggtgcgcttcgtcgcccacgaattcctgcggcacatcgcgggccgccttggcgaaagcgcgccgttctccttcgttgagtggcaggcagttgacaatcagcttatgcgtgttctcaatacccatggttcaccaaactaggcggcagggcggatattatcgcgtgtttcctcatgctgaaccaatgccgaacccgccccgccggaccaatgccgaacccgccccatcaaaccccaccaaaccaagggacagcccattgcgcatcgaccgtagcgtccgccccgaaccgtacactcacaggtggttttgtgattccatagcgtgcagccaaggcagtacgattgccggtttatccgcacgcacaggtacctacgccggttggtaaaccttacattccatacattgcaaccgaacgtttaggagcatgtatgcctgagcagcatattgataacgagaagattcccacacgtcttatcggcgcgattgtggctgtcggctcacttgccttcattggcattctgaccgaaaccgtgatgaccgtgcttttccccgcactgatgcgcgaattccatgtcgacacggccactgtgcaatggattaccacgatttatctgttggcggtggccgccaccatgcccatcagctcgtttttgaagcgccgattcgcactgaaaaccatttttcttgcggctgtgattctggccatcgttggctcgctgatcatgatcgtcgccccagccttcccgctgctgattgtcgcccgcattattcagggcattggctcaggcgtggccacgccgttgatgatcaacatcattctggagcagtctcctcgttcgaagatcggccgattgatgggcgtaggatcgctggtcattaccgtggctccggccatcggcccgaccgtcggcggcgcggtgaccacagtgctgccgtggcgcgcgattttcgtcatcgccattccgctggtgctaatcgcagcatgcatcggcatgaagtgcattgagcagaagacaccgaccgaggctgcctatcttgacccgattcagcttgggtccattgttgtcgcgttggtcggtctggtgctggcgctcaaccaaggtggcgtggccatcagtgcggcggtgtccggcaagtcagccacacgctccggcattatcgccattgtcagtctgattgtgggcctcgccttgttgatcgtgttcgccatgagttccaagcgtgccttctccccgctgctgcgccttggcattctcaaggatcccgccgtactgttacacgcctgcgcatatctgctgctgccattggtcgccatcggctacggctatgtcatcaccaatgtggcacagctctcgctcggcaccacggcatttgtggccggctctctggtgctgcccggagcactggtcggcgctgtctgtgccccgcttggcggctggttctacgataagttcggcgcggtcaagccgattctgattccgatcggcatcgctattttgggcccagtgcttatgctggtgttctcgatgcagcttacgcccgtgctgctcgccggattctatttcattttcggtctgttctattccatcggcaatgcgaatgtgatgaccagtggcctgtcggaggtctctcccgagttcaagccggacggcaacgccattttcaacacgtgtcttcagtttggcggcgctgccggtaccgcactgttctccacgattctttccgtggctcaggccggcgcaggagaagaaggcaccgctgagtttgctcacgccactgccgtcggcggcacatggacgtttgccacgatgacggttatctgcctgattggctggtgctgtctggccaccgcgttccgcattcgcgcggcacgtaagcgtgcataaatccgatcatcaatagagtcccagctttccaaacacgtgtggggcgtgccccgggagaaccccggggcacgccccacacgctaatgaaaggaagaaaaggagaaagaaagctttggcgggcagtgccggctgctgtgaccttgccatcacagcagccgggctgatcccgcctattcagttatggtgtgtgtcgtattcggtgcggagaccgagcgggcaagcccgctattttttatctccgccgaccgccatcaccgcgcgctgaagcacaacgaagacgaggatcatgagaccgataacgatggtggtccattcggccggcacaccgaagtcagaggtgagcggatcgaggatggagcggaccagagagccgagcacggagccgagcacgtagccgaagccaccggtgatgatcgtaccgccgatgaccacggaggcaacggcgtcgagctcccagccaatacccacagtgttcttggcagagccgatgtttgcggtgtacacgatcgaggccagggcggcgagagtcgcagaggtcaagtagatgatgtactgcgtgcgcttgaccggcagacccataagttccgcggaggaacgggagccgccgatggcgtagatggtgcgtccggtgcgggtatggtgcaggaagacgtagccgaagaccacaaccaccagtgcgatgatcacgccgacgttgaaggacagatcgttggagatcttcggattgtcgatgatcttgatctcgttggagatgaacgagaagtcattgccctgcgggaaggtcagcgagtcggtggagatgatggaggcaagaccacgggccaggaacatcgtcgacagggtcgcgatgaacggctgcatgttgaattcctcgatcaaggtgccggccagcagaccgaacacagcgccgatgagcagcatgatgatcatgaccaggaaggcgggcacgccggcgttcgccagcttcaggccgacgactgcggtgatggccacgatagcaccgacagacaaatcgataccaccggtcagaatcggcagggtcatggccacagccagaataatcaggtaggcgtggtcaatgaacagggaggagatgaagcccagtcgaatgtaggtgccgaacaacgcctgacccatgatgatcatcaggatgaagatcaccacggccgcgagggtcgggatcatctgacgatcgagcttgaagcccttcttgggagccttcactttgtttgccgtagctgttgtcatgctgccaccgccttagcttgagccttgagcgcgcgcttgcgtttcatattcgcgctcaggttgtgaatcttcggagcctgcatcacgcagatcacaatcacaacgacggcgaagaaggccggagttgcctcggcgttgacgcccagggtgatgatggtcttgcggatcatggcgataattacagcaccgacagcagagccggcgagggagaacttaccacccagcagtgaagtaccgccgatgacgactgccagaatggcgtacatttcgaggtcctgaccggtcttaaccacgtcgacacgcatcacggatgcggtggcgaacagaccagcgatggccgcgaggaagccggaaatcgcgtagacgaggaagaggatcttcttcggcttgataccggtcatacgggaggcttcctggttgatgcccacggcctcaatcatcatgcccatagcggtcttgcggcacagcaggccaacgagaatcacaatgataacggcgatgacgaagttggcgggaatgcccagaatgaagccgttggcgaaccacttcagcggttcgttgccagcaactgcggaggcgtcggtgttctcaccggaggtgatgaccttggccataccacggccggcgagcatcataatcagggtggtgatgaacggctgtaggcccaggaaggaaaccagagcgccgttgacgcagccaatggccagaccaacagccaaggcgatgaggatggagagccacacgttcatgccattggacagggtctgcatggcggcggcacctgccactgccataacggaaccgaccgaaaggtcgataccggcggtggagataaccaaggtcataccggttgcaatcatcaggtatcgggcagattcctggagcatggtgatcagcgggccggccagaccaccggtgttgctgttccagctcagagccaggaagtcatgctggaagatggtgcagatgatgaccagaagaatgaatgcgacgatcgaccaggtcaggttgctgctcagcagcttcttgacaaagttgttgccctcggcttttgccttttcagccatctcatgcctcctttccggtgtttacgttggtgttagcgatggtttcgacgatggtcgcctgagagacggtgtcgtcgttttcgatttctgcgatcttgtggcggtccttgagaacctcgatgtcgtcggacagacgcacgacctcttcaagctcggaggagatgaagacaacgcccatgccctgagaagccaggtcaagcacgacctgctgaatttcagccttggcaccgatatcgataccacgggtcggctcgtccagaatcagcagctcggggtgcgtggccagccaacggccaatgagcaccttctgctggttgccgccggagagattcttgaccgggcgatccgggtcggcgggacgaacgttgagttccttcatgtacttgtcaacgatggcgtccgcttccttcttgggaatcggcttgaacataccgcgcgttgcctgcagggcgataaggatgttctggcggacggtcaggtcgccgatgatgccctcatcacgacggttttcggtggagtacgcgattttgttcttcaaagccgtgtacggatcggagatgttgaccttcttgccgttgagcgtgtaggtacccgaatccggcttgtcggcaccatacaggagtcgaccaagctcggtacgaccggagcccagcaggccagcgaagccaacgacctcacccttgtagatgtcaacatcaaccgggttgatggtgcccttcttgccgaggcccttgacatcgacgatcggcttctcgccaggggtgatttcacggcgagccttcttggcaccaatctgggacagctcggcggcggacttaccaatcatcatgccgatgagttcgtcgcgcggggtgtccttggtcatgacctccttgatgaactggccgttacgcagaatggtcagacgatcggtaatctcataaatctgatcgaggaagtgggagacgaagaggatggccacgcccgagtcacgcaccttgcgcatgatcgcgaacaggtccctgacctcgttggcatccagcgaagaggtcggctcatcgagaatcagcaccttggcgttgataaccatagcgcgggcgatggcgaccagctgctgcatagcgatggagatggagctcagcggagtgtgcgggtcaatggattcgaggcccatctgtgccaaatacttcttggcggcctcgtgggtcttcttccagtcgatgccgaaggggccgcgcttttcgtggcccagcatcacgttctcaccgacggaaaggttggtgcacaggttcacttcctgatacacggtggcgataccggcgttttgtgcgtcgagggtgccgttgaactgctgaggcttgccgtccaccataatggagccggcgttgatcttgtacacaccggtcagagccttaatcatggtggacttgcctgcaccgttctcacccatcagggcgtgaacttcacccgggtagagagtcaaatcaacaccatccaaggccttgacgcccgggaattcaatcgtaatgcctttcattacgacgatggggtttttatctgtcatgtctttgccttaaacgagaatgaaatgttatcgttttgtgatatttgagccacacatgagtgatggtgtggaaggaacatccttctcacaccatcacatcaattatttggtccagttatcaatgagtcgcagcagacttatcagtaggcgcgggtgttgttgtccagggcttccttggcggaggcggcgtcgaaggtcttggactcgatctcgatgtccttctcaacggtcttgccatccagatagtccttgacggcctgagcggtttccttaccgaagatcgggttgtactcgatcacgtaggagaggtcgccatcaacaagagcctgcagagcgttcttggtaccgtcgatggtgatgatcttgaccttgcccttgaggccggcggcgtcaacagcctgagcggcaccgaggcccatctcgtcgttctgagcgaagatgaactgcgggttgtcggacttgtacttgtcgagcagaccagcggtcacggtcttggcctcatcagtggaccagttagcggactgggactcaagaaccttgacgttggaggcaaccttgttgtcccaaccagtgccacgatccttcaccacggacaggccggcagggccttcgaggatgaagccgttggcgccatccgggaagttcttgttcacgaactcggcagcctgctcgccgcaccagacgttggacggtccgatgtgagcaacgatggccttcttggcctcggcgtccttgacgtccacgttacggtcaacggtgaagaccggaatctcagcctcagcggccttcttcagggagtcatcccaaccggaatcctcggtggaggacaggatgatggcgtcgacttcgtcgttaacgaacttgttgaacgcctgaatctgcttctgctgatcgttgttctgggtcggagagtaggtcaggtcaaagccggcatcctcgaatgcctgctgaatgtccttctcgttggcggtacggaagccgccctcagggcccacagcaacgaagccaaccgtcttcttgccggagtccgagctgccacctgcgttgctggaaccgcatgcggcaacgctgacaagcgcagcagcagaagcaacgagggcaatggccttcttccaattcttcataaatactcctcctcgagcagtgtttattttttggatgatcttccatcctgtttggtgactgttcgtcatcgacaatctctagtgtgacgctcacaggccaaatgttcaatcgcatgcgataacagtttgataacaggtttataacagtttgataactgtagttcaaaaaacggcttcacagcgccgttttgccttgttattaagccataataagaggtggttgcacggcggcaatgccgctcgtcagccgagcgacaaagccgccgcatcacaacacaagaaaagttattatgaacaccgtttttcttataccatctactgcgcaccgagggcagtgacctggctatcggcgatggtccaggaaccgtcgagtgagccggaaacggagcgcacaatacccaaatcgtccacaatggccaggcgacgggacaggctgatctgccccgatgccatcgacgttatgattccattgggtaaacgctgcgcattggccgggcctggtgccatttgacgccatgcctcttgttgttcgctgtttccctcaggaggtgtggtggcgtacaccagattcagatcattgaagaacgtgagcatggtgacgtgcctgagcacactcacttgggtggccgctttgctcagaccgctcagtgttttatcaccgttgcgcgccacaccggtcatcatcacgccgttcgtgtcctcgcccccgactgccaacgccaatcggcacccttccggagaaaccgccaatgccacaatgctgtcggcagcaccaagccaatcaagcttcagatcggtttccttgcccccatctgacacatgcaattcgcgcccgttctcggatacagcccatacttcgccatccagaccttcggtaatcgatcgcatcggctcgccggagaacatcaccccacaggacgcaccatcagatttcaggcattcgaccacgccgtccgcacgcaacaccgcgccgccggatgaggaaaaaacgaagccccgagcatcgtcatatccgggggcctcccctacacgcaacggactggagctggccagggaaacgatatgaccaccggtcaacgtgtatacgcccgctgtcggctgctcggtagtaagtttcacatttgcgtcggcatcggaatagtccactccatcgccggtaatcctcagcgcgtattcggcattgccgtcgcccatagtcagacggatgcgatgtaccagcagccctcgttcttcctcgttcaacgcattgataccgctgttgaggtgtatctccaccacattgttcttcaccggcacgctgtcgaccgcgagtttgatggtagacaagccggcgcctcgcagcactccttccaaccaggagggtgcatccgagagcacttcaccgactgcctgggtgcgccagttgcgccagctcaaccaacgaatatccgggataagttgcttgccggaagtactcacctgatacacggatacttggcggaacacctgttcaaaatctgcggtggaaatcaccacgccgctttccaatgacgagatgcgccattggccgcttttcttcatcagcgtatagggaagcctgcgcgtttgggtgctgtttgacggcgtgtatacgccatgcgaatccaaggaacccaccacctgaagttccacttccacaatcagtgagctttccgcaccttgtggcgcgcttatggtgttggcgcgtcggcggaaatcaggggtgccgctgtataccagtgccgcagaatctccattccacccggcagaagccgagccagtcaggaattcgcgagccacgcgatagccatcggactgcacgccagcaggcatagcgtcatagaaccctttgacaatggtttccggctgtgcatcgtccgcaggcccctgaggattggtgtaaacacgctgggtctgctgttccaccggtgccagagtctgcaccgagccgctaatcggcaaaccgaacggacttgagcatgccgtcatcgtgatgcaacaggctatggccgcgcctgcggcggcaatcgttctggtcactcgtctcatagtggcctccccatcatcgtgtcgcggcgaacctcatgataatcatgtgtgacttggctggtggccacaccaaacccaccggtaacacgcaggtcatccggcgtttcagaagcaaaattcaccggcagttcagcgtccgccacctcaccttggtcggggtcacgcggcagcaataccaagaaccaggtgccctcccccactgccgaacgtacacggatactaccgtggtgcagcaaggcatcagtcatggcgatggccaggcccaatccggtgccgccggtaacgcgtgaacgtgaaaggtcgcctctccagaatcgatcgaatacatgagcgactttgtcttcgtcgataccaacgccatagtcgcgaacgctgatggccacggctttgcggttggccgcgacgcgcacttcgatcggccggtcctcagcgaaatcgacggcattggccaacagatttctgacgatgcgaatcactcgacgcgaatcgatacgagtcaaaacctgcacattgggcagatacgtgtgaatcggcacccgtttggcttgggcgatgccgtcaacttggtccactgccgtttcaattggttcgcataaatcggtttccacaaggtcgagtgccgcataaccggcatcgtagcgggagatttccaacagatcggcgagcatgtcttggaatcgactgatctggccggccaacagttcgaccgtacgcttggtggaggggtcgaagccgtcttttttcatttcgagcaggtcggaagccatacgcatggtggtcaccggggtacgcaattcatgactgacgtcggacacaaatcgtttctggaaaacgcttgcttcctccagctcatcgatcttctggttgagcgcatcagccatcgtattgaaggattgctgcagcacaccaagctcatccttacgatccacggtaacgcgcatatcgagattgccagaggccagtgtttccgaggccgctgccactcgtccaatcgggcgcacgatgccacgaatcaccagccagattactacgcccaccacgatggacagcaacgcacagatgaccaccagactgagctgaatctgcgtcaaggactgctgctggaacgtgtacgaataaatggcgaagaattcgaggttgccggccacgccaaagtccaatacggtgccgagcaccgctgcgggcgtcccgctgcccggcatgccggaatcaccgggaatttcgaccggctgatagaacacgctgtcatccaagtcggaagccacggacgaacggatgtcgtcagaaatcagactttgatagctgggttcggtggatacggggatgatggcacgcgagttggtatcacgactccacaaatacacacctatcaggttggaggacccctcggattgcaacgaggacgccaagtcattgaccagctgttggatctgcactacggcggagacatcggccgcgtccagactggtttgggcctgctgcaccatgtttgaatagtcggcacgcgactgcgaagtgatttgggtaagcagcgaggcgcgcactgataccatcgatacgccagagaagacgatggccacggccagcgtaagaatcacggtgagggccacggtgcgggcctgcagtgagcgacgaacttcagcgcgtccgtggcgcagcaagcgtttgaggctgaatcgagggcgcaggttcattgttcaggagtgacgaacttgtagccgataccgcgtacggtctgcacgatttgcgggttctcggggtcgtcctccactttggccctaaggcgttgaacatgcacattgaccaggcgcgtatcgccggaattctcgtatccccagacattcttgagcaggctggaacgactgatggcctcgccggcggcggccgcaagcatgaacagcagctcgaattccatcggagtgagattcaggtccttgccatccttggtggcggtgtgttccaaacggtcgatgacgatgggtccgcgttccagatggttgacgtttgcattgccaccgcttgcgccaccggtggcaccgtcttcggcggccggcttggcgatgcggaagcgtgcacggatacgcgccagcagttcggctactttgaagggcttgggcacgtagtcgtcggcaccggcttccaagccggccacgacgtcaagtgtgtctgatttggcggtgagcatgataatcggcacattagaggtagctctgatgcggcgggccacctccgtgccgtccagcccggggagcataacgtcaagcagaatcaaatcgggcttgacgatggggaacatttccacagccctcagcccgtccaggcaggtcacagtctggaatccctcgttttccaaaacaagactaagcatttcgccgatggcctgatcatcgtccacgatgaagatggtcgccatggtgtttgcctcccctttttccactgttattgttgcgttacactttactcccctatgttcatttctgttcgggttccccaccatgcagtatcgggcgaatcttggcaagacgctggctgacttcgtgttcatagccgcgatcgttgggatggtagtactcggtgccacgcagctcttcgggcatatattcctgtggcgccacggcaccgggccaatcgtgcgcatacttgtagccctcgtggttgccccactctttcataagcttggtgggggcgttcctcaaatacagcggaacagcgccgatcttgccggtatccacgtccgcgagcgcctggttaatggcgttatagctggcatttgatttgggcgcggtggccacggcaatcgtggcttcggccaaaataatacgtgcctcgggcatgccgaccagcgccacggcctgcgccgcggccacggtgacctgcaaaatctgcggggcggccatgccgacttcctcgctggcggcaatcatgatgcgacgggcgatgaagcgcggatcttcacccgctttcagcatgcgcgccagataatggatggcggcatccggatcggagccccgcatggatttgatgaatgcggaaatcacgtcgtaatggtcatcgccgtctttgtcgtagcgcacggtggcggtgtccattaccgtagccacgatttcggaggtgatgatgggtcggcgtgcgccctttttgcgggcttcgtcgccggtgaccgcgccagccgcggcctccagaatcgtgagactcttgcgtgcgtcgccaccggccatgcgcacgatatcggcgatggcttcgtccgtggctttgacctcgtccctgagaccgcggtcatcagtcagcgcgcgctgcaccagttcggtgagctgatcaggctccaatgactcaagcttgacgaccaccgaacgggagagcaacggtttgatgatggaaaagctcgggttctcggtggtggcgccgataaaggtcacgtcgcggttttcgacggcgggaagcagcgcatcctgctgggatttggagaagcgatgcacctcgtcgatgaacagtacggtttcccggccgcgtgacacgagccgttcgtgagcgcgggtgagtacgtcgcgcacgtctttgacgccggaggtcacggcggagagttcctcaaacacgcggccggattggccggccacgatggtggcgagcgtggtcttgccgacgcctggagggccgaacaggattacggagctcggcgcggtgagactgcctttgctggccggattggcgaggcggcgcagcggcgagccctggcccaacacctgcgtttggccaatcacctcgtccaaagtgcgtggacgcatgcgcaccgccaacggccgtgtcatcgactccggcgcatcagccgccccaaacaaatcgttctcactcataacgtcctatagtaccccagtgttcgaacagacgttcgagctgcaccttggcttccctcagagaggggagccaggaatcagttactcaccttgtagtcgtggaagactacttcgccggtgtcttgggtggcgtcaaggtccacgatgccttcgatggcccagtcgtggtcgccatcggaatcatcgataatctgacgcaccttccacgtatgctcgtcgttctcgtgcttgtcatccaacatgaacagttcgggcgagcgcgcttcggcgccgatgcccacgtactcgtgctcgtcgtagtagtcgtcgagcacatcttcccattcgtgcacgccgtagccccagtccttgtcgagcgcgccgagcttgtccggctggtcaaggtccataagccgcacacggcggaacaaggcattgcgcaccagcacggtaagaccacgacggtcctcgaccaccgcgttcttcttgcccggcgccgccaaggaggccgccgcctcggactggtcggcggaatcgccggcgttctcccattcatccaccagcgaggagtcgatggagcgcacgagcacgcgcagccaggagatgatgtcttcgagttgctcgtcacgtttttcgggcggcacggtacgcgccagcgtgcggtaggcgtccgagaggtagcgcaacagggtgccttcggagcgggcgatgttgtatcgggtgatgtatccggtgaagtcggaggcggtttccaccatgtcgcgcaccacggatttcggcgacagccagtagtcgttggcccacggcacatcgtggcggtactgatcgaacgctgcttcgagcatgtcttccagtggcttcggatacgtaatctcctgcagcttatccatacgctcgtcatagtcgagtccgtcggccttcatatcggccatcgccttgtctcgggcctgacgctcctgggcacgcagcacctgcttggggtcttcgagcgtggcctcggccatggagatcacgtccagcgcataggtgtcggactcggggtcgagcagttcgagcgcggccagcaggaacggggagagcggctggtcgagggcgaagtcgtccggcatatcaagggtcatgtagtagtccttgccgccgtccttgcggtcctcggtttcgatgacttcggtatcgaacagggtttggaagatctcgtcggcccgctggtgcagatgctccttctggtcgggggtctgcgcggaatcgtcgatgagatcgtcgatacgggcacgggcgtcaccgccctgcgccacttcattgagcaccatcgaatgcgtgattttcaggtgcgggaccagggtctccggttcagcgtcgatgagcttatcaaacgtgctctggttccaggtcacaaaaccttccggcgccttcttgcgcttgaccttcttgagtttcttcggatctcccccggccttggcgatggctttctggttttcgatttcatattcgggagcctcggcgatcaccagtccctcggtatcgaatcccatacgtccggctcgtccggcaatctggtggaattcgcgggcgcgcaggcggcgcatcttggtgccgtcgaacttggtcagggccgtgagcaccacggagtgaatcggcacattgatgccgacgcccaatgtatcggtgccgcaaatcaccggcagcagaccctgctgggcgagctgttcgaccaggcggcggtagcgaggcagcatgccggcatgatggatgccgacaccggtgcgcagcagtcgctgcagaatcttgccgaaggctgtggtgaacttgacgcctttgatggcttctgcgatggcttggcgctgttccttgctggatacaccggtggaggcgagcgcttgcgcggtctccaatgcggcgtcctgcgaaaagtggaccacgtaaatcggggtttcgccgttgcggaaggcgagttccacggttttttccatcgggtcgagcgtgtattcgtagctcaacggcaccggtcgcggcgcgtcggcgattacatccacgtccggggtgtcgttcagatcggagagcttgtcggcgatggcgtccacattgccgagtgtggcgctcatcagcaggaactgggtctgcggcagcgtgagcagtggcacctgccacgcccagccgcgctccggatcaccgtaataatggaattcgtccatcgccacgaggcccacatcggcatgggtgccttcgcgcaaagcctgattggcgaggatttcggcggtgcagcagatgatcggcgcgtccgcgttgatgtggctgtcgccggtgatcatgccgacattgtcgcggccgaacacttcgaccaagtcgaagaatttctccgacaccagcgccttgatcggagcggtgtaataggagcggcggccagtgcatagggcagcgaagtgcatgccgagcgccaccagcgatttgcccgaaccggtcggggtattcaaaatcacatggtcgccggccaagaggtccataatggcctcttcctgatgcggccacggctcgatgcccttgacgtcttccacccagccgaagaaccgttcgtagatgtcgtcggccgtaagattccgttcgcgtccgtcgccgtcccattcgggggccagccgccccagggatccgtattccttctcgtcagtcataatgctcagtctacctagtggcctattccgacggcacgagccgccctccgtcgctatgcgacgcctcccgccagcgggcggagccatgcgaagagctgtgccatgcacttggctccgccaatgggaggatcgctcacgccaaccggcggcgcacctcgtcggggtccacctcgggttcgaggggaggccaggtcatgttcatgttcttcaaggtggtgcgcagcagttcggagaccacggctcgcgaataccagcggttatcggccggaacgaggtaccacggtgcggcggccgtgctggttttctcgaacacttcctgccaagcgaacatgtactcatcccatcggtcgcgggcctcgaggtcggagatatcgaatttccagaacttggtgggatcatccagcctcccaagaaagtgttttttctgttcttcctggcttaccacgaggaagatcttgaggatggcgcatccgctggcggccagttcacgttcgaaatcgttgatctggtcgtagcgggcacgccatacgtcttcgggataggtgccatagacgtgcggcatgaccacatcttcataatgggagcggtcgaatacggcaatccaccccggcttgggcaattcacgcttcacacgccagaggaagtcgtggtcgagctcctcggccgtaggcttgccgaagccatggtaatggatgcccatcgggtcgccttggctgaacacgtggcgcacaatgccgcccttgccggaggcatccatgccttgcagcacgatgagcagccgccgtgccgagcctttgacgccattcgcgtacatgagccgctggtatcgggcgatttcggaggagctgatcgaaatgaacttctcggcgtcctctttattgccgtcgaatccgggagtggaatcgccttcgacatcagtgacctgcatgccgtggtggaacataagacgttgagcgggcggcaacgaccatacggcgctgagcagttcactggatttcgccgcacgcgccagtcgttcaggcacgctggcactggagtcgatggtgtctatgcgatccaccgcgagctgtaataccttgtcgatccgtcgatcggttttggattcctttcccttgccgttcttgttgttctttcctgaggattttgcggccgtaccccacttgccggcctcttcaggctcgttggttctgtcgtcgtccttggtcatgctcccgattgtacgtcttgtaactcaggagacctagcaacgtagcgacattcacatttcgcttgttactgcaaatctataggcatgcagtcgttcggaccgtaattgttggctttgcaccaattccaagcctcatctgtcgagtcgaagccctcaccggcaagaatcacatagtatttgtcggaattgctgctgtaggcgggccagtcacccgaccagataagcagtacgtttgaattcttgttgtgcatcgtgatgaattgcgcaagaatatcgcggtagttccaggtcttgccttcagcctccatacccttacgcttgctggacagctgtgcggtatacgtggaatagaacagctctgcggagtccttgtcgtgctcgacctgccaatccaatgccttgcttgcattattttcggcttcgtcatccgtaacgttgctgccgcttatcacgcctggatcagacgatccccagcaatatcttctttccggcagacccaccggaacgcggctgcgcagcgccaccgttgcctggcgccgtcgacaatgtcgaagtaggtgcggtcgccgtgttgaaacttgggggcagcggcatcgaacccgctggcacctgctggggagcagccggtaccagcgttgggccatccatcgactgaggacttgggcttggcgcagactgtgccatcggcgcaccgcattccgtgcagaatcggcttccctccggcatctccgttccacatacctggcacttcatactctctccgttctctctcatccctatcggccaatcccccgtccgtttgcagtacataaagaagcggcaaacggcccgaaacatacctgagctatcaggaagacggcacgatctgctacgagaaagagatcatcaccgaccggcaaatcgtcggcatcatgctgaagcatccgaccagcgcacgcggcttcaagcgctacttgcgcgccgcatcatgacgcttgaccacgatggtgacgccacccgcagcgaacagcgtcgccagaaccacaaccaacgcaaccgaggcaccggtatcggccgtacgttcggtctgctgtggcttggtgctgccattggcattgacgctaccgctatggttgccgttatccttgtcgtccgtcccggtggacactccggtaacggcaacgggcagagcgaccgtggtcttattggtcgcaccggtcactgtcaggcttatatcaccggtcttggttccggcgggaatcatgaccttgagctcggaggtgtcgccattcgcaacctgcgcttcgccgaccacctgctcgccgatggtggcggtcagcttcgtctcgtcaggcacgcccagcgaggtgagcgtaagcttcgagaagtgcagggtgaacgaatcgccagccttgactgcaccggtcgggatgccggtgacggccactgcgcggcggtcgtagcgcggggcaaccggatcgttgtccttgagatagtcaatccaggcgtcgcggtccaccagaccggtgtccttggtgttcgtgccttgggcgaaggcgcggaagttatcgccgccctccaacaggaagctgaacgaaccgatacggtagttgcgtttcagatccaaaggctcaccgttgacggtcaccgaggtgatgtgatggccttgcgcagcatccggatcatacgtgtagctcacgttgtgggacagtccgagttgcagatacgcgcgcgatggcgtgctgccgtccgcgttcgtctgccactgctgttccagcgcttccttgaactgcgcgccggtaagcgtggtggtccacaggttgttcaggaacggcagtacagcgttggcctgggcgtaggtgatattgccgtcggcatcgagcgtgcaggcgtcattggtgccggacttgcagaattcggcacgcagaccgccggggttgaccacaccgatttcggccgcgccgcggtcctcacttttgagcgaatcgagcagcgcatcggccaccagattgcccatggtcgattcggaggcgcggtcgtcacgcttgccgtccttgaatgcggtggtgatatccgcagacaccttgccgaccttctcgccgcccttttcatcggccaccttaagggcctggtacacgatgtccttcaccttggcgacagtcgggttcgcggcggcgagcaggccatcgttgtattcggcgtaatcgttgtagtgcggatcatttttgtcggcgggctgcgaagccacctgcacggccgtgttgccggacttgtcgtaagacaccgcaccggtggccgtgttgtaggtgagcaccacttggccgatgttggcggcatagctaccggtctggatgatcggccggttgttgtgcgcgggatcggtgtacgagtacttcatgtgggtgtgtgcagtgaagatcacgttcactgccgcatcggtatcgtccacgatcttcttgaacacggggctggcggccttctgctcgtcaagtgtgggcttggcggtggcgtcatcttcattggaggctgcaccctcatggtattcggccacaatcacgtcagcctcgccattggattcgtcaccgtcggtgagctgcttggccacacggttcacggcttccaccggatcgccgaattcgatgtccttgacaccaccgggagcaaccaacgtgccggtttcctgagtgaccgcaccgatgatgccgaccttcacgccgttcacctcctgaatgctgtactcgggcagagccggggttgtggtgcccttcttgtacacgttggcaccgaggtaatcccattgggcgttgcgcgcgccctccttgccgatcacacgatcggtaaggtcggcatagccttggtcgaactcgtggttgcccaccgccgaggccttgacgcccaaagcattgagtacatcgatggtcggctggtcctgctgcaccgaagagttgaacagcgaagcaccgatattgtcgccggcggacagcagcagtgatgagtcagggtattcgcccttgagctgctcgatggtggcggcgaacggcacggtgaggttcttgtcgatacggccgtggaagtcgttgaagttcagcaggttgatggtggtgctggcgggaaccggctgattggttgccatatagcccatacgcaatgaatggccattggtcacgccgtcgtctgcccagaacaccggcttgtacaccttgccatttactaccttggtggcttcggcatcgggggtgatggcaaagccttcggtgttctgcgtacggatttcatccggagtgtcggtcagcttggtcagctgcagcacaccgttcttgaactcgtaggtaccgattttggcaccggtgttcgcatcattgtcgctttgggcgagcagctggttgtgctcggcgtcccaagtcagatcgcgcgggccatcatagccggcgttcaccgcggactgcggcaggtcgatgtcggccaccggatgcaccaggtcctcatcattcacggtttgcagtgcgaaggcgtagatatggccggttttctccagtgcggcgaagaacagaccgccgaaactattgccgaaaccatccgggttgtaggtcactacgttcttcgggtcaaggttggactggaatccgttggcggtcaggactgagtcaggaataaaggctatgccttccaccccaagattggcgtccgctccgtggcccagcgtcacgccgaactgcgtgagtgctgcgatgagattccactcgtgcgtagcgttcagatcgtgcgctccgtcgccgttggcgtcggtggttttctcggtcacgtcatactgcaggatggaaggccgcggcacattcttgttttcgttgtcgcgctcggcgccgatgaatatgcccttggatgaatctccgttgatcagcgtgatgccttcggagtccacaccgcccttgccgtccttgaagtgcagctgcttgccgcccttggtctgaccgttgttggtgaaggtccagccatcagtgggatcctgctgccatgtgccgttctggtagacgaacttgttgatggagccagggcccttatcagcggtgttgccgagcgtggggttcagatcgttgtcggccgcccacagcacgccttgcttgccgtctttaccggcttcatacaccagaccagacagattgccgtcagtgtggtcgccgccttgtcctttggcgccaaattcgccttcggcatccactgtggtcacatcggccaatcccgaccatgcgtccacggtcatggtctcgccggcgggcggagtcggagtcgggtcatcgaacacgttctgtgcaccgggcgtgggcgtatcggaaagcgcgaaagtgccatcgtccttacgggaccacgactgactgtcgctcatcttcttcacgccggttgtatcggtattccatgacgtggaatccaccacatcgctatcggtaaagtcgccgctggtagtggtcagataggcttcgtcggcatcggaacccaggccgggctcggccttgtcggggtcgatgtatgccaccagatatccgccggctttgatgacggtgtccgtattcgttacttcgctggtgccgatggtgtagtgcttcttggctttcttgccgctgtcgtagatgccccagcccttcacgtcaacgtctgtggagccggtgttcttgagctcgacccaatcgcaacgcttgctatccgggtctccggcagctttcgtattgccggcatagacctcgttgatgattacggatggtttggcagccgtgttctgttcggcagtggcctgctgctcgtccgcagccgcagcgggcacgccgatcagggcgatgctgctcagtgtcaccgcagcggtgagcagcgcgatggcgcgccgcgacatcgcggtgaaattgttggtgtggaacattactcccgttccttcctcgggttgtgccgccgcagcatgatgctcttcggcggatgacaccccgagagtatgagagagaaatgaagccgacaccgtatgaaggcaaactcggcagatctccaaactgaactttggctgaattaccgctgaagctggttcttggatttgcgtcgaaccgtccgtattccgccgacaatcgcgattacagcggtaccgatggctacgctgatcaacgccggtcgttgcgcggcatggagggtggcgagatccggcccggccgcaatggcgctgttttcacccgccgagccatcagacgccggatgattacccgcgtcggcgtactgggcattgaccacactcgggccggcaagcgccacctggtcggcggtctcgaccttggccacatcgccgtgcttatccaaggtgacgcgggcgcacagggctttggcccagttgatacgctgccagccgtcgctcgattgccatagggggtatccggaatccatggcagtggctttcaaaatcgcgttgcgctgatcggcgtgcagttcgggataggccagtcgcagcacgtccgccgccccgcgcggtgccacgaaatcagcgccggactgggcggtgtcttgcgggaaggtgtaggtcaggcgtgcggtgtagacgcgcacggccgaggcctggtccgcgaccggctcggtggccaccgggtccagaaaatcgttggtgtagccgcccgaaccggaggccttggtgttggcgatgcaggcggcgagggtagtgccgtggccgtccgcggcgcagcgggacaccagatagtcccgcagctgccgggacgcgggcacgatggacgaagcgaattcgttatgccagtactgcccgttctgggcggatgcgccaatgcgcccgcccatgatgtcaagcggataatgcacgccgagcacgatgcggttgttgccggcctccgaagtgcgggccatgatttgcggcgcgagttcgggaatcatgccggccagcgcgataccccacgaataggcgccggtagtgtggccggaggggtaggaactgtttttctgcaagttcgagtagccgggcacgtgttcgagccatgagggtgattgcttgatgtcaagcgtggcgggcagtccggcgagatcgttagtgccgccgtagctgctttccgcacggttcagataggggcgcggatgcatggccgcacgttttgaggcgtaggtggaggccacgttaaaggagaagatatcggcgacggcgttgagtttcccggatttgagcccttcgctcatatatttgccaagcaccggaccgagcgcgtccggcatggcttcctcggcttgcagatcggagtcgacgagcgcacgcttgcgttgggcgttcaggccatccttatcgagattttcggcggctttgtggttaatggccacggccaaatcttcgtcgagtttcatggtatcggcgtcgagcaccttgccaccgtgttcggcctcggtgggggcctgccaatagttcttttcgtagtcggagagcaatgccacccaatccgggttgggcaactggtcggcctgtgcgattgcgggcgtcgcggctagcgtggccgccaacgccagcggcgcaatggtcgcaatagcaaaaacggaggataggtgccggaacatcttcatatgttccaacctatcctccgtgaaggctacgtagccggaacccagtcaaacactcagtaaattcttcgtgccggcttagcggcgattgagctgactgtcaggcctctggcttgtcctcaggcttttgagactcctggaattcgccggtttccgggtcaacctgtgactcgggctgggtggcgtcatatccctgttcgtagcgggtgcgccgccagttgcgaatcgaggcgttggtgccacggtgatgcacatggtatttgcgcggcgtaccgcccagcggcagctcttcgacctccttggccacagcgatctggttgacattggacgggtcgccggcggcgatcggcgccacgggctcgggttcggcgggtgcggccgtacgctgctgcatgcgcgagggcagccattcggcgagcctcgacaacagccagcaggcgatgaagtaaatcaccgcggccatgaccagcgtctgcaggatgttgaagtacatcgagccgagtcggcgcgattcctgcagcaggtcggtatacatgatgatcgagcctagggcggtgtccttcaacaccacgaccagctgggtgacggcggccggcagcatggcgtagacggcctgcggcacctcgatctccatcagcgactgcgtttcggtcaggcccaaagcgagcgaggcctcacgctggccgcccggcagattgccgacgccggagcgcaccagttcggcgaccaccgaaccgttgtacagcaccaaggccagcaccacggcccaataggacgggctgggcaggcccgcgaacgcgaaccatcgccagaagaagatcatgagcagcagcacgggaaccgcacggcagaactcgacgatcacggcggagacgccacgtaccaacgggttcggcagcagtcggcccacgccgaacaccaagccgaacaccacggcacccaccacggccacgatggtggccttgatggtcatccacagtccgggcaggtagaagtcggtccacgcctctcgttcgacggcgggcttccacagctcccagctgagctggttctcgccgtccggcgggttgtgcaggcgcatgaggataaacacgagcaccaccgcgaacagaatgcccgcgatccagttgacgatgcgaatggtgcgccggcccttgggacctggcgcgtcgaacagcacggaattcgaagtatcggccatatccgtcacctccttacggcgagtttgttggacaggtacgtggtgagcatgccgatggggatgatcaggatcacgtagccgagcgcgaagatcaggaagatttggatgatcacgtcgggacggaattcgatcatctcgctcatcagcgaggatgtttcggtggccacggatgcggcggcggccacggtggagttcttgagcagggcgatcagcgtgttgccgagcggtgccacggagcctcggaaggcctgcggcagaatgatctcggtggcggactgcatgaagcccaagcccagcgctcgtgcggcctcggcctggccaatcggcacggtgttgatgcccgaacgcagagattcgcacacgaacgccgccgtgtacaggctcaggccggtgaccgcgagccagaagaagttcgtggtgaaggtgtcggagaagctgagcttcagctgcgcgtaggcacccagcaccatgaacaccatgatgatggtcagcggcaggttcttgaacagttccacatacgcaccggccacggccctgagcgaggaaatcggcgagatgcgcatcaccacaaggatcacgccgaggatcagggagaacagggcggaccatagggtcagttcgatattgaccagaaacgcgccgagcacgtcatactggctgaagagttccaggaatccgctcatcaggcctcctctccttcgtccggggtgggcgggttgtagcgtacgtcgggcgtgtagttggtgcccttggtgttatcgctgatggcgttctcccacgagccgtcctgaatcatgtccacgatggcgttgttgattttggtggccagctgcgtgtcgcccttcttgatgcccacgccgtagtgttcctgcgtgaacggtttgccgaccaccttgagcttgccgcgcgaggcggaggccaggccggccaggatgatgtcgtcggtggttaccgcgtccacgatgccggagaacagggcagtggcgcattcggcgtaaccgggctgttccataagctggacttcggaggcgaacttctccttgacggtggcggcggaggtcgaaccggtgacggagcataggcgcttgccgttcaggtcttcggggccgttgatggagttgtcgtccttgcgcacgagcagatcctgtccggccacgaagtacgggccggcgaaggagacggccttcttgcgctcgtcggtgatggagtaggtggcgaggatcatgtccacgtcgccgttctgaatcatggcctcacgctgcttggagggagcttccttccagatgatctggtcttcggaatagccgagtttcttggcgatgtacttggccacgtccacgtcgaagcccacgtaggtgccggacttcttgaagcccaggccgggctggtcgaatttgatgccgatgcggatcttgccggtttcgtccgcgccgcaggcggccagcgacattgtgcaggccacggcggcgagcgcggcgatcacgcggcaaaccttccgtttgaacgtattggtgaatgtcattggattgcgtacccgtctttcagtgggttcgtcagtgggtgaggatcttcgagaggaagtccttggcacggtcggtctgcggatgctcgaagaactcgtcgggcgtgttctcttcgagaatctggccgtccgccatgaagacgatgcggtcggcggccttgcgcgcgaagcccatctcgtgggtcacgcagatcatcgtcatgccttcatgcgcgagttcgaccatcacgtcgagcacttcgttgaccatttccgggtcgagtgcggaggtgggctcgtcgaacagcatgaccttggggcgcatggcgagcgcgcgggcgatggccacacgctgctgctggccgccggagagctgggagggcatcttgctggcttgggagtcgacgcccacgcgggcgagcaggtccatggccagttgctcggcttccttcttgtccatgtgacgcaccttgatgagggccaacgtcacgttttcaagaatggttttgttggcgaacaggttgaacgactggaacaccatgccaacttcggccctgaggttcgcgagctccttgccttcctgtggcaggggcttgccgtcgatgcggatgtcgccggaatcgatggtctcgaggcgattgatggtgcggcacatcgtggacttgcctgagccggacgggcccacgaccaccagcacctcacccttggtgacggtcaggttgatgtccttcaggacgtgcaaagcaccgaagtgcttttcgacgtgggtcagttcgactagcggacggttcaggtcctctttgccgggaaccagcggggtcaatttggccttgcttggtgatgttgtgcttgtcgtgcgcgaacgcactgctgtttcattattcgtttcagacatgagtgggaggataacacaccgacgtttccaacgtgttcacagtatgtccacacagttgctcagtcgatgtctcatttccgcatcagacatcgtgaaggcggcattgggcatcggcatacattctcgctgagtcgcgcatcgctcggcgtctgctgtgcgctgattgcctgctgcgtggtggctgagacgttgctgcgatggcagagcgggcacgtgttgtcctatctgctgattccatgtttggccttggtgtcgttggcgttgctgccgtgtatgccgcagtcgggcgcatggctggcggtcactttgtattgtgtggggctggtctcgccgtttcccatgtcgtattcgtataaatgcgctaggcattttgagcgtggctagctgttagcacgcgatgaaggtgttatacggtggacgacactcccgaagcgcggtggataaccgggcgcggcacacgatatgccggtggataaccggttcgcgccgcttaagttatccccatttttcggttttgcccctgtgccaccgtggaatgcgctacgctcggcgcatgaacggatacagcgaagcgccgcacaatggcgaaatcaacaactatctgcgcaaagatcttgacgccaaagccacggccaagaacacggcctgttggaatctgctgggcaaagtgcgcacgaaacgcacgttgtgtttctcgctgtataccgcattggaattatgcggcgtggagttgccgaggcacagcacgttgccgcagaaggatttttatgtgacggtgaggagcaaggggacccgctcttcattggacaatgtcgactatcgcatatggaatgcaaagttcaacagtatcgctttctcaaacggcgtaacctgcatgcatcccatggatgcgtggatacagtttgcccaatatctcaacctcactgaattagtggtgctggctgaagcgctcatcagacgttatggatatgccattgaacaattcactcaacgactaacggcctttcaccgcgttattggccgtgcgcgttgtgaggcggcgctgaagctcgtaaaaccatcggattccgttcaggaaactcgtacacgcttggcgcttatgcttttcggcctgcccataccgcaaacacaatacggcattaccgattcagagaacggatacacctacaccgttgacatggcttatccacaatacaaagtcgctattgaatatgatggcgatcatcaccgtcgcttccgcaaacaatatgtgcgggaccagcaaaaacgtcgacgtctgcggcaattgggctggaccgtcatcgaggtgttcgccgatgacctgtggaacaccgccaaacaacgtgccttcgcacaagaggttgccaccgcgatgcaaataccgcttcctggccgtcctcaaccttcatgccgggtattaatagacggcagccttaccatcaatgcgcgcaaaggggaatacaggaggcggaaacaagcaaaacacaacaaagcatcacaacattaatcaaatacggagttgcgatcgctcctcatggggcggcaattcccccatgaggcggcaatttgcccatggggcggtttgaagaaattgtaaaaccgcggaattaagccattttgacctaccgccccatggggttttcaccgccccatgggttgtttaccgccccatgaggaagttaccgccccatggggggataatcggcaaacgccaaggggggacaccgcatggtgcgaggtttgccgcatggcggaggtgccatcgggcggagtatttggcaccccttggcaggtatttggcacattgggccccacccgcaaaaagcaaatggcccttggaattattccaagggccatttgcggctaatagcaccggagcattactcctcgaaaattaatctacgcatgcggagaccgctgttcgaagccgaaggcgcactaaggtgcgtcgagtgctgaggaaaggcggtatacgctccgtagattagttttcgtcggcgtccgggtcgtagtcgacgccggtctcggcgcgctgctcgtcggaaatcggggccggagcaccggtcagcgggtcgcggccgccgccggccttcgggaaggcgatgacgtcgcggatggagtcggcaccggccaggatggacacggtgcggtcccaaccgagggccaaacccgcgtgaggcggagcgccgtacttgaatgcctcaagcaggaagccgaacttctcgtcggcctcttccttggtgatgcccagcacatcgagcacacgggcttggatgtcgtcgcggtggatacgtacggaaccgccgcccatctcctcaccgttgcagacaatgtcgtaggaatcggacatggcgtgctcgggatccttgtcgaacttgtcgatccaatccttggagggcatggtgaacgggtggtgcatggaggtccacttggagtggccgacagccacatcgtcatcatccggatcgtcggtgggcttgaacagcgggaagtccacgacccaagtgaaagcgaacttcttcggatccagcaggccttcgcgggaggcgagctccacacgcacggcacccagcagcagctgggcggactcgcgagaaccggcggcgaagaagacggcgtcgccttcctcggcaccgacggcctcgcgcaggccgttgcgctcctcatcggacagattcttggcgacggggcccttgagttcgccgttttcgccgaagaccacgtaggcaaggcccttggctccacgctgacgagcccaatcctgccaagcgtcgaactgacgacgcggcgtggcggcaccgcccttgaagaccacggcacccacgtacggggcctggaacacgcggaacggcgtgttcttgaagtactcggtcagttccaccagcgggttgccgaagcgcaggtccggcttgtcggagccgtacttgtccatcgcatccttccaggtgatgcgcggtagcggcagctggacctcatagccggcggacttccagatggcggcgatgaccttctcagtcatggccatcacatcttcctggtccacgtaggccatctccatatcgagctgagtgaactcgggctgacggtcggcgcggaagtcctcatcacggtagcagcgggcgagctggtagtaacgctcgacaccggagaccatgagcagctgcttgaggagctgcggggactgcggcagggcgtaccaggaaccgggcaccagacgggccggcaccacgaagtcgcgggcgccttccggggtggacttaatgaaggtcggggtctcgacctcggtgaagtccatgtcttccagcgcgtggcgggcggccttagccatgtcggaacgcagcttcagattgtgctgcatggacggacggcgtaggtcgaggtaacggtacttcagacgcacgtcctcgcccggcagcttgttctcggactcattctcgagagcggtggaaacctggaacggcagggcgtcggacttggcgaggatctcaatggtctcggccacaacctcgatcttgccggtggccagatgggtgttctcgttgccatccgggcgcaggcgcacttcgccggtaatctgaatcacgaattcgctgcgcagcgggcgggccatatcctcgtcgtaaatgacgacctgcacgaggccggtcgaatcacgaaggtcgatgaaggccacgccaccgtgatcacggcgtcggtcaacccaaccggcaagggtgaccttctggccgaccagggcctcggtcacttcagtggcatgatgtgttctgtaagccgtctggctcattatcttgtttctcctcgatttttcgcgcgaatacgtcagatttcgacggtttgctgggcaaccacagtatccggctcccacgacgtgcaatcggcggcaacctgctcgcccgtgacgatgttcttgacctcgtcgccagcgggctctgcaccttccgcaccttcggcagcggtggccgggaaccacacgtacggaatgccgagtttgtccgcgtacttgatctgcttgccgagcttggccgcggtgggtgccacgtcggtggcgatgccgcgcgcacgcagttggttcgcaatacggttggcggccgggcgatcctcttcattccacacagcgaccagcacggcggccgggctgacgcggttggcgtgcgcgccggcagcgtgcagcatgtagctgaccagtcggctcaggccgatggacaggcccacgcccgggtacttgcggttgccctgggaggcgagattgtcgtaacggccaccggaacagatggaaccgagtgatgcggcaccgtcgaggaaggtctcgtagacggaaccggtgtagtagtcgagaccgcgggcgatcttcaggtcggcgatgacggaaccggggcggatggcggcggcctcgtcgacgatcatggccagggtatcaagtccctgacgagccagcgtgtatgcctcggaatccttggcgatgccgtgagactcgcacagcgcatcgaacttggcggcaagctcggcaccgtcggaggcggtgagctcggccaattcgaggcaggcgcgtgcctgtgcttcggtggcgccgcaggtctcggtgagcagtcgggccacctcatcggcaccgattttgtcgagcttgtcgatctcgcgcagcacgccttcgacgtccgtcaggccaaggccgcggtagaagccttcagacagcttgcggttattggcgtgcacggtggccttggggaggccatacgcgcgcagctcttccagcgcggagaccatgaccagcggcagttccacttcatagtggtcgggcaggtcgccggcgccgatcacgtcgatatcggcctgcacgaactcgcggaagcggccttcctgcggacgctcgccacgccacaccttctgaatctgccagcgcttgaacgggaacgccaacgcacccgagtgctcgaccacataccggctcagcggcacggtcagatcgaaatgcaggcccaaccgctcttcaatcggagtgtcggattcatgaccgacctcctgcaaacggctcagcaggtagatctccttgctggtctcgccctttttcagcaaagaagcgccggtttccaccgctcgcgtctcaatgccgatgaagccgttgagctcaaaaaccttacgaagcgtatcgataacacgctgctccacaacacgttcggaggggagccactccgggaatcctgatattgatgcacctttagccacgaaatcaatataataggtgagggttgcgtcaaaacttcctggttcgcccgggatgggagacgctcccgcttatgcattctacgctttaaggagctggccatggccgacgaaactgtcaccgaacccgtaaacaccgctgcgcccgaagagcaggcaacgacacccgcacccgaagccagcgcggccacgccggcgccgactccgtcccccgcttccatgccgaaaccgcacgcgccctcccccgccgccttcgccaagaagactccggcggccaagccgcgcgctgccgccccggccgccgccaccgccacctattccgaggctgatgccaaggccgccgaggccttcggccgcgtggatgacaacggcaccgtcttcgtcaaggatggcgacgccgagcgcgaggtaggccagttcccggatgtctccaaggaagaggcgttggcactgtacgcccgtcgtttcctggatctcaaggccaagctcgatctgctggccacccgtctggcttccccgaacatcaaggcccgtgaaatcgacgagtccgtgaagctgctgggcgaagaaaccgccgaaccggcggtggtgggcgacctcgcggccctcaaggcccgttacgtggaactgaaggccgtcggcgaggccaagaaggccgagatcgccgaagcgcgcaaggccgctcaggccaaggccgtcgccgagcgcaccgccatcgtcgagaaggccgaagctctggcggcctccctgggcgacaacaccaactggcgctccaccgccgacaagttccgcaacctgttcgacgagtggcagaaccaccagcgcaccaccgtgcgcatcgacaagccggaggccgaggcgctgtggaagcgcttctccgccgcccgcaccaccttcaaccaggctcgccgcaagtgggctcaggctcgcgacaacgagcgtacagccgccaaggaagccaaggaagcgattatcgccgaggccaatgagctcaaggattccaccgcttggggtgagacttcccgcaagttcaacgatctgatggaccgttggaagaaggccggccgcgctggccgtaacgaggacgacgagctgtgggccaagttccgcgaagccgccgacaccttcttcaacgctcgtcaggctgatcgcgatcagatcaactcctccgagaaggagaatctggctgccaaggaggctctgctggtcaaggccgaggctctggtgccggtgaagaccgacgccgaggccaagaaggcccgccaggagctggccaagattcaggaagagtgggatcagatcggttacgtgccgcgtgacgatatgcgccgcatcgagaaccgtctcgacgccgttgacaagcagatcaaggccatcgaggatgccgcttggaagcagaccgacccggaggccgacgcccgcaagtccagcttcgaggagcagctcaacgcccagctcgccgagctcgacgccaagatcgcggccgaatccgacccgaagaagaaggccaagctcgaagccgagaaggccaccaaggagcagtggctgaacgccatcaagtaagggtctcgtgccaggttcccctctgagggaagccggcagcaaggctgactgaggggagtttacggttataccgcaagctcccctcagtcgcctacggcgacagctcccctcagcgaggggagcttcgtcatatttatgccgttttcttctgccctatactcataactccaccccatagttcctcagtcacccagcaattggtgtcttacgcctgagtccctaccggtgctgcaacaattgccgtgagcccttgatgtgcggccagatattcatgcaacggctggctgtatggcatattcagctcgccgtaattggttccggcacggaaggcggggtaactgtcgccgccctgaagcagatatgaattggatgcgataatcaccaggtcatcgtccgcaatcggtcgaccgtcaacggcgaggttcacgatacgaaccgccgcatgttcgtcggcagcacactcgtcagcgtcagcgttggtatcagcggcggcatcagtatcagcggcggcatcggcattgccgctcccaccggtcgtaccgcattcggcataccgatacgtcacgttcgaggagatgccgagccagcgccgctccagtcgcccatcgtcacggtggaattgctcggcgagcactctcttcacatcgcgcccggtgagcgtctcatgcgcggccttgaactgcaaggccatgagactatccacctcgcgcacggtgactttgccatcgccattcatatcaagccgtggagtccgcagactgccattattcgaaaatccgattaccggcaaacgatttccggcatacacatgcttcatgattgactcgcggttcgcgtccgccaccagcacaccgaccgtattcccgtgcttatccgaaccttgtttgtcgaaattcacgccggaggccaaggtgccaatcaccgcgttgccggcatgattcgaatatgttgccgccgcctggtaaatatgctgagcgcgcgatacctcatcgttcgcctcagcaccggcagacatccaagcggcttgcgccggatgcgcattaagcccttccacgcccagcacgccgtcaaccgccgtatggctggtgccattgccgaggtccacatcggccactcgcaccgtggcgcgacgcccggcaccggtgatgatcaaatcctgcacggccatattccgcccgaagctgcccgcctcgtaaataggcgcgccaccagcggtcgtaccacgcttgatcgcgtgattgtggccggtgtataccacatcaacatctcgcccaatatcggcggcggctgaggcatcggcgtgcagcaaggccaccaccgcatccacctttccggagcgtttgagttcacgggccacgcgattgatcgcgtccaccgcccgttcgtcaagatcggcatcacgcgtaatctgcggagtggctaccgagccgagcgcatcagtaagggcgcccacgaaaccgatccgcttgccgttcaccgttcgaatcgtagagtcacgtacatggctcagcagtccgtcaggcgacttactggcggcagacgtgttggcgcacagccagtcgatgccattgctgggatcagcgatgcgattgttgaaatcggcgacaccgcggtcgaactcatggttgcctaccgccgaaatcgtcaatccccacgctttggccatgtccagcgtgggttggtccttctccaccgccgactcatacggggaacctcccaccaaatcgccggtcgataccgggatcatattgccgggattatggctgtcggccacggtgaaggcggtggcgttgtccgcaccacgttcgatatgcccgtgaaaatcagtgatgtcggcgatggtcaccgtacgggtgccggaagatggattatcgccggaaaaaggaacggctcccgtggttcccgcacaagcataaggaaccaccagagccgtaaggataagcgctactgcaccaaaagcgatccccgatcgcttgccggcccaccgccggttcttcatattcctgctcacaccagtcacgctaggatcgtcgattgaacggccatgcctaggaaggcgactctcaggtgaattcttagcggcgtcttgggatgggaaaggcctgaccccgtactatcagggtcaggcctttgcaacccgtgtcactacgaatgcgtcggcaaggggagattactcggcaaattcctcgacgcagatctcagctaccgcatccacgcacgcctcggcaatcaggcggccgcgttcggcgcttgagccggccggattggcgagtccgccgtgagcgggaacgtcaccttggcgcaccgggtagcgtacataggatttcgccgtggcaccggcttcctcgaccatacggtccatgtgcaccagttccggcgcgtagtggagcatcaacgaagtttcggtgacggccgcatgctccaatgcccagccggggaacaccaatccatcgaacaccttgtcgataaccgactgcggaaccgggtcccaccaattggtttccacgatggtggccactcccccggtttcgcgggtgaccaggtcgatggcctcgacgatgaacgcctcgttttcaaaatgcgcgttcatgacgacgatcttggtgaagccatcggcgatgagttcgctcagcacgtcgtgcatttgggtgatcactgtcacgccgttcatgtcgatagtacccgggaacagcggcccgccaccggagagcggcttggacttgtatccgtagctcagggtgggcagcacggtgccgtcgatgcgttccgccagatcttcggcgacccgcgtggcgagtaccgcgtcggtaccgatgggcagatgctggccgtgctgttcggtcgaaccgatcggcacgatgacgggatgagtcttcacctccttgaattccggccaggtcatgtggtccatacggcggttgcgacccattgcagtactcctttgggttggtggtggattggatggtcaatgaatgcgcccggctccctcgggaaaggagccggagctgaggagatcagatgtgattcagatccttgtcggtgttttcatgggaaagaatcatcgcgaccaaggcgatggccgcaacacccaccatgtaccaggccggggcgatggatgaaccggttagggcaatcaggccagtggcgatgaacgaggccgtaccaccgaagatggcattggccagattgaagctgaacgcgaatccggtgaagcgcacggaggtggggaacgtctcggtcaggtagctggacagggtaccgtcgttggcggtcagggtggcgcacattgccagctcaaccagcagcacgggccagaactgggaggtgttgaggatgaggaaggcaggaacggtgaggacgatgaacgccacgcaagcaccgatgagcaccttcttgcggccgaatttgtcggagatgtggcccatgccgaacaccatgaacacgtaggcgaccaagcagatggtggtgatggtgccggactgggtggcgtccatgccgacggtgtcagacagataggtcggcaggtaggtgagcacggtgtagaagccgaccgcattcagcacgcaggctccgaagctgatgatcagggccttgagatggttgtggaagagttcggcgagcggggcgaacatgccgctcttggaaacgacttggccgtcagcggaggcggcgctcttggactcaagagcatcgttcattgactggtacacgggggaatcggagagcttggtacggatgtacagcacaatcaggccgagcgggccggccagcaggaacggcacacgccatccccaaccgaccatcgcgctggagttcatgttggcggtcatcagcgtggccagcgtggagccagcgagcagaccgatggcggtggacgccggaatcagcgagcagtagatgccacgctttgaggtgggtgcatattcgccgaggaatgtggccgcaccggcatattcaccggaagcggagaagccttgcaccatgcgcagcagcagaagcagaatcggcgcgccaacgccgatcaccgagtaagacggcaggcagccaatcaggaagctcgcaccggacatgaacataatcgagtgggccaatgcggctttacggcctttcttatctccgtagctaccccagaacagtgcgccgattggacgcaggatgaaggatagcgcgaacacgccgaaggtctgcagcatggcgacggtgtgattgtcggttgggaagaacaccagggcgatggtggtggcgaagtacgaataggaggcgtagtcgaaccactcgatgaagttgccaaggaaggaagataccgcgactttcctgaccatggcctgttcttcagtttgaggggtgaaattcatcagtcgtgcagatgtagtaatcgttgcggaactcatgatgtcaccgtcctttcaaggatgtgctgttcgtgtgactgaatgggattcaagtgggaattcgtttcgcagcaggtcgaccagcgccgcgatagcctcgactatgcccttgagtatttgctgaaacgtgaatcgtcgattaacccgttcggcgtagaagtggacaggttgcccagtggtgctggcgcattattcaccatgctgttcttgccatgatttcgtgagtttggcggcgaatagcagcatcgaccagttcggtttgtcgttatagtcgacgccgaccatttgtgtcactttgtccagtcggttgtacagggtttgccgtctgatacccaattgctcgcacgcgccggttttgctatcgaggttgtcgaagcagacgcacagtgtgtccagcaacaacggagaggcggcgacctcgaatccgatggtctgcaccacgagcatgcgcatcgccttgtccatatcagaggatgcgacgaaacggtcgacgagtgcggacatggtacttacgattcgcccgtatgccggttcctgattggcgatgtcacgcaataccgcgaacccgtcgaccagcgtcaccgtgtccaatgccactcggccatgcaccacgtacacaccgtcgccttccagtacggcaagcgcatccatgcaatggcgtccgaatgcggccgcaccgtctgaggaatcggtggtggagcaccatccgaccatcaagtcaccttccagcatgcaggagacggcgcatcccgaccgttcttcgaaccgttcgaccatcgtcgatacatggttgatgccttccaccaccgatctgaaccgaaaagcgaatggcatatagatgcatgatccggcaaaacccagcgcgtcgagcatcgcatgcgcttcctgcgcctcaaatgtattgacgtgcacgccgtcggccgggcccatactcagatgatgcatcatgcccatgcgcgcgccgccgtcaatatagagggcggccaccggagacacgatggtggcgatggcccgacgcatcgtggcgtcgaaagtcatggtgcgttgcgtgatctccaatgctcccaccggccgggagcgactttcaagggcgatgacggcgctcgattcgttgccggcatcgaacgcacgacccgctcgagcggccaacagaccgtcaccatcgaaaatggcgacgctttcgccgaacagcgacgcaatggtttcggccacagcctcgatattgccggtacgggacaatccctcacgtaatgaagtggacattgtgtccacctccaattgcaagtgcatctgttcgtgcacgatagcggtattgacactctgacagatgtcgacaaaaggtacgcgagatttcagaccaatcaacgtcaacccatgcagcctggccgcagacaccagttcgtccggcatccgcaccacaccctccaccagttcgaccaccagagcggcgacaccagcctgtgccaggcttgctacatattgtcctaacgtgccgtgccaatcggcggcgagcagagcgttaccctcgataatcagcatctcaccgcccgaaaggaaactggagacatcctctcgctcgttggtaaacacccatcgcactggcgtatcgaggtctttgccttcgacctccaccacaggatcggctcgtttgaactgcgtgttatgaagcgcactgcgaatcgatacagtcatacaatctgtccattcccccgcggaacaccggtcgttccggttaacctcaccgcaaagcgtgctgttgacaataacctcagttggttacgcgggcagtcggttcacgtaaccgttcggcaacacaccagttgaaggagcgacgatgactaccacactgttcaccaacgcacatatcgccaccggagaacccggcagcacggctgcaagcaccctgccattgcaggacattctcgtcacggatggcgtgttcaccgcattcggccccggactcgcgcaacaatatgaggctcagggtggtgatctggcggccattgaggtggtcgatctgggcggcaaacttgtctgcccaccgttctgcgatacgcatctgcaccttgattacgtattcacggcccgcaagcccggtgcggtgaatgaaagcggaaccttgtttgagggcatccagcgatggagtgagaccaagtccgacttgacggtcgacgagatcaagcagcgcgcgaaaatcggcattaagaaagaaatgctgcatggcgtgcagctcattcgctcccatgccgatgtgaccgacccgaacctgacctcattaaaggcgctgctggagcttaaggaggaattgaaggatacggtcactctccagatcgtcagcttcccgcaggagggcatgtactcctacgagggcccgcatggcgaatcgggggccgagctggtggaggaaggactcaagatgggtgccgactgcgtgggcggcatcccccatttcgaacagtgccgtgagtttggcgagcattccatgcacacggtagttgagttggcttcgaaatacgacaagctcatcgacgtgcattgcgatgagacggatgatccgaattcccgttacgtggagctgctttcggcgttggcatataaggctggcattggcccgaaggtcaccgccagccacacctgttcgctgggatcggcggacaacgcctacttcttccacctgaccaagctgcttaaggcggcgcatatcaacttcgcctgcgcccccaccgagaacctgtatttgcagggccgtcaggataccttccccaagcgccgtggcatcacgcgagtcaaggagctcactgaggcgggtgtcaatgtgtcattgggccaggattcaatgcaggacccgtggtacccgctgggcaatggcaatatgatgctcattcttgattatgtgctgcatttggcacagatgatgagctttgaagaaatcgacgatgcgttgaagttcctgaccgtcaacggtgccactacgttgggcctgcgcgatatgtacggcttggaaacgggcaagccagcaaacttcattgtgctggacgccgatagtgtgttcaacgccgtgtatgagcgctgctcggtattgcgttcggtgcgcgccggccgcacgctgtttacccgcgaggagaccatcgacaccggactcgccctgctgcaataacccgacaacaaacagtagttccccttgacaggggagctatcgccagaggcaactgaggggtagaccaaaaacgtgcacattatgtgtgcgtaggtctacccctcagtcagcttcgctgacagctcccctgtcaaggggagctttgctggtatgcgctagctacgctatcgaaacggactacttctgcggagcgtcaccggaatcggcgggagcggattcggctggttcagtggccggagtggcgtcggctggagtctcgccatcagtggaggcgccggcttcggacgaagtttcggcatcggtggcggcaccgtcttcggcgggcttatcggcggcggccggctcctcgaacttctcccccttgaaggtgaattcgccgaggataccctcgccttccgcatccacaatcacgcgctgaccgtcttcgagatcgcccatcagaatcttctcggagatggcgtcctcgatgtcgcgctgaatcacgcggcgcagcggacgggcacctagcagcgggtcgaagcccttctgcgcgagcaggtccttggcggcgtcggtgagttcgagcgacatgtgacggtcgaacaggcggtcgttgagctgcttgacgtccagatccacgatctggcgcacctgcggctcggtgagctgcttgaagacgatgatgtcgtccagacggttcaggaactccgggcggaactgctgcttcaattcggagctgacctggtccttcatgcgctggtagctggactcgttgttggcacccaggttgaagcccgtgttggcggccttggcgatgtctcgcgtaccgaggttggtggtcaggatgatgatggtgttcttgaagtccaccttgcggccctgaccgtcggtcaggtggccgtcatcgagcacctgcagcagcgtgttgaagatgtccgggtgagccttttcgatctcgtcgaacagcaccacggagaacggcttgcggcgcaccttttcggtaagctcgccgccctcctcgtagccgacgtatcccggaggcgcgccgaagagtcgcgaagccgcgtacttctcggagaactcggacatatccacgcgaatcagcgcgtcctcatcgtcgaacaggaattcggcgagcgtcttggccagctcggtcttgcccacgccggtggggccggcgaagatgaacgaaccggacgggcgcttcgggtccttcagacccacgcgagtacggcggatagagcgggacagggcggaaaccgcctcgtcctggccgatgatgcgcttgtgcagttcggcttccatgttgagcagtttcttggactcggcctgagtcagcttgaacaccgggataccggtggtggagctgatgacctcggcgatcacgtcctcgtccacgaccatcttgacgtcggactcgccttcgcgccaggagtcttccttctgcttgcgatcggcttccagcttctcctgcttgtcgcgcagttcggcggccttctcgaagtcctgacccttgatggcctcgtccttgtcggcggcgatcttggcgatcttctcgtcgagttccttgagctcaggcggggcggtcaggcgcttgatgcgcaggcgtgcaccggcctcatcgatcaggtcgatggccttgtcgggcaggttgcggtcctggatgtaccggctggacagctcggcggcggactgcagcgcgccatcggtgatggtcacgtggtggtggttctcgtaacgggaacgcaggcccttcaggatctcgatggtctcggcgatggtcggctcgtgcacctgaatcggctggaaacggcgttccagagccgcatccttttcgatgtacttgcggtactcgtcggtagtggtggcaccgatggtctggagctcgccacgagccagcatcggcttcaacatgtcggaggcacccagcgcgccgtcggcggagccggcgcccacgatggtgtggatctcatcgatgaacagcacgatatcaccacgggtcttgatttccttcagcaccttcttcaggcgctcctcgaaatcaccacggtagcgagaaccggccaccatggaaccgaggtccagcgagtagacctgcttgcccttcagggtttccggcacgtcgccggcctgaatcttctgggccaagccttcgaccacggcggtcttacccacgccgggctcgccgatcagcaccgggttgttcttggtgcggcgggagagcacaaccatgacgcgctcgatctcgttggtgcggccgatgaccgggtccagcttgccttcagcggcttcgacggtcaggttgcggccgaactgatcgagaatggcggaaccggacttgttctgcttgtctgtcacgccgccggcgttggccagatcgcccttgccgtcaccggtgccggtgccggagttgccgcgaatcatatcgatggtcgcgctcctgagctcacccaggtcgacgtccatcttgatgagcacctgggtgcccacgccttcgccttcgcgaatcaggccgagcaggatgtgctcggtgccgatgtagctgtggcccagctgcagggcttcgcgcagcgagaactccaacacctgcttggcgtgcggagtaaaggggatgtgcccgttcggagccgcgttgcccttgccgatcatttcttcaacctgcttgcgagtggcatccagctccacgcccttcgaggcgagcgccttggcggccacgccctcaccttcgcggatcaggccgagcagcaggtgttcggtgccgatgtagttgtgctgaagggccctcgcctcttcctgcgccaacacgatcacgcgccgtgcacggtcggtaaaccgttcgaacatgcttgtccttcctcaattgacattccgtcttactctaccgattcacgatgacgtttattcatcggattccatgaattgcgccgtaagaggataagaaaacgatatgctggttctagattcacccgtagtcgattacaaggaggctcgaaatgagtgaagcgacaaccaagcccgacatcgttgtcggcgtggatggttccgatgaatcctttgccgcgctgaagtgggcgcttgaggaggcttcgttaaccggtcagagcgtcaacgccgtgtttggctggacgcattcgtgggatatgggttccgaaccggacagcgacgaggcctgggccaaggtccgccacgacatcgccaacgagctgcgtgtgtgggtcgacaaggccgctgcaggcatcgacttcgatccggcgaatctgaagctcacctcggtgaaggcctccggcacttcggccctgctgcagatcggccatgatgcgcagcagatcgtggtcggccgccgctcgctgagccgtgtggcccgctggttcatggggtccctgtccgcttcgctggccgaggccgccgaagtgccggtgaccgtggtgcgcatcgccggcagcgaggatgagaccgtgaccgatgccatcgccaatgccctgacgccaggagaccagccggtccactacacgcagcctcagccggtggtcgaggaggctcgccgcccggtggtggttggtgtggatggttccgagacttcccgccgcgcgttcgacttcgcgctggaaaaggcacgactgcacgacgcgccgctgcatgtgatgttctgctggcagctcaaggatttgggcgttattccgggctatgagaacgccgtggcaccggtgaaggtcggtcagcgccgcgccgaggagattctcgccgggctgatggccaaggccgagattcccgatggtgtcaaggtcagcgcgaatgccttccatattcccgcgtccaaggggctgattgcggcatctcggtacgccagccatctggtggtcggttcgcgcggcctgtccggtctggacgcgcacttcctgggatcggtgtcccgtcagatcgtgaacttcgccgaatgcacggtgactgtggtgcactgattcaccgaaatcggcatggagtgctaacgcacgtctcggtgatgggcttgcagggaggaattctttattcctgcaaccccatcaccatctactttttaggaaacatcttcgctgagacctataagttgatccgagagtacattctgctgttggggagcaggattggcgtttattttattcctcgtccgccctgttctggcgcagctgctcaatga

SEQ ID NO: 28 - DNA, 100878 bp, Unknown
  R30_18m  MAG No. k141_8751
caccatgccacctccgcgaggcgtgagcatgctgccctgcaggttgctggccagcacgaacccgccgaccgcttccttctcgattcgtccggcggcctgttgagctgcccgagaaaccgcgatcgtggatagcatgctcgccgttatgatggtcaatactataaggagcactatggttcgtactcgttttctgagcacatagcgcaccgaccgtgcaacgaacgtcatcaatacctcctgtgggccttgggcttttcgcccaaaatgcgaaacatgccgcgtttcgccggttagttagccgcgacaatacatgatgcacctcaagatacgggaagagatacgccttgggcgaaaaacggaacagcggcaaatgtcgtttattctggattttggtccatctcgggccgcgtcgatgcgtcggcccgagaggaatcagcgctcgcgcctcaccttcgaggcggcgaacacgaggagcggcagagcggcgaacgcatagttctcgcattggatgtacaggtatgcgaccaggacgagccagcagatgacggtcttgtgccagacgccggattcgcccgaacccgcgtcggcaacgccatcaccactattgcccccagcaacatcagtaacgtcggcaacgtcggtgacacaaacaccgtgcgccagcccgtcggacgatgcgccatccgcacctccacggcataccgtcctcccgcgcgtcatgcagaccatcgaggctccgaccagcatggccagcccgatcagcccgtattcggcgatgacgctggtatacgcgcacatcgtccacaccgtgtccgcgttcacgccggccgcgaatcccgtggccgcgccgccgttcataccaagaccgtccagcagctatccggctttggccgtgccggcccacaccgcattgatgatgttgcccgcgccataaccggtgagcagcgtccacggatgggtgagcaatccgcatatcggatcgaggctttggtagatccgcgcgaagaacgagccgtctccctcggccccgttctccgcgatggcggagagtctggaatccgccagcacacccagcaggcccagtgcgcatgcgccgagaatctgcagcatgccccggacgcggcgtgcgccgtcatgccaatcggtgcgcgccacaagggcgatcagcaacgccacgacggaatcgatgacgattctggtgccggcttgcatgagcaccgcgccgacggcatacgtgacgatgaggtcacgcagccgtttggcgtagatgcggtcgcgcccgcgcatgagccacatgagcggaagcagtatgccgaacaggtgcatgccgatatagctgggctcggcgaacaggaactgcggacggccgccgccccacaccgagttgtcgctgatgtattgccggtacatgaggtgcgagaaatagtcggtcaacggtttggcgcgcagacggatggacagccattgcacgacgcccactccgaaggaaacccagtatgatgcgatgagaatccgcaatggcgtacgccacggaatgcgtttgatgtcgaacgcaagggcgatcgcacccaaagtggcgagcacgcccagcaatccggtgatgctcatgaacgcggcgttgaggtggatgccgaacttcagccatcccgggatggacaggattatacagaccaccggtaggaggaacattggcaggtaccggttggctgcgatgcgcagttgccgccaattgcataggcagtacacggcgaacagcgccggactgattggcgaccagaacggcgcgtacaggccaagcgtggtgccgtccaccggaagaaaagcgacggccagcaacagccaaatgacgttgcgttcctgcgatgtcagaaatcgcaggaacgaccggtattgcggtcggccatgatggttgcccgcgtcgatggtgtcgttgcgtacgcatgcctggttcatgtgattctccctccccgtcaaccttactcgttcatcacgatgcgcggacgggggcatgctttccccgccgaacgtgcaatggcccgaacattgacaaggccgcaccgaatgcccccatcattggcacattgtgcgatctcgtcgcggctggctgacgaaataatgctggccgaccggttacattggttcggtacagtgacggcattattggccactggatcaagcgatttgcggcagaacgacgaaagcgacacttgggcgaaaagaggcaggcatgactacgaatcgaccgctcattgcggtgactccgctgatggattacgggcgcgatagtctgtggatgctgcccggatatatggaggcgataatgcgggccggcggtacgcccatcatgttgccgctgaccgatgacgccgacattcttgcacaatgtgccgaacggtttgacgcgtttctgtttacgggcgggccggatgtgggaccgatggttggtgcagcggcctccgccaccggccgtagcgaggtgctctctcctgagcgcgaccgaatggaatcgattctgctgccagctgtaatggcttgggacaagccgattctgggcatctgccgtggcattcagttcatcaatgcagcgctgcgcggcacgttgtggcaggatctgccaagccagcatccgagcgatatcgaacaccatatgaatccgccgtacgatgcgttcggacataacgtttccttggtgcccggcactcccctggcttcattgttctcggggcagactgagattgcggtgaatagctatcaccatcaggcggttcgtgatgtggcacccggtctcgaagtcatggccgttgcgcccgacggcgtgatcgaggccctgtaccggccggcaagccacttcctgtgggccgtgcagtggcatcccgagtttctctacaaggtagatccatgctcgcaggcgatttttgatgcgtttgtggggagttgccgataacagcaaaaggggctgctccggttttccggaacagccctttttcagcggtagcagtcagcagactgatttagtcatcggtgctggcttgccagcgctgattggcgcgtgcggagaccgccgtccgaaggcgaggggcgtacgaaggtacgtcgaacctgaggaaaggcggtatacgctccgccaatcagtgctggttgttgagacggtggtacatctcggacagctccagttccttctcgaactggcgagcggtggtgttctcgtcgatgacggcgagctcaacaccggcgatgcgggcgaagtcttcccaagcctcacgaccgacggaggtggtcatgcaggtgtggtgagaaccaccggcggtgatccagcactcaacggcggtcttcaggctcggcttcggctcccagacggcgcgggcgcacggaagctccttgagggagccctgcggctcaacgacgtcgacgacgtccatgagcaggcggaagcgttcgcgaacgtcggacatggagaccacgacggcgtccttggtgggcttgccggagaagaccaggcggaccgggtcggccttgccgccgatgcccagcgggtggatctccagcttcggcttggcgatggtgccgatggacggggaaacctcgagcatgtgggagcccatgtcgagctcgtcgccctcggtgaagttgtaggagtagtcctccatgagggaggcgccaccctcaaggccgtagcccatgacggcgccgatgcgcacgaggacggcggtcttccagtcgccttcagcggaaaagccccagccgtactcggacgggaagcgctgtgggccaacgcccggcagctgtggcagagcgccgaggtcctcgaaattgtcgacgccggcggtgcagccgttggcgcgcatcatgttgaccatcgcggcctcttccttggcggcgatgaacagggagtcgtacttggcgtccagcagagccgggtcgacgtcgtacttggccttgtagtcctcgatgatctccttgacctggtcgtccttgacggcgtcgtacgcagcgacgagctcgttgacggcccaagtgttgatggaggcgccgaacacgcgctcggcctcggtcttgtcgccctcggtgacggcgacgttacgcatgttgtcgccccagcgcatgaccttcatgttgttggaggcatcccagccggcgcaggcgcgggcccaggtgccgaccttctcgacaacctcaggatcggtgtagtggccgacgacaaccttgcgcttgatgccgaggcgggagacgatgtaaccgaactcacggtcgccgtgggcggcctggttcaggttcatgaagtccatgtcgatggtctcccacgggatttccttgtggtgctgggtggccagctgcagcagcggcttggtcagcacttcgaggccgcgaatccacatcttggccggggagaaggtgtggcaccaggtgatgacgccgatgacgttcgggttggcggaagcctcgaccatgaactccttgacaccgtcggaggacttcaaggtgggcttgaggacgatcttggccggaatcttgccggtgttgttcaggtagtcgaccatttcagcggagtgaatggcgacctggcgcagggcttcctcgccgtacaggtcctgcgaaccaacgccgaaccagatttccttgccctcgaaggggttttccataaccatagggttacttcctttacttctttgtttatgggggtttgtttaagtttcattcgccgaccgaggctcccctcagagaggggagccaagacaccaccgtgctggcggagtcagcgctgatttgatgtgtgtgcccgcaaggcgcggaaggcgaaggcgtacgaaggtacgtcgagccttccgcaacgcggcggacactccatcaaatcagtgctggccgtagacgttctggtagcggtcgttgagcttatcgatgtcggcctggtcgatctcgatgatgtcaccgagctgacgggcggcccacatggtgtgagcgacttcctcggtcatggcagcggccttgacggcgccttcagcatccttgccgatggtgaaggggccatggttctgcatgaggacggccggggacttcgggtacttcttgagggtctcgacgacacccttgccgatcgcctccgagccgatcagacggaacgggccgaccggcaccgggccgccgaactcgtcgcccatcatcgtcaggccgcacgggatgttctgaccagtggcagcccaagcggtggcgtaggtggaatgggtgtgcacgacaccgtagacgtcgggcatgttgcggtagatgtaggcgtgggaagcggtgtccgaggacggggcttcggcaccgtcgaccacgttgccgtcaaggtcgcacacgaccatggaggacggggtcaggtactcgtagcgcaggccggagggcttgatgacgaacaggtcggcggtgtgcagacgctgggaaacgttgcccgcggtccacacgaccaggttccacttgatcagctgctggtgcaggttggagacgacctcacgaacctgcttgacctcggcgcgaacctcggggccgtaatcagccaaagttgccattattggttttcctttccactgtgatggatggacgttttttcaaaatctcaaggacctctctcaatagagggaggtcagaaaggcttacttatcttcgaggttgatggtttcgatggcagcgtgctcgatgggcaggcccttggtgaagcgggcgaagaagtcctcgaaaccaaccacatcggaagccaccggcttctcagtggtggactgggcgtccttgaacacgaaaccatcaaggaagtcagcgaggttgctgtgatcctcgttggtgttccacaggtagttggcgagcacggccataccccaggcaccaccttcggcggcggtggacatgaccttgatcggggtgttgaaggcagcggcgagaatcttctgagccaccttcggagtggtgaagatgccgccgtggcccacgagagagtcgacctgcacgtgctcctgcttggtcatcacgtccatgccgatcttgaccggggagaacgcggagaacagctgggcgcgcatgaagttgccgagggtcatgttggcttcggggctgcgggcgaacagcgggcggccttcaggcagaccggccaggaattcgccggaacggaacggatagttcagcaggccgccgcagttggcgtccacgtcgtcggcgatggccgcgcggaacaaggtgccgtacagcataccggcatcaaccgactggccgatggccttggcgaactggccgaacaggccgacccaagcgttgaggtcggaggtgaagttgttggcgtggctcataccggccagatcgccggccggggtggtgaccaagtcaacctcagggtggagggccttgagcttgtgctccagaaccaccatggcgaagatggaggtgccggcggagacgttaccagtgcgtacgcgcacggagttggtggctaccatgccagtaccggcgtcgccctcaggcggggcgagcacgatgccgggattcagggcaccggacggatcgagcagcttggcgccttcctcggtcagctcgccagccggagtgccggccacgagcggctcaggaagcaggttctccagcttccacggctgggctgcgacctcaggcagagcgtcgaacttctcgatgaatgcggtttcgtaagtgtgagtggtcgggtcaatcgggaacatgccggaggcatcgcccacaccgaggaccttctcaccggtgagcttccagtgcacgtaaccggcgagtgtggtgaagtaagccacctcggagacgtgctcttccttgttgagcacggcctggtacaggtgagcgatggaccaacgctcggggatgttgtactggaacagctcggagagcttcttgtgagcttcggaggtgttggtgttctgccaggtgcggaacggcaccagcagttcgccggcctcgtcgaatgcgaggtaaccgtgcatcatggcggagaagccgatgtggccgacgtgcgtgagcttctcgccataggcggtctcgacgtcgttggccatggaggcgtaagcggactgcaaaccgccccagatctcctcggtggcgtagctccacagaccatcctccaagtgggaggcccagctgtagtcgccggaggcgatggtctggaagttgtcgtcgatgaggacggccttgatgcgggtggagccgaattcgatgcccagcgtggtcttgccagcgcgaatcttctcggcgatgtgggcggcctgctcggccgcgttgtcggttgctgccatatctttcctttgccttggagcgccggcgttgttatccccttccttggggaggatgttagcgctcacaatttcaaaaaaacattgtaccgataacctgcattcgacacaacttataccgtgtcacgcatcataacggtttgataacagcgccaatttaccgccgaggagccggccccaaggaccgccgagcacgcacttcggcgggaatcagccccatgccgtgctgggtggtcaggaaggtcggctcgccgccctcccccagcaagcgcagcgtctcgcgcatggcggccacgccgagcccctcgaaatcgggatgcacggtggtcagcggtgggtacatgttatccacgccagacatgtcgtcgaatccgaccacgctgacgtcttgcggaatccgaagcccatgctcatgcaacgcgcgcatgacgccgacggcctgattgtcgttcgcggcgacgaccgcggtgggcaacgccgtgcctcgacgcccatactcatcaatgagatgattcatgtgcgcatatgcctcagaggcatcccacgtatggcagcgcacgatctgcgaatcgatggatcgggaggcggcgagcttgcgccacgcatccagtcgggtgtgggcgtcgcgccattcgttgggaccggcaaaatacagagccgatttgtgcccgtattcgcccagcaaggccaccactttggccattgcaccccactggtcgataccgaccagtgcagtgcgacgcttgttttcggtggagataaggcccaatccctcacgcacggtcatttggccgtgggtggcggtgacgatgacgcgcggctgagtgactcgcgcacggcaggcggcggcgaacatcacgtcggtcggggtcaggaagatgaaggcgtcgacgttctgctcgttgaaggtgtcgcacaggttgtcgaattcggactgcatgcacaaggcctcgtggaccatcatcacgctcatgaacagaccgtgttcgcgggccatggattcgatggatgagatggaggaaatcgggccgaagaatttgaggcctccggcgatcagccctatggtgcgcgaacggcgggaagccagtgcgcgcgcggagttggaggggcggtagccgagttggtcaatggcggcctggactcgcgcacgggtggcgtcggaaacgtccggcgagtcattgatcacacgggagacggtttggtggctgactccggcgagcttggccacttcgaacatggacggacgtttgcttggcttgcggctggtcaccatgctacctaacctccccgctggcggccggcacccatgcgcggccaggcttgtaccttaatcaatactgactttagcgcgtccacaacagttttgcgttagcgctcacactgtcgtgtcgcacgcggctcaggtcaggtgccatgagacacgatggagcggagtcggcccgtgttcggcgatggcggcacggtgtgcggcggaaccatagcccttgttatgagcccattcgtaggcggcgtaacgtgggttgctttgcgcgaggtcgaccatcagccggtctcgggtcactttggcgatgaccgccgcggtggcgacggtggcgcaatgctggtcgcctttgactttggtcgttatatcggctggaatcggcacgtccggcgcgtcgaacgtgttgagcgccttggtgatgtaatcgctcggcccgtcgagaattccggcgactttgggcagggcgcgaacgctttccccacaatttccaatggattcccctacggagtctcccggacgaccttccacaatctcccccgcagccttttttgccgtcaatccccctccaagccgtaagccaagttcgcgttcgacttggctgagcgcgcgcagggcggccacgccgagcgcataggtgatgccccattcgtcgatctcggtgttgctggcctggcctacggcgtaggccgcgcaccagtcgcgcagttcgtcgaaaatcgcctcgcgcctatgttcggtgagcattttggagtcggccacgccgtccggtacgccgaggtaggtccgcccggacagttcggcggaatcatcgccgtcaagcggcgccaaatcacaggcccagatggcggcgcacccgaccatcaccggaccggcgagcgcgccgcggccgacttcatcgaatccagtaataaggtcatagccctgggccgcaaggctgcgttccaagtcaagtgtcggggtaatcatgcgcggctcccatcgtctcacaatggttaggattcagacggtccaggttcaaatggttcaggattcagacggcccggaactcaatcgttcaaagactcacacggttcaaaaaaaaactcaggaatttgagccggaagcgtcaggcacgtccttgaagacttcgtggtggtcatcaatcgcaccaagccggtcaagcggccagtatctcgcgattccgactccgaccacatcggagatgggaaccaagccgcgatcgccgtcatcctgatgatagcgggagtcggcggaattggcgcgattgtcgcccatgacgaacacgtggccctcggtcacggtcaccgagaacgggaaagcgctcgggtccacgccggggcgaatgtaggaggtctcattgatggccacgccgttgatggtcaccggctggcccgcgcccttgcattcgaccacgtcaccgggcaggccgatcagtcgcttgatgaggtacccgccaccgggagcgctgctctgctcctcgttcaaccagttgttgggatctttgaataccacgacgtcgccgcgctgcagatcgaagatcttgggggtgagcttgctggtcaccacgcgatcgccgggcaccatggtgtccatcatcgagcgcgaaggaatctcgtaaaagccgacggcgaaaatgcgaatcagcagcacgataagcacgggaacgccgcaccacaggaaaaagtcgcgtagggtgaagtggtcatcatccatcgatgatgctgccgcggcattcgcaccagcggaagaagcggcgtacgccgggcgcgccggtgccgggggaaccggggacagggcgatgccgtggtcggcgacttggaacgtacgggaatcgcgggcatcggcctcgtcatcatacgaggtctgattgctctccggattgtcggaaatcgggaattcgccgttatcctgatcgtcctgcataccatctcctcgcgattcatgctgccggatatgaggggtgccggcgcccgtccatcatacgtggaaaatacggaaacagcccgaaaccgaaacggttccgggctgaatttcacggtttattcgcgcacctgcatcatcaggcccacgattgcacccgcgaatcgactcacttagcggagttgtcgcggcgctcggcaatacgagcggccttaccgcgcagagcgcgcaggtagtacagcttggcgcggcgcacacggcccttacgcacgagcttgatggagtcgatggacggggagtgcaccgggaagcgacgctccacaccagtgccgaagctgatcttgcggaccacgaaggtctcacgcacgccagcgcccttacgagcgatcaccacgccggtgaaggtctggatacgggagttgttgccttcctggatcttcacgttcacgtcgacggtgtcgccgggacggaaggccgggatttcctcagccggcttcatgtgcttggcgtcaaaagcctcaacagcgttaaccattgttttccttcagtgctgccgcataccagccacagatctggggccatccacgcgattgcgcatcacgtgcgttggcctgttctcgttatccctcgggtttgcccttgggaagcccgccgatccgccgaaagtcaggccttgcggccgttcggactggacccatggagacgtgggcttatgcggcggcccacttctcgacacagcaatcgtcaattgtacggattattgcggacagaatggctgtcggatggcattccaacaccaaggcactgcgacgtagttgacagacctgcaggcgggctttatcttgggagcgtcggtaggcgaggctaccgcagggatatgggttgctgccgctaacagtggagacactgcacgcaggtcagcagttcttgtcggatcaaggcatgaactaacgcaattccaccgccctgcgatgctgaagcttgaacgatggctcgaatcggcggattcgaatactttccgcccctcctgctggtcgcatggataccgacgatggtattgatctggcgtttcagcgcacggcttgaaggaggtgagagtccgatggacggtgattattccagtagttccgccgccggcaacagtcatagttgcggtggtgatgaccatgttttcttatattccgttatccggaagtcgggctctcgcctgtagtgttccttggctccccggataacccttgcataattcgtctttcctatgcatagggaggtcttttcatgaccatgttttcattcaatcgcgtcggtgcgcgtccaaatgcgtcggcccgcaacccttccaccgccgcgtccgaccgccaaccattcgccgtgcgcctggcctccgacgtactggtcgtggccggtattctggcgctgttcggtctgatcgcttggattctgccggcgatcggcgaaccgatcggcccgaaaggcgtgccgtcacaagtcagtacgcatctcgccgacctgccgtattacgcgctgcgctcggtgttccgcatgctcgtggcactgttcttctcactggtgttcacgttcatctacggcacggcggccgcgcgctgccgccgcctgagccgcgtgctgattcctctgttggatattctgcagtcggtaccgattctgggctttctttcggccaccatcaccatctggatggtgctgttccccggctcgatgctgggcgtggaggccgcgtcgattttcgcaatcttcaccagtcaggcctggaacatggcgttctcgttcacccggtccctgaccagcgaaccaactgaactcgacgaggcggcccgctcactacagctcacacgctggcaacgattctggacactggacgtgccgaacgcgatgattccgctgctgtggaactgcatgatgagcgtgggcggcggatggttcttcctgaccgcctccgagatgatctcggtgaacaatcgcacctatgcgttgcccggcatcggcagcttcgtggcacaggcggcggccgaggagaatctcgcggccatctgctgggccatcgtgacgatggtgctggtggtgctgcttatcgacgtactgctgtggaagccgttgaccgcgtgggcggagaagttccgcattacgcaaagcgagtcggcggtgcgcaagaccagtgtggtgctgaccatcattcgtcagtcacatatcgatgagatggtggcctggctgttcaggcctgtcggcgacctgttcgacacgctggcccgcccgttgggtcggaccggtggacgttgggcggcggacgtgaagtccgcacgcagccgcgcgcttgacgtggtattcacagtgctggtgttggcagcgtgtgcgttcggactggtgcagcttatgctggtgattcatcgcgatgcgggattcggcgagctcgggcaggcgttcgtgttgggcatggtgacgttcctgcgcgtggcgctgcttacgctcgtctgctcggtgatttgggtgccgattggcgcgatgatcggcatgaatccgcgcgtttcgcggtttatgcagccgattgtgcaggtgctggccagcttcccctcgaacttcacgttcccgttcgtcacgctctggttcgtggcatgcagcgtggatatcaactggggcagtattctgctgatggcgttgggcacacagtggtacatcctgttcaatgtgatcgccggggccagccagattcccgacgatctgcgtgagatgacgcgcagcttccagctggggcgctggcagcggtggcgcgatttgattttgccggcggtattcggctcgtgggtcacgggcggcattacggcggccggtggggcgtggaatgcctcgattgtctcggaaatcgtaagttatggacggcatacgctgaccgcctccggcttgggcgcgtatatcgccgaggccaccgaaagcggcaacaccgtgaggaccatcatcggtgtggccgtgatgagcgtgttcgtggtggccgtcaaccgcctgttctggaacccgctgcagcgcatggccgagcgccgtttcgcactgaactaaagacttaaggagaataatatgactgttgcaatggaaaccattcgttcgctgcgggcggtgaccccgcagaacaccatcatcgaagcccagcacgtcggccagcgcttcacggccgacaacggcaccgaactcaccgtgttcgacaacatctcgttcaacctgtacgagggcgagatcgtggccattctgggccgttcgggtgccggcaagtccacattcctgcgtgcgctggccggactggtcaagccgaccagcggcacggtcaagtatcgcggcgaggccctgaccggcccgaatcccggcatcgcactcgtgttccagaccttcgcgctgatgccgtggctcaccgtgcaagacaatgtggaactcggtctgaaggcgcgcggcgtaccacgtgcggaacgcaccaaactggctctggatgccatcgacatgatcggcctggacggcttcgaatcggcgtatccgaaggaactgtctggcggcatgaggcagcgcgtgggcattgcacgcgccttggtgctgcggccggacgcgctgttcatggatgagccgttctccgccctggacgtgctgaccgccgaaaacctgcgtcaggaagtgctcaagctgtggtcgagcgaacagcgcagcatcaagtcggtgcttatggtcacgcataacatcgaggaagccgtggagatggccgaccgagtggtggtgttgggctcgcacccgggccatctgattgccgatgtgcgggttgatctgcagcgtccgcgcgaccgtcacagtgtcgaattcgaggcgatggtggaccgactgtacgcgattttgaccggacaggcctcgcagcctacgcaacaagccgaggctctatcgccatcggcatcgctcacgaacgcacccgtcacggacgcatctgtcacggacgcatcagaccttcagcccgccaagaccatcgagaaaatcaaggagcatccgctgcccaacgccacgccgggcgggcttgccggtctgctggatgtggttgccgagcatcctcacggcatcgacttggcagatttggcctcggctctttcgttcgaggtggacgacctgttcccgctggtggatgccggtacgatgctgcgcgtcatcgtggtacgcgacggccatgtgcagatcaccgaagcgggcgacgcctggcataaggcggacattctgcgggccaagcaggtgttcgcctcactggcgatggaacacgcgccgctggtgcgcaacattgagcatgcactgcggaagtctgcggaaggcaagctccgcggcgagctcatgctggacctgctgcgcgcccgttactccaacgacgaggcgcatcagcagttcgccatcgccgtggagtggggccgttacggcgagctcttcgattacgatgccgatgacgatctgctgagcctggatgaggcgaataagggcgaataagcgaatcagccacgtgagttggctagatagtgcctttatgcctgcaaacagatgccgaagcggaatatgaccatgttcgactcatctgactgacagcaatccgtatatgcaaagtgcccggcatccgaagatgtcgggcactagtcgtgagagagactccctcagtcagctacactgacacctcctctcacccgagggggcaccagaggaacgaatcagaactcgcgacgtgggcagtcgccagactgcccaccagacagcacagccgcggtcgcgcgaatcacgaattctgaccgagcaaagcgaatcagaattcgcgatttgcgcggtagaacttgatcaggctctgggtggaggcgtcctgggcggcgagggcgtcgtcgtcctgggagatggccggggtgatctgcttggcaagctgcttgccgagctcgacgccccactggtcgtaggagtcgaggccccagacggtgccttccacgaaggtgatgtgctcgtacagggcgatgagctcgccgacggcgaacggggtcagggccacgccgaagatggaggtggtcggacggttgccggtgaacacgcgggccggaacgatctcctccggggtaccctcggcgcgaacttcgtcagcggtcttgccgaacgccagagccttggtctgagcaaagtagttgcccaggaacagctcgtgcacgtcctggtcgccgtccttggtcgggttcggggtgttgacgaacgcgatgaagtcggccggaatgagctgggtgccctggtgaatcagctggtagaaggcgtgctggccgttggtgcccggctcgccccagaagatctcgccggtctcggaggtgacgggggtgccgtcccaacgcacggacttgccgttggattccatggtcagctgctgcaggtaggccgggaagcggtgcaggtactggtcgtacggcagcacggcgtgggaggcgaccttgaagaagttgcggtaccagacgttcagcataccgagcagcaccacgacgttcttctcgaacggggtgttggcgaagtattcgtcgatctcgtggaagccgtgcaggaactcctcgaagcgggccgggccgaagacgacggccagagaggtgccgacggcggagtcgacggagtaacggccgccgacccagttccagaagccgaacgcgttgttcgggtcgatgccgaattcggcgaccttctccaggttggtggagacggcgacgaagtgcttcttgatggcttcggcgttcttctcgtcggagccgtcgatggcgcccttggccttgagctcttcgagcagccaggtgcgggcttcacgggcgttggtcagggtctccagggtggtgaaggtcttggagacgatgatgaacagggtggtctccgggtcgaggcccttggtcttctcggccaggtcgttcgggtcgatgttggagatgtagcgggcggagatgcccgcgtcggcgtacggcttgagggcctcgtacaccatgacgggacccaggtcggagccgccgatgccgatgttgaccacggtttcgatcttcttgccggtcacaccggtccactcgccggaacggaccttgtcggcgaaggcgtagatgcggtcgagcacctcgcgcacgtccttgacggtgtcctgaccgtcaacgatgtacttgccctcgtcttcgaccgggcggcgcagcgcggtgtgcagcacggcgcggtcttcggtgttgttgatgtgcacgccggtgtacatagccttggtgcgctcatcgagcttgacggccttggcaaggttggcgaacagctggagggtttccggcttgatcaggttcttggacagatcgaagtgcaggtcgccggcgtcgaaggacagcttgtcgacacgctcggcgtcttcagcgaaccacttcttgaggctcacgccttcggcctgaagctcgtcatagtgcttctgcagggcagcccactcaggggtctgggtggcgtcaacgggcggattgatggccataggattccattcctttcatcagtgactggagcgccttcgctcacggctcggatgcgctccgtatcaccaaacagaatactcacaaattcggacatgaacagaacaaaaatcagtcagcgatgtcggattgccatcgtttgcattatcgaacagttcgtggcgcggcacaaccgtcatcttcaaccgagcggtcacgacacaactgccaagccgccgattggacttttcgcggagatgtcttatacttaatttcttgtgcgcggctggcgaaatgccttccgcgaaccaagccactttagctcagtcggtagagcggctcactcgtaatgagcaggtcgtcagttcgattctgacaagtggctcggatgccctaggctggctggtctgtaatggctgtccggcctagggttttgtatatcttccacacctgtggaaacgcggatatgcacgcgcgagtggcggaattggtagacgcgcaggatttaggttcctgtgtctttgacgtgtgggttcaagtcccatctcgcgcaccggcttgagcctcctggaaacattggatcgccaacgattccgggaggctcttcgtatatgcgtgaggcaattgcaagcccttgcggacgcctctacatatggcaatgccaaggcggcaaatataatggtcacagcattgtgggtctgagcctgtgcgccgtgagcctgtgtgagccaaggagagaagtgtatgtccgccattcttacgccggttggcctattgctgatcattctcgccggctatctgttcaagcggttcggcctgttcgggcagaaggattatcgcgtgttgcaaaccgcggaattcaacatcgtgctacccggtgccatcgtatactcgttcgccaccaatccgcatgacatctcgctgctgcttatttcggtattcgcattcctgtttgcttttatcccgatcgtgttcatctttctggccacccgcaagcgcaatgtgaccgaccgcgccttcctgatgctcaatggcgccggcttcaatctcggttgtttctctttcccggtcgtccagtcattctggggtgcgggcgcggtggtgccggctgcgatgttcgatatcggcaactgcgtgatggtggccgccggcaccaatgtgctcacccagcaactgctgcatattcagcccggcaaaacacttgccgaacaacacgccggttcggttcccaccttgccgtacgaaaagcccaaggatcgcgacgccaaacggcttgcccgccgcgcattgctgcgcaccatcggcaagagcttcttcggctcggtgccgttcgacacgtatctgctcatgatcgcgttgaccgtcgccaacgtgaagattcccgattggatcgcctctatgacccagccgttgagcggtgccaacgcgctggtgtcgatgctgatggtgggcatgctcatggatttgccccagtccaagcatgatgtgaaggaagtcatggacgtcatcgcttggcgtataccgttcagtgtcgccttcgcgttgatctcgtggttcatgctgccgttctcggcttcgattcgcgccgtgatggtgatctgcgcgttggctccaatcgccattttctccacgctgttcaccgacaaagtactcggcaacgccaaactggccggcttctcgctggcaatcaccgcgatgatttcactggtgatgatggcatttgctcacgtgctgatgggcgtgtgagcaaatgcgcgagtaggcacacgacgggcgcacggcgggcacacggtcaggcgagacgcagcccacataggttcgtccccccccgaccgccagttgctaccggtgcagcagcttgtgcgccagattgctcacgccgaagcggaacttgtccaccggcaacgtgaatttgcctactatctgctcgacgtagccgttgaagccctgcttgaattccagcacgccgcggccctcgtcgttcggatcgtcgaacacgccggaaatgccgtagaagttgtagcggggcacgcccttctccacacacagatgcagcatcgcttcgtactgaatcagcgccgaggcgtagaacggcttatactcctccaacgaaccggaatactgatagaccacctcattggggtgactgacgaacattgaaaccgctgccggcagcacatcgcccttcttggcatatccctccacctcagccagacgcttgtcggcggccgcgagattgcgcgattcctcccccagctgacgttcgatgcgcgtggtcggacgttcatcgtatttcgcctgcaatcgagctaccttggcctgcagcgcctcgcgcttggcggtcatatccgccacatattcggcgatgtggatttccgcgagcatgaaatgcgcatccgcgccatacgcctgcttgaactggcggaaatagtccgcgccgcgcgtcgcgaacccgcggcgttcaccggtccgccgttcgatatcggcgaacacgtcgaactcgtcggggccgatttcgcgaacgtgcacgcccatcgcctgcgcccgcttgacgctccattgagcgcgtttgccgaatgatgccagcagttccttgccgttggtgatgccggtgagatccttgacgtacatccactggcagaccacgtcataaccggtatggaatccgccatgcgtccagccggcatcggtgaatccggtcagcagtgcatcgttcggctcgccgtcgggctgcccgtccgaggaatacagacggtaggcgacgttaggccagcatgccacggaaacagcatggtggcgacgggccgattcacgaatcgcctcggttatggcccgcagcagagccggatcatcgctaatgccgatggggccgaaatatacggagccatctgcaccgaaacgaccattgaggtacagaatcacgcagccggctaccagattgccggatgcgtcgcacacgccaacgcattcggcttcatgcccacgaatcttggcaagacggacctgcccggaccattgctgaaagctgccctggcttgtggcttcggaaagccggtcgaactcttcgggcgtaatcacgccaaacgtatacgtcgtatctgttcgattcgcagtcgcgctcatctcgtcgtcacctgtgccttatttctgtgtccgtgctcgccactgtttgtcagcgatgcagcagcttgtgtgcggcttcggatacaccgaagcgcagtccgtccgccggcagcgtgaacttgcccggaagctcttccacgaatccgccgaagcgagtcttgaactgccagacgccgtaggaaggatcgttggcgtcgaaaatgccggaaatgccgtagaagttgaagcgctccacgccacgggcgatgcagtcaagcatcgcctcgaagtggattagggaagacgggtagtaatccatgaaacgatcgtcctcgccgctggacaggcagacgacctcgttcggatgccagaagtagacaccggcttccaccggaatgaccgggccgtccgaggcgatgatgccattgacttcgccgatggtcttttccagcgccgtgatcttcttgtctgcggtggcgatgcgcttttccagcgttgccgggtcggaggcacccttcttggccgtgccttccggccgctgttgcgcgcgctggagcaggcgttcgaggttgcgcttgtctttggaggccgcattcagcttggattgcagggtgtccagatattcgtcgaaatgggtttcgaccaccttgaactcgatcaggtcgccgaaggtatcgaacagacgctcatagtaggccagatcgcggctcttgaagccttgacgtgcggcgctcatatcgcacagcttgacgaaagtgctcaattcgccgcgttccagccggcgcacgcgcagaccggaatcctgggcgatgcggatgttcttacggcggtacttggagaacgaggccagcagttccttctcattatgaatgccgtcaagccccttgacgaagttccagcggtttaccacggattcgtagcccacggtgaagccgccatgtttccaaccgaagcgggccatgttgtccatcatcgtggtgtccgggtcgctggtcggcttgccgtccagatcatgcagacggtagactgcggccggccagcaggatacgctgatggcgtgatgggccttggccgaacgacgcagggcttcggtcatcgcctcaaccacctgtggattgtcataatcgcacagcggtccgcaccagaccgagccttccaaaccgaaacgggactgcgtgtacaccacgtagcaggcggcaatcagcttgtcaccgcgcttgacacccacatagtccaccggaccgttgaacgcacccatggcggccatctgcgaggtctgctggaaactaccttgcacttgagctgcggagaacgcatccagctcggcaggagtgatcttggtaggggtgagtgaggcgacgcctgcatcggattgcgtcataatcgaaccttcttacttgtcgttactctgatcgttactctgggctctggaacggcctgtgtgctgcgtccgtttaccgcgacagcagcttgtgcgcaaattgcttcatggcataggcgaccggtttgaccggcagtacgaactcgcccggaagttcctcgacatatccgttgaagccctgcttgaactccagtacaccacgaccctcgtcatcgggatcatcaaagacgccgtcgatgccgtagaagttgtagcgagacagcccgtgttccacgcagaaatgcagcatcgcgtcatgctgaatcagcgcggaggcgtagaagggcttgtactgctcgacgctaccggagaacaggtagatgacctcgcgcggatgctccacgaatagtgatgccgcagccggcagcacatccccgtctttggcgaactcggccgcctcgttcaggcgcttttcggctgccgccagattgcgggtctcctcccccagctgacgttcggttttggtggtggggtgttcggcgtttttggcggtcaatgccgccaccttggccgaaagtgcttcacgcttggccgtcatgtccgctacatattcgtcgatgtggatctcggcaaccataaaatgcgccttgttgccaaacgcttccttgaaacggtggaaatatgcttcgccacggtattcgaagctacgacgttcggcggtttgctgctcgattcgtgcgaatacccccaactcgtcgtccgacagctcacgcacatgcacacccatcgattgggcacgcttcacgctccactgggtgcgcttgtcataggacttcagcagacttttctcatcggtaatgccggtcagatccttgaggtagcgccaacgtggaaccgccgtgtagcccacggtgaaaccgccatgagtgaagccgatcgcctcgagccgttctatcagcttattgtcgggagcgccgttctggtcatccggcaaagaagctccattggtgtcgcgaagccgatacggggattcaggggtgatttccagctgtgaagcaccctttgccttggcatggcgtttcagcgcatccatgaagaaggtcaatgcttcggtgtcgtgatagtcgcacatcgggccatcatggatggccgcaaatgtagagaatcgagagcggtgagtttcgaacagcgccgccgcgacgatcttctcgccctccttgagggccagatattcgacgtcgatcccctgcgcggcgcgaaggcgtcccatcgccgaggtctgttggaaattgccttgtggatgcctggcggagaaatcatcgaactcttcgtctgtcaacttcaccagcacaaaatcacgcatgcttccctctgcctccgagtcaatcaggctcaccatgctagcataacgcgcacacgacgaatggggtccgagcagatgaggtgtgcacatcgttcgcactattgcctccacaatggctcaaagaacaatggcccgaagatgctgaacgtccggcttgcgttgaatcaaacgcagtgctatattctctacttggctcttggagccacgccaccttagctcagtggtagagcatccccctcgttcgtgggaaggtcggtagttcgattctatcgggtggctcttgttcatcaagaaggccggcgcactaagcgccggccttctttcgtatcgcccttgctaggtcataggcgcttgctagacacttgcccgattcgggaggggctgagttgctgagccgcgactcaactgtggcttagtcgcggctcagtgcagttagacagcctagacgacttagtgcagcagcgcctcgatagcggggaccaaggctttcagcgccttgcctcggtgggaaatcgcattcttctcggccggagtcatttcggcgctggtcagcggctcgccttcatggtcaggctcagtgctgacgcgaccggcaggctggtcgtccgggacgaacagcggatcgtaaccgaaaccgtgttcgccacgagcctcgcggatgatacgacctggcatgtcgccgagttccactgtctccgacttgatggcgtaccgggcatgcaccggggcagggctcccatctgcagccgtggtgtaaacggtgatgccgtcggcagccactccaccggtcacgtcggcactggcctcggtgtccgggaccaccagcgcggcggcgcagcggaagcgcgcggtacgcttgtcatccggaatatcttcgatttgggcgagcagcagcgcattattggccttgtcgtggccgtgagcacccgcccagcgagcagacagaatgcccggagcgttacccatcacatcgacgatgagacctgaatcatccgctacagcgggcagaccggtacggatggccacggcgcgggccttgagcagcgcgttctcctggaaggtgacgccggtttccaccgggtccggcaggtgaaggctgccagcggacaccagttcgatgttttcggcatccgcgccaagatcctcttcgagaatgcggcggatttccacaagcttgccttcgttatgggttgcgacgacgatttgcatgggttctcctttaagaaggctccccttgtcaggggagctggacattgcagaccgtacggcttccagccgacaacctcccctaaaggaaggggagctggcttagtctagggacaaagcggcacgctgggcggcttgcagttccttgttgcccttttcggccaagtcaagcagggtgccgagttcggcacggttgaacggacggtgttctgcggtgccctgaatctcgatgaaggtgccggaaccggtcatggccacgttcatgtcggtcatggcctgactgtcttcaatgtatggcaggtcaagcatcggggtgccgttgatcacgcccaccgatacggcggacacatagtccttaagcacgcggctggcggacttgatatggcggtgcttctccgcccaattgactgcgtcgaccaaagccacgtacgcaccggttacggaagccgtgcgagtgccgccatcggcctgaagcacatcgcagtcaagctgaatctgattttcgccgagcgccttcatatcgatgacgccacgcaggcagcggccaatcagtcggctgatttcgtgggtacggccaccgattttgccacgtacggattcacggtcggtgcgttcggcggtggcacgcggcagcatcgagtattcggcggtgacccagccgaggccggagtccttgcgccaacgcggcacaccaggggtaaaagtggcggtgcacatcacgcgcgtgttaccgcattcgatgagcacggagccttcgggggcgtcggtgaagtggcgggtgatgcgcacggggcgcagctcgtcgaccttgcggccgtcggcacgaattatttggtgattgccaagcatgtctttgatttcaaccatgcgccccagcatacgccatccgctctatgcctggatagcaactcgtcaaccatcatcaaaccccagcgcaatgtcattccctgcttacatatccattccatgacacttggctgcacgccactattttcttatgcaccactcgcttacagagtcaatgcctgcgtacctgatgaggattgggaaagatcgtccgctggaataagaatgccatattccatgaaatcttggttgaattgcttgcgctgcatagcgttgagttcgtaatcgattaacggcaaatatgtatagtccatgtcatgcaacggctcttcatatcgatgaagcacgtgcataattgccgcgctcggcagtggggaccaccatccatccaagccataccggtacggaggaaccaatgtcaagcgtctgttccttgggttgatatcccaacgcagaaaacggtataaaccagcgagaaacgcaatccagcacgcatcgttcacccgtgcaaccgctcggacgaacgatatacgttgatgttggacattccgagcatgaatcagattgacgcagagcatcttcaacgtagaccaggtcgctccgctttctattgcatcgaaatcaggaggcctacgcagttgcgccaacaacatgtgcaattcgtcttccggaatcgtttgcgagggggccacggcttctaggtgaagaccaaaaccagcccgctcaagcccctcggccaaaacatcaaacaacatacctctttgcccacgcaatacgcgaccaattgcagaccgatccaaaccagtacgctgtgcaagctcataggcattccaaccagtctgcgacatcacttcattcagcacagccgcacacgaattaacagggcaaccagataccacaccgtgatgcacgacatcgcactgttctaacgctcgatgctctacagcgcgccgctctgatacgtcatcgttgcccgccgcgttctcatcattgagagtttcactcatcgaagtcaccttgcctcggccgatttcccagtcatttcatcaaaccgcaatcatcatatcccacaatcccatgacgatacgattcgtcatatcccacaattcagagacggtatgattcgtatcgcatcagttcacacgattcttcaacgattgctccgcaaacgattgctctgcacgcatcacggcattctatcggcacactattcctcccaatcagcccaacgcaacatcacacgcaacatcacacgcaacacccctcacgcaacacccctcacgcaacacccctcacgcaacacccctcacgcaacactgcgccatctctgtaacatcaccgacaacacggcaatcccacaacgtctcggtgcaatatcctctgaaatggtttggtttttcactccacctcgtcggcatcctgaccaggataggaatatgtgtcgttccgcaccatgtacaaaacgttgtcaactgacaacgctcttcaaatcaattggataagacaaatggccatttcccgccaattcatctgaatcaagacgttgtcaactgacaacaaaatgtacattgcaacagcatgcacatatacatatttccccggtgaacagtacccccccccaaaaaaacaaggggggccaccctcagctggaaccacgtccggcgaaccgggacgcagttcagcccgaggggacgcggccaatacagccccgggacacagccacagggggtgcaaacacgggggtgcgaccggggttggatctccccgcctcggcggcgaccacaggagtgcggccaacacagacagagggacacagacagcgggaagagtagccaatgtaaccaaagggatgcggccagtgagatacggtcagagaacctgagtctccgtaggaatcactggctcgcccttcatgaggctctgcgcggtgatgggcagttcggacaacgccttggtgtggtagtcgtgggcggccatgatggcgtcatggccctgccactgagcgtcgatctgcccatgatccacaaagtcgaccagcaggttcttccacgtcggttcaggcgtgaaaccggccagcttctcctccgagccggaaatcacgtgttcggcttcggctaacgcgtattcgtaggagcggaatgccagtttgcgaccgggcactgtggccttgtccttggatttcttcatgaccggaaccatcgtgccgtcagcgccttcacgttcggtgagcttgtacaccatcgcacaagtgggagcgccggagccggtgaccagcatggtgcccacaccataggagtcgaccggcgcggtctgcaatgcggcgagcgcgtactcatccaaatcgttggtcacggtaatggtggtgttcgtggcgcccaaggcgtccagctggttgcgcacacgctgggccatggcggctaggtcgccggagtcgatgcgcacgccacccagttcgggaccggccacctcgacggcggttttcacggcttcctcgatgttgtaggtgtccaccagcagcgtggtgttcttgcccaatgcctcgatctgcgattcgaaggcgtcacgctcggaatcatgcaccaacgtgaagcaatgcgcggcggtgccaatggccttcagaccatacagctgggcggccagcagattggcggtacccttgaatccgcccactacggcggctcgagcggcggccacggcggcccactcgttagtgcggcgtccgcccatatccatgcaaggacgatccttggctgccgacgccatacgtgaggcggcggaggccactgcggaatcgtagttcagcacggatagaatcaacgtctccagtagcgtgcattcgccgaacgtgccttcgacctgcaaaatcggggagttcgggaagaacatctcaccttcgcggtaaccgcgaatcgtaccggagaagtggaagttctccagccacttaatggtctcggggcttaccacgtgacggtcggccaggaacttcaggtccgcttcgtccaagtggaaatgttccagcgcatccagaatgcggccggtgccggccaccacgccatagcgacggccttcgggcaggcgacgcgtgaacacctcgaacacgcatttgcggtcggcggtaccgtctttcagagcggcgtcgagcatcgtgtattcatacatgtcggtcatcagagccggcgaataatcgaccattgcaaggcctttcctacataagtggtgaagttgcacctaagtgtagtccgggcaaagccatacagcccactggcgaagcggtagactcgatgcatgagattcatcgtggcgttgtggcgctttgcgatcgccggtttctgcttcgtgggcacatatgaggcatggtccaaaccgcagttctgggtgtatttcacgttccagaccggtttcgtgctgggcatcgtgatgttgtgggccggcgcggccacactgctcaaaggcattcagccgcctgcatggcctaagggatgcctgactgtgtacgccatagtcaccgcactggtggcgttcttcctgatgcctccggacgacccggcatacgtgccacaggttattggcatcatgaccaatacgatgctgcacaaaatcgccccgattatggcggttatcgatttcgtgctattcgacccgcaccggcgtttccgctggcattacatgttctcgtggctggcgtacttccctgcatacttggtcttcgtgctggcccgtgcgacgatttggccggggtccggaccggcggccggcggcagtccgtatccgtacgacttcatcgacctcgacgcactcggctggcaagggttcggcattagctgcggcaagctggccatagcgttcttcgtgatatcgctcgttgtctggctgctcgaccgcgcactgccgagcaaggccttactcggatagacgcgcccacgatcgacgcacatcggtcttagtgcccagccggcatccagctcagcactcgatggcctcagcattcaatggaataggcgcggtttttgtactcgcgccaatccggccagtcttcaccggcgtagagggctgcatatggaactgcgtggccacctgacgaatggtgtaggacaccatgactccttactgcggcgacacgccgaagcgtcgcagccgtttgcattcaagttcacttgaactggaaccatagtatccaagaacacttacgaatgccactcaatcggcgtcggtttgcccatcgcaggtaagcattcgtaagaacaaaaatgacattgtaaggagattcaatgttcgagccaaccgccatctatgcccccaacccgcaccgttacgacacgatgacttacaaccacgccggcacctccggcctcaagctgccggccgtctcactcggcttctggcacaacttcggcgacatcacgccattcgaccagatgaagtccctggtcttcaccgccttcgacaacggcatcacccacttcgatctggccaacaactatggccccgaacccggccaggccgagaagaactgcggcctgctgctcgccaagtacttcaggcaccaccgcgacgaactcgtcatctccaccaaggccggctacgaaatgtgggccggcccctatggcgacctcggcagccgcaagtacctgctcgccagcctcgaccagtcgctcgaacgcctgggcctggattatgtggacatcttctaccatcaccacccggacccggaaaccccgcttgaggagacgatgggcgcgctggctcaggccgtgaactccggcaaggccctgtacgtgggtctgtccaactacgatggtccgacgatggagaaggccgccgcgattctcgccgacctgcacgtgccgttcatcatcaaccagaacaaatacaacatcctcgaccgcaccgtcgaggagaacggtctgaaggagaccgccttcaagctgggcaagggcctcatcaccttctgcccgctggcacagggcctgctgaccaaccgctatctcaacggcattccggccgacagccgcatggctcacgatccgcgattcctcaacgattccgccctgaccgagaaactgcacaagcaggtcgtggacctgaacaatctggccgccgaacgcggccagacgctggccgagatgagcctggcatggctgctgcacgatggtaaggtgacctccgtgctgaccggagcctccaagcctcagcagattctcgacaacatcggcgcgctgaagaacacccacttcagcgacgaggagctcaagctgatcgacgagatttcggctcgttagaaacgtcctggctcctttgtggttcgtgacccctgagtcggtgtattcaagaattattgacaggcttgacggtgccaacaatccaactgccacatgtcaatgtgggtctaacagggcattccgaaaagcactgtctggattaacgcttgtcatagttttgcagtactagcgcaacgcacattgtcatacgctagcgtttgctgcgatgtttgggctttcgcttgcggtaggcgcgtccggagttgtgcgcgccggtcgattcgcgggcggtacgcacgcgcacgagcacggttacgagcgccaccagtatggcgacaaccagcagcgcgacgatgatcgtggtgaacaccatggtggtcggatcatcgtattgcgtgttgtccggcgtggtcgggttcgggatgcgatgcccgcgcaccagcagtcgatgcgagttcacaccgtagggcgtgcaggttatgagcgtggcgaagtccattgaggtgctgatgttcaatgcgctcaggtcatccggcagcactactttgatctgatcgacctggtacgtgtaggtgtcgtcgagcacgtggaacgcgaaggtgtcgccctttttcagctcgtccaagccggtgaatagtcgcgcggacggcaggccggtatggccggagatcaccgcgtgcgtggtcggcccgccgaccggcagtgaggtgcctgccaaatgcccggtggcgacctgcagcacgccttcatcggtgccgtggtagatcggcagtttcactttgatgcggggaatggtcacgtagcccatgatgccggtgccggtgatgtcgagcgtgttcttgtactgctctttctgtgtggcgttcatatgccagcggtcgctggtggcggcgagtttgaggttgtaggcgtgcgcggcgtcgaggagtttcttcttctcggctttggacatgtctttggttttggccacgtacccggcgacagcgtatgactggtgcattcggttccaccagtcggccacggacgggtaggcgatgaggccgaggccgccgatcagcaccacgactaggaacccgatgatgaggttcaggccgagattgtcttttttgcgttttttgcgcaggtcgacgcgggtcatcgtttccgatgactgggatgcggaatcagattgcccggattggctggacgggtctgccgtgtcagtctgatctgcttcgttggcctggtctgccgtatcggtcaccgcgtcggtgggcgcatccgcagccgtgttttcggtggctgtgttttcggtgtctgggacttcagcggatgcgacgttttcggcgtcgctatccgctgtttgacgttcgtgctgacggttgccggcacgttttccgtgtgtttcgaacatcactcgctatcgtccgaggaaggctgttccgtggaggcctgctccgaaacctgttccaagggctgttccgtggagttctgctccacgtcgtcttccgaagtgttcttcttgcgcacgattacggcgattgcgatgccggcggcggccagtacgactacgatcacggcgatgatggcaacgctcgcaccggttttcgccgattcggtcttggcggtgttggttaccgtgtaatcgttgttttcacggtcgacgagcgcggtgtagttgcccggcacgttcgcttcgaccacggtgtattcgtgcttggtttgcaagtccttccacgtgtatttccagtcgttggcgttgttgagcatgatggaatcgtagatcttgccgtcttgcagcaggttcattgtcacgctttcggggcgcttggactgatccttgtctttccacaccttgttcacgctgatggtggtggtgggcggcactgcgcagtcggctttcggttcgatgctgagggcgcgctggtcgtcgacattcttgtgcacgttcggcagggcgacgagcatggcggcggtctggcaggtgagcacgttgccctggtaaggggcgacgaccgcgaggtagaggccgtccttcagttggttaaaggtggcaacgccggcgctatcggttttgagggtgctttccgcggtgggcttgttcactgcgatgtatccggccatggtgttggcgaaatcgcgcagggtctgctggtcggcgttgagaatatcccagtcgaccgggtatttgccgtgatcggcgaagtcgcctgcgggagtgtagccgcctttggcggaccagtcggccagacggtacaggctgatgtcggcgttgttgagcgcggctttctggtattggtaggtgacggtgaggctgccttccgcagtggtgccggatgccgtggcggcggtggcggcgggtgcgctcaagccgatggttgcgagcatgagtgcgaacatgcagcacaacgccatgatgatgcggtgttttgccgttctgttgttcatctctgccctctcgttgtggcttgtcatttctttcccctcgtcggaagttccctagttttcctggtcagggtccttaggatgcggacagctggcaaccgtgttcggcgcgtttgctggccattcgtaacataaggacaagttcagggcacacggctcaacatatgttgtgttgggcgacgtggttgggcacaacgtgcgctgtgatgccttgataggcgggtacaacgtgtgttgtgtgtagtttggtgcggttgggcactgacggccggatccggtgcgtagccggatccgggtcatgtgcatgttaagttattttggctttgccgtggggtggaatcaagcggatgccgcaatagcaggcccaaatcttcacccattgaacgaccactattgaagcatcgcgcttgacccacgtctattttcttggctggccgtggctacgctcagcgagcgttgcgacgacggacagcgaaggcgatgccgaaggcagccaccaggacgatggcagcgccagcaacatacagaatcgtggtgcccatgccgccggtggacgggaggaaggagcccttcttgttcacgacgtcggcctgaacggtaccattcgtcttatcaccgtcagtctgattaatcttcaaagaagtcagcttcggatcgtcagacgaaacatcatgctcagcggtcacagtgaacagcgtgtcggcagccgtgttatagccggccggagtataagattccacgagcttgtagtcgccatcatcaatacgcgggaaggaggcaatgtacttattatcagaggtcttagccacttcaatttccgaaccgacctgtacataaccgttattttcggaaacaccatgggtcttcttgtacagcttgaacttcggcagatcgttatcagccggagtcccctgatcgaaggtcttgttgacattgagctggtaggtgaagacaatgactttatccttcggagtctcgccggtcggagaattcgcgcctgtaccagtgtagttcgggttgttggagtactggagcttcgcctcgttcgggttgccggtggaaccaatcacagccttatcgttcagcgtggaagtgtattcaacaataaacttgccgcctgcagcgacagtaacatcagctttgttggaatccttaagagcaaggctcttgacatcattaatagtaatggtaaaagaaccgtctgccttttccgtggcctgagtcactaccttggtatatgcgctgctatcaagagtcgcggtctttgtcccatccttcgaaacgtacttaacggtgaaggaagagacagaggatcccgcattctcatcatcataagttagacctttagactggttatcagtaaagaccagcttataggtcttgtacgccgcgaaatctttggtatccgtcggcagagttgcagtcaattggaacggaacatggtcgttcacatcgtaatcggcggaatcctgccaatcagtcgtcgttccatcagtatcattcttgtccttgaccttcttctggaaggtcggcttatcggccttacgggtgatggtcactgcctggttaccgacaacctgaacgatgtacagagtagctgcatcattaccggttacatttttctggtccttggcgaggtaatagccagccggaacgttgctcagcggcttgccggccgatactgtaccgtacgcaattttagtcatatcaatgaactttttgatagtttcaagcttcgtcgaatcggaagcattgctatcaagtccagccacagtctcggcagctttagcggctgtcaggtcagcaccatcagtaccggctgcgttcttggccttgaagttctggccagctgtaacgttgccaagagaaccatccgtaccgtacgtacctgtgaaaatctggtagacggaataggtgtgggtatctccgtcagcgactttgataccaccagttggatctgccgccatggcggtggaggcgccggcgaaaccggcgacggccatcgctacggtggctgccacagctacgaggcctttgagaaccttgttcattgttctccctttctttcttgttttgttaaaacttgggttgttcatattcagttattgcctagagggcagcgagttcgctacgttatgggccggtcccccttctcctagacgtttccatcattgccgcctcctgaggctcaaggccagaccggccgcggcaatcgccactgcgaggaatcccgcagtgtacatcttgttcagcccttcgccgcccgtgccaggcaggacaacgccaggggtgttggtaatagatccaccgtcaacggtgaatgccgtattcgcgtcgtatacgccggtggcgttcgcgttgaaaccgctggacgtgtaccattcaccggtcacatcggagccttcggcgggaccaatgcggaacgtgtgcggcgtgctgtccagatcgtatccgtcaggagccttggtttcgacaagctggtactcaccccatgccagtccctgaagcttgaaccggccggcctcaccatcgatgtccgcataggcattggcggaagcggcgcactgcgttgcggaagagtccacgcaatccttgatggttgcgagttcattgttcgcgtccgtgtacgaggccttgccgctcacccaggagaagctcttcgtccgggtcagcttccattcggaaccgtccaacagcttggtgccatcagtcttatcgaccttgttccacgtgaccatgccggtcttgcgggtgttcggcagcttgttgccggccttggcgggatcccacgtagcctgaccgttcttgatggtgatcttgtactcgccgccgacatcgaagccgttcggctcgccggtttctttcagaacgtagtagccgtccgcaagattgctgatgcggaacgcacccggatcggtgtcttcatccttcaactcatcctgagcggcgttggccgcacgactggttccactcgcctgcgtggcagtcttcgcagccttgcgaaccgccttagtggacttggccgaccgcgtgctggcggacacggcgcaaccgttcggagcggtggtgctgtagctagggcctgcggaaatggtcacgttctcagggagtgtggttccactggtgaacttgaagttgccgtcgctcttcggaacattcgcattgcccgggccgtaccaatcactaccgtccagatgctggaagccgaactggctgtccacgctgatcttgtccataggaatccgcgcatacgcatactggccgcaggaaccgctcatctgagtcatcttctgatcggtccaagtgccactgttcaagcggtagtgcacctgcacgtcgttggcgtaccactttccctgattattcgaatcaaagtacaggatgagatacttctgcgccgatgtcacggtaatttcagcggaagcagatgcgccatccgcggtgcttgccgtaatggtggcagtaccagcggaaacaccggtcaccaaaccgttctggccaaccttggcgaccagttcattattggacgaccaagtcacattctgctgggggttgacggtcgacgtaagctgcgtggtcttaccttcaaccaccgtcgcagcgctgggggaaaccgtcaccttggctgcggtggcaccggtcaccttgaacttcacggacgagcagacaccggcatttgatgtcgagcatgccgtaatagtgacgtaatcattgccgctgttggacttcggtgtcacgatgccactaccggcgtcaacagtggcatagtaatcgttcgacgaggtccacaccacgccggacggagccccgctcggagtgacggtggcggacagcgtgaatacgttgttgaccgccttattacccagatcctggccatcggtgtatgccgcgccatccgaaccgacaatgctgacgcctgtcaccgcgaccgtggtgtcatgaatgctcttcggccaaccagattcaacatccgcacgctcctcatcggtgtacttggtcaggttccacatggacccggcaagccttgtatccgtatcgtcggaatcgaccttggaccattcgagggaagcacccctcttcttgttgacgatcttgccattcatcagaagcttcaccgaagcatcagtcacttcgttaccttgcttgctatagacggcggtgacggttgcggatgaagtgtcttcgttaccagtattgatttgatagatgttttcgttcagctcataatcatagctgccggtcgacgtttccttgatgtaatacgtggcattgggagcaagaccagcaagcgagaacttgccatcatcctcatcgccatcgttccaaccgttatcggtgatggtggtaagcggggtagccgcagtaacagcattgtcttccttaccgtacaccgaccaggtggtgccacccaacaccttgccatcagcgtcgaccttggaccactgaatcgtggaacaggaggatgtcagctgaccgttccagggaaggttgtggcgttcttgatccatatcgatcacggaggaggtcgcgccttcgcccatatccacgccgatgttgttcgggttgtacatggagaagtcgccgccgacatacacacgaccattggtggttacgtggctttcgaagctgccgttcagcaccataatgctgccgagcatggctgcggcggggtcatcccgggaggtcaggatcttggtggaatccgtcgggtaaccccgcttatgataatccccgttaagtgcttgcccgcccttgatagtgagcttgggagtttcggcgaagttccacatgatcttctgcgcggccttgctgtatgagtctcgcatctctttggtgactgcaccattcacgtcagtcgtcacataaccgttggagatttcctgaccgttccaccagaagcgccaaccattattgaacgtgatcggattttgaccctcgacattgataaccactgatgccgtatcagagatgttcgtaaaggcgaaagagataccactgtagccttcagaatccaacattgaggcattaacatcgaacacctcaagggatgggttctgcgtaccagtgaaggtaatcagcttttccttctgctggtttgcgtcaggagcgccctcaacgaagttgaaatcatacttcgtattctctccatagccgggaacgccgtagcggtagtggtaacgcgaataggtgccagcagacgcagtgcctgcagtaaccgttccagtcgccttgaccttcaggagtttgctggacacaccctggacgttttccgtgaggaacttcgaataatccttggtttcaccattaacactgacgctgcccagtgaaacactgtcattataagtgacgttgcccgtgtcctctgcgctcttgcctgcgtcataaacggatcgagaatagttttggccgttaaggttattgatggcgatactgctattgcccttaatcttggctttgtagtactggctctccgtatcaacattcacgaaaccacgcgcggtgctgccattcacccaaccaccgagagcggatacgtcttgaacaccgttatagttgttatctttcatcgtcagcgtgctattgccgccgacgaccaacacatcgctaccgcttttcggacggtactgaccaccgaagccgaccacgccaaaacggaagcccctgctactccagctttgcttcgcggagttgatggcgagcttgccgttgacaagcgtcaggccttcggcttccacggcatatgatttatcaggcccctgatttttattcagttcggaatagtttcctgtgttggcgcccacgtacatattgccgccaacataagtggccacaccggaatcgaccgtggatttacttgtatcgtcccccaaatcaatggtctgaggcgtgcaaaggctgccatcgggcttgcctgaatccgcattggcactggtgggggggggcaggacgaaggagatggcggccgtggccatcatgccgacggcgacgagggttgcggtgagtgcacgggccggttttatccctcgtttcagcgctacgtgcttcagccgttccacctgatgcctcatcgtttcatgctcctcaaatagctctatgtactgaatgtcatcatccccgttctcaccccttcggcggtgaactttccgcgtcattggggaacgtcgacttcagttatccacaaacctaaatacgagattatggctttcgtttgcattgagcaaatcggcgctcgtgaaattttcatcgccgtttcgcctgattgaacgccgcgtttcatcacacactgagcacatgccacagaagtacgtatttcgctgtaattccaccgtttcttagccatcatcacacacggtttcagcacttgctcaacatatgttgacaaaaaaattattaaactatgtgatttcctttgcctaatttctgctgccatccttgacacgcaggttccaaatgaccacttttttagcatccgctgccatcaatgtgaaaacgttttctgactcggtaaccatgccccttccgcgtcaacagaatggggccgtcgaagctcggcagcttcatcagcttgcacacggccacatacagcacgatggacacgactatgccattgaccggaccaaggaagaatgggtggtcaaggaatgcaagtgccggcaccgaagcaaatgtgccaccggtaatcagagccacgatcgatcccacgatgaacgaaaccagaccaggcacggagaacccgtcaagtggcttgaagttttgcggacgggccttgcgaacaaaccagtaatccgcgatcatcgagcccgcgagcgctggaatcatcgcggaaagtacggtcaggaacatctggaagtagtccatgatgccagccacggcaaggataatgccaagaatgccagcgatggtggtggaaacgcgatagcccttatctcccttgtctgcgatgacggcgaaagcgagtcctgcagagtaggcgttgcccacgttgacggaccacgtggatagcacaagagcgatcaaagcggctccggcaagacccatggatgccatgatctgggaaatatcgccgcccgattcgggcttgacgacggagagcatcgcacccatcataagcaggatgaccatgggtggccagatgccgatgatgctggacagcactgcaccttttcgatcacgcgtgtaacgggtgaagtcgcccacagtggcgccgccgacggcgaagaagcccacggcaatattgataccggctaccagccccatgctttccttgggcacgtaggaggtcaacgtgcccatgcccgtattggacagggaggcaaacaggccataggcgcaaatgatgaacagcaaaggagccgcgatgtagttgacccacttgacgccgtcgaaaccgaggatagcggtgacgagcatcagcgcgcccagcacgatagagcagatttgcggcgaaacgtctagcccgagcttgccgaccatcagggagaatgaggatccgcagactgccgcctgcacaccgaaccatccgatcagtgagacacccaggatgattgagatgatgtagcgtccgcccttgcgccccaaggctgcagtggacatggcggaggtgggaaggccggtgtcggttgcttccatggccacgaaacacatgtaggcgagaatgatgccaaaaccgatgaatgcggcccagaatgcatcccacaaggtcagtcctgcgccgagtaccgcaccggtcatcagggtggacacgttgatggaattaccgatccagacgcaggcgatggacaaccatccgcgcctgccgctatccggaatatgaaggctgtctgattcgaaagccggctcctgtgccggcgcgacggccgttgtctgtgtcatggttatggcacactccttgaactactgatatatctacggtttttatacgagacgagggccggatcatcgtcctcctcttttgatgggaaaaacaatgatccggtcccgacacttcacatcagggtctcgaacttgccgaggaagtcagtgaacgaaagaatgttcgccatgctttcgccgaacaccgagttctgcacgccgaaccatccaaccatggaaatggccatcacgccgccgaagatggcggaacccattttgccgaatccggtccaacgggacagcagactggtggacaggccttcacgcgccgccgcagtacccagcgcccagctaatcacctgcaatagcactgatccgagcattgtcgctcagaacgcgccccagaaactcatgccgtagccgagggatgcaccgagcaccagctgaaagacacagcatatgctgccgatacggattaccagaatcctccagaacggctgcttggcctcggccggaacacgagacagggtgtagccgctgtcctgaatgggctcattctgtgtctgggatatcttgcttgcggaatcctcattgccggcaacttgcgtttgtgaagacgccatatgccactccttttcgagaagacaacaaatatggcgctattgctacccccgtggccaacgtgttacgaaagtatgaagagagtacttataacggctgatcatcggtgatcaaaaaccgcagaaaatagcgaatcctttggtcacatcgtgattccgacagcgaaaatccacataatggacatatccatatacggcagctgaaacacaaaccatcattttcccgcttgtgaatatgtaacactagcgcaacctcagtgtcacatattcgggaaatccagtggacccgcgcccgctactcccctcagtcgtctacgacgacagctcccctcagagaggggagccaagcaataacccgcagcagctcagcgcgtcatttcctcgtagatgcgcttgcagtcagggcagacggggtatttggacggatcgtgcttgggcacccagaccttgccgcacagcgcaaccaccggacggccggtcgcgcgggattccgcgatacggtccttggacacatagtgtgcaaagcggtcggcgtcgccgccatcgtcgcgcaccggcgactccttggtctccggacgttccagcacggaggttccggcaccctggtcggggttgcgcagcggttcggcgtcattggagaacagatcagcaaaagtcatagtgcacttctttcctcgtactgtacgattcaactgcatcccatcatagattcccatcgcaaaccgcgaaaccctccgcatgtaacatgtggccgcacgaagcgcaccattgcacaccattcgcggtaggctataaggcatgactatcgcagtatgccccggctcgtatgaccccgttaccgccggacacttggatgtaatcgagcgctcggcgcggtttttcgacgaggtgcatgtggtggtggccgtcaacgccgcgaaaacaccgatgttttccgaagccaccagagtcgacgtgatccgccgtgcccttgacaaagccggttgcaagaacgtcactgtttcttccaccgacggcctgatcaccgactactgcaagaaggtcggcgccaccgttatcgtcaagggtctgcgccagaacggcgactatgaagccgagctcggcatggcgctggtcaatcgcaagctcgccggcatcgaaaccctgtttttgccggccgatccgattcttgaacacatctccagttccatcgtcaaggacgtggcccgccatggaggcgacgtgaccggcatggtgcccgattgtgtcgtgccgatgctggccgatgccctggccgaggaacgtcagcggaaggactgatgcactaatgactatgagcgatgaccaccccactggatacgtcgatctgaccaaaccgaatgcggacgccgcatcgtccactccggagccgtccgccccggaaccgcccgcgtctacgcaagccgcgccggcacccaccgaagaggccgatgttctcgccggatcgccgcccgccgcgcctacccctactccggcacagatgcaggccaaagcgcaggcccaagcagctcagcagacccgggcacaagctcagaccgctcaggccgccggcactcgcccctcgttcatgaacgaaatgcccgacctgcgagaaaccacggacgacgacccggccacggtcaagagccgcgaggaattcaccacggtgtatgacatcatcgaccagctcgaggcggcactgggcgaagcgaagtccagcatattcgcccccggcatggtgaaggttgaccgcgacgaattcaccgaccagctttccgagttgaagaaaatgctgccggtgcagttggagcgcgcctccgccctcatgcgcgaggccgagcgccgtctggaatcggcacagacccagtccaacgccatcgtcgcctccgcacaaagccgcgcagccgacatgatcaaggacgccaacgaacaggcacagttcctggccggccaagagaacgtcaccgagcttgcacggcagaaagcgcgcgcgattcttgaccaggcacagaccagagccgaccatctgacccaaggcgcggaccagtactgcactacggtgatggaagggctgtcccagcagctcggcaaactcagtcgggatgtgcaggccggtcttaacgtgctggaagagcgccagcgtgcggccggcgaacagatgccgcacctgacgctgaacgactatcccgaagcccagtaacgccagcagcaccagcaacatcagtaacgcgaataacgccagtaacgaataactccagccaacatacgaaaggcaccaagaacataccatggcacgagttgaagattccccgtgggccattccggtagcgcagattgcttcgcgcgccggtcaatccaagccgattgacgccgatttcccggccccttccggcattggcgacagcatcgtcggcatcaaggatggtgagcccgtacatgtgagcgggcagttcgattcgattgtggacggcctgatcttcaccggccgcctggtcgcgccattcgtcagcgagtgcacgcgctgcctgaagccgattgacgaggactggccggttgatgtgacggtgttcttcccgtatgagtcgggtcaggacaaggccaacggcaagggcggcaagaacaagaaggacgacgagatcgacatcatcgccggcgaggacgagtcggaagacacgtatccgctgctggagaacggcgcattcgcggacatcgaggcgatgatccgcgacacgctggtcgaatcgctgccgttgcagccactgtgccgaccggattgcaagggcctgtgctcgcagtgcggtgccgatctgaacgaggatcccgaccatcatcacgatgtgacggatatccgttttgccggattggcggggctcaaagcccagctcgaggccgagcagaacggcgagcaggccgagtgacgcgcgcctgaacggagtttgtacgagccgtgcgttaagataacggacgcttaagctcaattgttcgaacgaaatagaggatactcaaatggcactgcctaagtacaagacctcgcgcgccaacacgcactcgcgtcgcgcgaactggaaggccaccgctgctgcgaccgtgaactgcccgaactgtggcgctccggccctgccgcacatggcttgcccgagctgcggtaactaccgcggccgcacctaccgctccgccatccagccggctcacaccaagtgagtcctgcgataacggcttgaatgaaggccctgccatcgacgggtggcggggtcttcgcataagtgcaccattacgtacaccatcgcatcgcaaacaacacaacacaacacaacacacaacacatcaccatcgcgtgaaggaccatacaacaatcatgagcaatgaaaccccacagcagccgacgccggccaacgagcttcttgaagcgttgggcaccactctcagcccggatctgctcgtgcaggcactcacccaccgctccttctcgcatgagcaccccggcgtggccaattacgaacgcctcgaattcctgggagacgcggtgctcgaactggtctccactgaaacgctgttcaccattcacccggatatgaccgaggggcaactggccaagatgcgcgccaaggccgtctccgaagacgcgctgagcgccatcgccaaaaccaagctcaaggtgggcccctacattctgctgggtcacggggaaaccgagcagggcggcgcggagaagaactccattctgtgcgacatcgtggaatcgctcatcggcgcgaccttcctggaacacggcatcgacgaggcacgcaaggtgattcaccggcttattgacgacacgctcgccgaagtggccaccgagggcccggcacttgactggaagacctcgctgaccgtcaaggcgcacggcctcggcaaggatgagccggtctaccatatggaggtctccggcccggagtacgcgcagatcttcaccgcgcgcgtctcattgggcgagaacggcgacatcatcggcatcggtaagggctccagcaagcgtaaggcgcagctggcggccgccgaagcgggctggaagtcactggactcgctcaagacgcggactaagtaagcccgctgtcagatttgcgaatagactgataccaacatgagcgacgagtcgtgccggggccacaagtctcggagaagcgactggaatcagacacgcgggcacccggccccatcccaaggtcgggcaggttcgcggcaaaatctatgaggtgagaggaatcatggctttacccacgcctttgcaggcattcagcggcgtgccgaaaatcaacgcggcccccgataagcagaccatcgtcgatggcgagaagatgactggcgcccaagcgctggtgcgttcgctggaggatctcggcgtcgaggacgtcttcggcattcctggcggcgcgattctgcccgtctaccacgagatcaaagacaacacgaagttccgcttcgtgcttatgcgccacgagcaggccgccggccacgccgccgaaggctacgcactggccactggcaaggtgggcgtgtgcatcgtgacttccggcccgggtgccacgaacgtggtcacggccattgcggacgcgaatatggactccgtgcccatggtcgtgattaccggtcaggtgggcgtgcaggccatcggcactgacgccttccaggaggcggatatcgtgggcatcacctacccggtgtccaagcactccttcctcgtgacccgcgcgcaggacattcctcgcgtgctttccgaggcgtactacatcgccaacaccggccgccccggcccggtggtcgtggatctgaccaagaccgcacagaccggcgacatgtactactcatggccgcagcgcatgattctgcccggctacaaccccaccaccaaggcgcacggccgtgtgctgtccgacgcggcgaagctgttctctcagtcgtaccgcccggtgctgtatgtgggtggcggcgccgcccgctccaacgccggcgcacaggtcaaggctctggccgacctgaccggcgcccccgtggtcacgaccctgcccgcacgcggcatcattcccgactccgacccgaagaacctcggcatgctgggcatgcacggtacgattgccgcaaccggtgccgtgcagcgcgctgacctgcttgtggccatcggtgcacgtttcgacgaccgcgtgaccggcaagctcgacgccttcgcaccgaccgcccgcgtgattcatattgacatcgacccggctgaaatcggcaagaaccgtcagcccgacgtgccgatcgtgggcgatgcggctaccgtgctcgacgacttgattcccgaaatccagcgcacgcaggccattcagggcaagccgaatctggccccctggtggaaggcgatcgacggctggcgcgaggaatacccgatgacgtgggatgagccgaccgacggatcaatggccccgcagtgggtcatcaaaaagctctctgagatggccgatccgtccaccatctgggtgaccggtgtgggacagcaccagatgtgggcttcgcagttcatcgatttcgagaaccagcacgcttggatctcctccggaggcctcggcacgatgggctacggtctgccagccgccatcggcgcatccgtgggctcggcccgcgagttcgagggcaagaagccggtgtggctgatcgatggtgacggttccttccagatgacctctgaggagctggccgccgcgttcctggaccacgctccggtgaagatcgcgattctgaacaactccgtgtacggcatggtccgtcagtggcagacgctgttctacgagcaccactactcgcagaccaacctgctcgatggcgaggcgcacggtgccgatggtgcggcggcactggtcgacggcgatgcgccgctcgaagtgcctgatttcatcaagttggccgaggcatacggctgcgtgggtatccgcgcgttcaccgaggaagaggcgattgccgccatcgaaaaggcgaaccagatcaacgaccgcccggtactgattgatttccgcgtgtggaaagatgcgatggtgtggccgatggtagccgccggcgcttccaacgacgaggtgacgtacaagcccggcatcaagccgctgaccggcggcaccccggctccgggaaccggtccggacgagcatgcgaccggcgtgttcgagcacgagaccgccgctgccgctgcgagcgagcactgaggagaggagaacactcatggctaactatcctgcatcccagcctggttcccagcgtcatacgctgtccgtgctggtggagaaccgcccaggcgtgctggcgcgtatcgccggcctgttcgcccgtcgtgcgttcaacatcaactcactgtccgtctcccccaccgagcgtccggacatctcacgcgtcacggtgaccgccgacgtggaggccgtgccactggagcagatcatcaagcagctcaacaagctgctgcacgtgctgaagatcgtggagctcgacccgaactccaccgtggaacgcgaactggtgctcatcaaggtggccgccgacgaatccaaccgttccgacgtgctggagatcgtgcgcctcttccgcgtgcgtgtggtggacgtgaatccggaatcgctgaccattgaggccaccggtgccgaaggtaagatcgatgcgctgctggggcttttggagcattacggtgtgattgagctggtgcgctccggtgccgtagccgtgacccgcggcccgcgcgccctgagcgaaaaggtcgtcggttccgaggttaccgggcgctgattcggcgactgcggggagacccagtccaagctcaaagggcggatgtgcatgatgcatatccgcctttttcatgcgtgcatacctcatcacccgtgctgcaagcaaaatgacagcaccttatgctagcattatgacagcaacaaggaggtgcatcatggcaacattgaccatccgaaaaatacccgatgagcagattcaacagctcaaagaagtggccgagaaaaacaaccgctccatggaatctcaggtgcgatccattcttgaagaatggctggccggcacggtggcgcatgaaatcacacgaaagaccaatttctacgacgagatccgcgaattcatgaagaacatggattttgagggactcgacaagggggaactcccactatccgagcgaaattccgccgattcccgaccgccagtatcttttgaataggaatcggccatgattattctggacaccaacgtcatcagcgaaatcatcaagaaacagccagacgaacacgttgccaattggctgaggaaccaagatacaagcaatctggcaaccaccgccatcaccgtcgccgagttgttggtcggaatatgtcgcatgcctgaaggcaaacgacgaaagtacacagatacgaccgtcaagctggcgcttatgacattagaggacaggacgttcgcatttgacacccaggcagctgcggattatgcccatatccttgtcgaacgcgaacgcaggggcacacctaccagtattcaagacgccatgattgcggcaattgcctgttcctgggatgcggccatagccacgcgcaatatcaaggacttcgaaggtaccgacgtggaattgattaatccgtgggagtttgcatagcggtaggccccggcaaactaccgaggccttgtgaacgttacggtttctcccgctactccaattgttcggagagttcgagccattcggcttcgagattatcgctttcagtattgacggcggtgagttgttcattgagcttgttgagaccctcgtagtcgctcgggtcatgggcggccatctgtgcctcaagttcggtcttccgctcttccagtttggcaagcttgcgctcgatggcattcacgcgcttggatgcctcgtggaaggccttgccggtgagcttcgaggtggagtcctcaccgttattggctccctctgacgagggagctgtccgcgaagcggactgagggagagatgcagcaacattgacggcggccgccttacccctaccagacttcgccgagctgctaccggtgcccgcgaagccaggcgtgtcagccggcaatcccttgccgttcttaatagcctcaaccatatcgaggtaatcctgcacaccaccgggcagatggcgtaccttgccgccaatcagcgcgaactgctgatcggtgacgcgctccagcaggtaccggtcgtgggatacgacgatcaacgtacccggccaagtatcgagcaaatcctccatgacggcgagcatatcagtgtccagatcgttgccgggctcgtccatgatgagcacgttcggctcgtcgagcaggatgagcagcaactgcatgcggcgcttctgtccgccggagaggtcgcgaatcggcgtcatcaactgggcggattcaaagccgagacgctccatcaactgtcccggcgttacttccttgccatccacaatgtagctcggcttatagcgggaaagcacttccttgatcttgtactggcccagtttctccagctcatcgaggcgctgcgagagtacggcgaacttcacggttttgccgatgttcacatggcccacggtcggagtaatcgaaccgtcaatcaacttcagcaatgtggacttgccggcaccgttcgcaccgacgatgccgaaacgatcgccggggccaatcagccaagtcacatcgtcaagaatctcgcggccggaaaccgtcaccttgcgtgcagccgaggtgacaccggctgcagcagtgccatcatccgaattcgttgcagcagtgtcaccgccgatggtttcaccacccgtgttcatgcgacgaacctcgcgatcgtcagcaagctgcggattgccgctctcagcctcggccttcttacgcgcttcctcagcggcctcgacggcttccggcacgccggcgtccaccaggcgcgggtcagtcaggtcggtgaccgccacctcaacggaaccgtgcagctgcggctcggcgtacatggcgttgaccacatccacgcgggaagcggacgcggagagcgccgccacatccgggtcgatatcggccatgccctgcggtttttcgaaaatctgcgtcacgtcgaccaaatcgaccacctgtttgccgaggcgtgaggtggccatttgcttcagttcaagtgtgttacgcatcggcggcacatcggcaatcaattcgcgtgcggccttgacgtggaacttctgcttggtggaacgggcacgggcaccgcgcgaaagccatgcgagctccttgcgggccagattgcggcgcttcgtttcacgcacatcagcctggcggtcgcgttcgacgcgctgcagcatatatgcggaatagccgccctcgaacggctcgatcacgccatcgtggacttcccacatcgattcgcagacctcgtccaagaaccagcgatcgtgggtcacgagcaacagagcgccctggcctttggaccagcggttcttcagatgttcggcgagccagtggatggtgaccacatcaaggtggttggtgggctcgtcaagcgcgagaatatcccaatccttgagcaggagccgggccaaatcggcgcggcgacgctggccgccggacaaggagccgaccttggcatccagactcatgccgccgagcaatgcctcgacgatttcacgggaggtgttgtcggacgcccattcgtagtcggcgcgcccctcaagtgcggcttcgcggatggtggcgttgtcgtcgagcggatcgcgctggtcaagcatgccgaacgtgagtccgccgcgcttcgtcacgcggccggaatccggctcctgggtgccgcggaacaggtgcagcaacgtggatttgccgtcgccgttcttgccgacgatgccgatgcggtcgccctcgaaaacaccctgcgtcacatcagtgaagatggttttggtggcgaaggcgagcgaaacgtgttccagtccaatgtcataagtcggcatgactcaccaatgtagcgccacgcttgcccagcggcggtccacaaacgttatttgttcagcgtctgagcgtaggagttgcagcgggccgcaaaaccggagaacacttgctcggcgagcggatgcagtagctgatcgtattgggcgaactgctcgcgcaattgggacttggacccacccgcggccttgagatccttgaccatgctcggctcatccagccattcgtccagcagcgagccgcacacctcaagatggaactgcatgcccagcgcggatcccagtcggaatgcctgcaccttggtggaagacgaacgcgccagcagctggcctccctcgggcaaacccaccacgtcgttatgccagtgcagcaccgtcagctgcttatcccacatggagaagaagtcatgcttgtccacacgcttgatcggcgcgaacccaatctccggcgcatcgcccttgcgcagctgcgcaccaagcgcagtggcgataatctgatgccccaggcatacaccgagaatcggcttgcctgaagccacggcggcacgcgccaacttggcttccgccttcagccccggatacttgtcgtaatcaagcgcgcccataggtccacccatgattaccacgccagccagttcgccgaaatcaggcaagtccggtttctttttgtcgacgatattcatcgtcaccgtctcaagaccgatgtcttcgaggttcgacaatatgcgtcccgggcgttcccatgggacatgttgcaaaatgagcacttgtggtgtggccatgacttctattgtggcacgagcgttccccgtttgcgtaacgagcagggcaaatccatgaatctcgcagtttccgcagcggtcaaagacgtgttctcgcgagactgttgtcctgcttctcatccgtctgtcacctcgttcgggccccacctgtgaagcgttcatcaagctcttcgagtaacgattcagcatgtctggttcggaccctacgcttgagcgttatgggaaacagccaagaaccgcaggatttcaacatttccgtcatgccttcaagcctgacgccggtgcatgttgccaaggccgcagaaggcctgaatctgtatgacaccgcctcgcaccaggtcagccatttcgtgccgctcaagccgggcgaagtcggcatttatgtgtgtggcgccaccgtgcagtcgtcaccgcatatcggccatatccgtgccgccgtggcgttcgacatcgtgcgccgctggtttttgaagctcggttacaaagtcacttttgtgcgtaatgtgaccgatatcgacgacaagattctcgataaggccgcggccgccggccagcgttggtgggcccgcgcctattactacgagcgcgaattcaccgaggcgtacaacacgctcggcgtgctgccgcccaccgtggaacctcgcgccaccggccacatgtcggacatgatcgacctgattcagcgcattctcgacaacggccacggctatgtggtcacggatgcggacggcaagcccaccggcaacgtgtacttcgatgtggcatcctggccgcattacggcgaactcacccaccagaagcagacttccgaagtcgatgaggccgctgccgtggccgaccgcatgggcccgtccgtggacgccaccggtgccgacaagtacaatccggtcgacccggccgacgcctcccccgacaagcacgacccgcgtgatttcgccctgtggaaggcccccaaggacaccgatcccgaggacgcccgttggtcgacgccgttcggcgtgggtcgccctggctggcacatcgaatgctccgccatgtcccaccgttacctgggtgatggcttcgacattcacggcggcggtttggatctgcgcttcccccaccacgaaaacgagatggcgcagacctgcgcggccggctacccctctgctgcgcgctggatgcattcggcatgggtgaccgccaagggcgagaagatgtcgaagtcgctgggcaccggcctgtccgtgccgagcgtgctggccgagcattccgcttgggtggtacgttacgctttgggctccgtgcagtaccggtcgatgctcgaatggtccgatcaggcgttggtcgaggcgcaggccgcatacgaccgtgtctcgaacttcatcgagcgcgccggtgtggcactgggcggtcagccttctcgcgaggaggttgctgccgtctccgccgacgatttgcccgccgatttcgtggccgccatgaatgacgacgtcaatgtgtctggtgcaaccgccgcgatcttcaccgccatccgttccggcaatacgttgctttcacagctggctgaccgcgccgattccgaaaccgccaaggccgaggtgcgtgaggcgctgctcgccgtgcgtgccatgctcgacaccttgggtctcgacccgctggccgagccgtggatgtctgctggcggtgccgctgatggcacggccgagtcgcccgaacatgcggcgctggaggcactgattgccgagcagctcaacgcccgcgccgaggcccgcaaggccaaggacttcgccaaggccgaccagattcgcgacgccctgaccgaggccggcatcgccatcgaagacggcccgcagggttccacttggagcctgaagtagccgcttcaaacccatcaatcagtcaaacacgaagtccacgtccacgatgtgcaggcgcttgatgagctccttctccagcgagcgcttgcattcgatgaggtcggctacatcaatggtttcgccgatgccgctcagatacacgtcaacggtgtagttcatgccggtcttgaagatcagcgtctgctcgtagtcggtgttggcaggcagatggcgctgtgcctcggcctccacgtaggcgttggtctcatcgtcatcatgcacgccgccgaccaattccacgaacgcctctttgagcacgctgaacggctccttgatggtcaatgccaccaaagccacggtgatgaagaaatcgccggtgtagtgcaggaagtcaagcggaccgccggccggtagcagcatcaggaagatggcaaccacgccgatgccgaacgacatcgatccgtcgaccaacgtgctcttgcactcggcggtgagcatggtgctggaatcgccgatggagcggttggaacgccggtaatacatgtataggctgaagcacactattacggtcaggatctcgtagatgaccaccgggccggtttcaatgcgttcgccggacccgaacacgaagtagtcgtacgctactcggcacacgtcaatcagcgaatacaccaacaacgacatggtgaaaatggccttgcagatcgcgtagatgggttccagtgcgaacatgccattggggaagcgctcggtggttcgcaccgtgcgcgacgagaggtacaccgccaccattccggacaggacggaaatcgcggtgaaggagaagtcgaggaacatggccttgaggccggtcatgaagaacacggccatgccggctaagacctgcaacacgttgatgacgataccaacgattagggctttgcgttcgagtagtttttgggtgggcatcagtgggccttccttattgcacggcatgtctgcgttggcccgaacgtcatggttcggagcgcacggcagtctgcgtataagcggtgtccagcgattttcaaaacagcgtaagcattccaaaaaacacaggattctttacggtttccatggtatcggaagcactcgattggcttcgccacgagcggacggcacggcatttgccgtctgaatgcccaacatccctgactactacgcgacgcaatccccggaaagagtcgtccccaacaccgcaatttcccgcgtggcggctagactgttgcccattatggcagctttttcatctttgacagacagactctcgaatgcgttcaagcatctcaagagcaagggcaagctttccgaggcggatatcgacggtacgatccgtgaaatccgccgcgcgctgctcgacgccgacgtggcgctcgacgtggtgcgttccttcaccggcaaggtgcgtgagcgtgcactgggcaccgaggtgtccgacgcgctcaaccccgcccagcaggtggtgaagatcgtcaacgaggagctcaccgacgtgctcggccaaggggtcgatcgtccgctgaacttcgcaaagaacccgccgacgatcatcatgctcgccggccttcagggtgccggtaagaccacgctggccggcaagctcggctactggctcaaggattccggccacacgccgctgctggtggcggccgatttgcagcgtccgaacgcggtgacgcagctgcaggtggtcggcgaacgcgccggcgtgcccgtctatgctcccgaaaagggcgtccaatccgatggcggcgaggccgtcgcagctccgggccagacctccggcgacccggtgaaggtggcccgcgattccatcgaactcgccaggcagaagctctacgacacggtgatcatcgataccgccggtcgtctgggcgtggacgaggagctgatgaagcaggctcgcgacattcgcgatgccgtgcaccccaacgaaatcctgttcgtcatcgacgcgatgatcggccaggacgccgtcaagaccgccaaggcctttgacgagggcgtggacttcaccggcgtggtgctctccaagctcgatggcgacgcccgcggtggtgccgcgttgtccgtggcgtccgtgaccggcaagccgatcctgttcgcctccaacggtgagggcctgaaggatttcgaggtcttccacccggaccgcatggcctcgcgcatcctcgacatgggcgacatcatgacgctcatcgagcaggcgcagaagcagttcgatgaggaagaggcccgcaaggccgccgagaaaatctccgaaggctccttcggcctggacgacttcctcgatcagctgcagcaggtacgcaagctgggctcgatgaagtcgctgctcggcatgattccgggcatggcccagcaccgcaaggaactcgagcagttcgatgagaaggaaatcgaccgcaccgaggcgatcattcgctcgatgaccccggccgagcgccgcgatccgtcgatcatcaatggttcccgccgcgcccgtatcgcctatggttccggcgtgacggtttctcaggtgaacgctttgctgcagcgtttcgagcaggccgcaaagatgatgaagcgcatgtccaatcgtggcggcatgggcggcggcatccccggcttcggcggcccggctatgggcggcggcaagaagaagggcaagaacaagaagaaaggcggcaaatccggcaatccgatgaagcgcgaggccgaggagaaggcattgcgcgacaagctggccggcaaatcctccggttcgaccggcggttccgccttcgccaagaagccgcagaacccggccctgcccgccggccttgaacagatgatgggcaacgtcgatggtggcactgaactgccgccgaacctcggcggaggccttggcggactgttcggccgctgatctcacaacttggctcccctcgcagaggggagccaagttatatctcggttcaatttgtatttcgaaaggaacttccatgacgacaatcttcagcgcggtggcaatcatcgcactgttatggacggccttaagcgcgctgcccgccggtctcgaggcccgtataccgcttccgtacatgattgccctgactccgctgctgtgggttcctttgatgattctggccgcggtcgccgcatggcaacatgaatggactgcgatgtcgtcgcttattgtggtcgcgctgattgccagctcacagcgcatcaactactggggtacgtcaatcgacccagccggcaaacgcagagaatcccaccgtgaaacagcccgtgaaacaacttcgccgacgctgtcaaaaagccataacagcaatacatcgagcacctcaaacattccgaaggaaggacccgaaacagtccccgatgggcaccgtgaaacaacgcgtgaaacactctcgccccagttctcggttatgacgatgaattgtcgatacggacgcgccgacgccgctgaaatcattcgcaatattcgcgaacgcaatatcagcgtattggccttgcaggaagtcaccgacgacctcatcacacgtcttaccgaagccgacatcaacgaactcctcccctaccatcagttcggagacgccaaagagaccgataacggcggattcaacgtgatctattcccgctacgagccgagcgcagcggtgcccaacgtggtctccatccctgccgccgacgttcccgccatcaccctcaaaacctccggtactcgcacggtgacgctttgttcggctcacccgaaatcgccgatgcgcggctgcgcggattggtcggccggcattctgggtctgcgagaactcgcccgtgcaaaatccgtcagcaatcgcaacatcgtcgtcgttatgggcgatctcaactcgagcaccgaccacccgagcttccgcgcgttgctcaagtccggattcaaggacgcgagtctgattcaagccgccggaccgaacctcaccttcccgcgctggctcaagtggccgcgcatcgaactggaccatattctgttcacccaagggctcagaccgtccggcgtgacgtccttcgaagtgccggacaccgaccatctggctttggccgcaacgctcaccctgcggtagcgggcgcggcgatcgatcaggccttggccgtgtggcgcgaagcgggcgggaacgtctggaagacccccgcccgcagccgggtggttcgccgtcagaggtccatggagcggatcagattcaccatttcgatcgcgccctgcgcgcactcggaacccttgttccccgctttggtgccggcccgttcgatcgcctgttcgatggaatccgtcgtcagcacgccgaacagcaccggcacaccggtgtcgaggctggtctgcgcgattcccttcgagacctcgttgcacacgtaatcgtagtggctggtgctgccccgaatgaccgcgcccaggcagatgatcgcatcgtagcgcttgctcttggccatcttcgacgcgatcaggggtatctcaaaggcgcccggcacccaggccaccgctatgtcctgttcgcggacattctcccttttcagggtgtccagcgcccctgccagcagttttgaggtgatgaactcgttgaacctcgccacaacgatgcctatcgtgatgttttcggctaccagatcgccttcgaacgtgtgcatttattcctcctccatgttcaggatatgtcccatgcggtttttcttggttttgagatagaaactgtcgtaagcattggcttcgatttcgattggtattctgtcgcggatctccattccatagtcttccaattgatacactttgtcgggattgttggtcagcaggagcatagaccgtatccccaaatccctgagaatctgcgctccgatgtagtactccctcgcgtcgccggggaatcccaacgcgagattggcgtcgagcgtgtccatgccctcgtcctgcagacggtaggccttcagcttgttgaccagaccgatgccccgcccttcctgacgcatgtacagcagcacgcccgagccatgctccgcgatcgtccgcatcgccgcgtccaactgctgaccgcaatcgcaacgcaacgagccgaagacgtcaccggtcaggcattccgagtgcacccggcacaacacatcgttcccatcgcccagattccccatgaccagcgcgacatgatgctcgccgttcaacctgttcacatagcagtgcgccgtgaattccccgtatcgcgtgggcatcgccacggtcgagacgcattcgacgagcgtatcgtgcgctttcctgtattcctgcagttccttgatggtcaggagcgggatctgatgctcctgggcgaaccgggtcaggtcgggggtcctcatcatccggccatcgtcgtccatgatctcgcagcacaggccgcattcacgcaatcccgccaaccgcatgaggtcgacggtcgcctccgtgtgcccgttccgttccaggacgccgcccttcttcgccaccagggggaacatatgccccggtctgcggaaatcgaggggttccacgtcatcggagacgcacatgcgagccgtcaatccccgttcttcggcggagatgccggtcgtggtgccacggtaatcgatggacaccgtaaaagcggtttcatggttatcggtgttgtgctcgaccatgggcggaagcatcagcttgtgggccagttgctcgctcatgggcatgcagatcaatcccttggcgtgggttgccatgaaattgacgttccatgtggtggccgactgcgcggcacagatgagatccccctcgttctcccggtcctcgtcatcgatgaccagaacgagcttcccttcccgcagcgcctgcaacgccgcttgcaccgactgatggttcatgattcatgcatcctttctcagaacccgcaccgggacagcagatcctgcgtcagtcccgtccgggtcgtcatcatgttccgcacgtattttcccaatacgtcgttttcgagattgaccacgccgccgacccgtttctcgcccagcaccgtctgcgccaaggtgtgcgggatgatcgataccgagaagtccctttccgtgacctccgcgaccgtcaggctgatgccgtcgacggcgattgagcctttctcgacgatgccttcgagtatctcgtttcgcgccgcgatccggtaccacacggcattgccttcgcgccgcacggaggatatgctgcccgtgccgtcgatgtgcccggtgacgatatggccaccgaaccttccgttcaccggcagggcccgttccaggttgacgccgttcccgcggcgcaatacgccaagcgaggttctgcgccacgtctcattcatcacgtcgacggtgaagcgtcgccggtcgaaatcgacgaccgtcagacagatgccgttcaccgccatgctgtcgccgatatggaggtcctccatcacgttcgtggcatcgaccgacagcgtgcagttggcggcgctcctccgtatgtccgccaccgttccgacttcctccactattcccgtgaacatgaatacaccacctcgctttccaccagataatcctctcccacccgggagcaggcgcggggccggagcatgacggcgtcggaaggcagggcgactccttggccgcccaccgggcttttcgcggtgccgccgaatatcttcggcgcgatgtacacgtgcgcctcatcgacgatccgctgttcgagggcgctccaattcatcgcgctaccgccttccagcagcacgctgtccatctgcatatcccccaggcgccgcaccacgtccgccagatcgacgtggtcgcccttccttccgacggcgagtatttcgcagccgtgccgccggtagtcctccgccttgcgttcgtcatcgcaggcggtggcgatataggtcctgacgtcattcgccgtctgcacgatccgcgaggtgaggggcgtcctcaatcgcgtatcgcagacgacgcgaaccgggttccttccgtgtgccatgcggcatgtcagcaacgggtcgtcctcgatcaccgtgttcacccccaccatgaccgccgcgacggatcgacggagctgatggacccgacgcctcgactcctcgccgctgatccaccgtgattgattggtatgggtcgctatcttcccgtccatcgtcatggcgtatttcatgatgacatacggcgtatgcgtggtgatgtatttgctgaacacccgtatcagatgccggcactcgtcggccagcacccccacatcgacccgtatgccgtggtcttcgagcatgcgcacgcccttgccggacaccacgggattgcagtccaaggttccgacgacgacccttgcgatgccgctttccacgatcgcctccgtgcatggcggcgttttgccgtaatggcagcacggctcaagcgtgacgtacaacgtcgccccggcgggcgactgcgtgcaatgccgcaacgcgttcctctcggcgtgcaatccgccgaacatctcgtgatatccctgcccgatgatccgatcgtccttgacgatcaccgcgccgaccatgggattggggttcacgtatccggcccctcgcttcgccagctcgatcgcgagtcccatgtactgcgcatcgtccatgtacgcctccaagcatgttgcgcccatacgctatccaaggcatacaaaagaaggttcatgcgaacacgaaaacgccctgaaatgatatggcatcatttcagggcgtacgacgaagcataaacgtactttcatcttctctcatccagactgtactgtcggctttggaatctcaccaaatcatgccttgcggctcgtgggctgtaccaccggtagggaatcgcaccctgccctgaagatagttattcgttttgcccgtgattgtactcgccgacgctccccctgtcaacggaagcggcctcccgcagcgcccgggccttctgcatcgtctcgtcgtactcgaagtcgaaatcggattccacggtgatgcctccgcccacgccgagcgacgtctcgcctccctcccgcacgatggtgcggatcacgacgttgaaatcgcaatcgcccgtatcggagaaatacccgatgctgcccgtgtacaatccccggggcgcgcgttcgagctcgtcgatgatctgcatggcgcgaaccttcggggcgccggtgatcgaaccggtggggaacgcggcgcgaaccgcgtccacggcgcaacgatccttgcgcagcgtcccctcgacggtcgcgacgagatggaatacggaaggatacgtctcgatggcaaagtcggggtccgtgccgacggaacccggttcgcagacgatcgacaggtcgttgcgttcgaggtccacgaccatcagcagttcgctgtggtccttctcgctgcgggcgagttcctcgcggttcgcccgatcctcgtccggtgtgccgccgcgcggccgggtccccttgatgggtcgcgtcaccacatgtcccgagcgaatctccatgaaccgttccatgctcgaacagcacacgtcgagacccggtgcgcgcagataggcggaaaacggggccgggttgtgggtgcgcagataacggtagatggcataggggctctcggacgtctccaagcgcaggcgctgcgccatgttgacgacgtaggcgtcgccggcgcgcagatgatcgacgagacgggccagagcgtcgccgtacccggcccgcgtgaaatcggaggagcatggggcgagcgaacgtcggcgcgcgggatgaggggcgggcgggcatgaatccaccaggtcctgcgcccatgtcagggcgtgggcggccgtcatcgtccgcccctggcagcaacagaacaacgcccgcgaccggacgtcctcgatgagtagcaggtcgtagaagaccatgctcgcctccggtgtggccgcgacgggatcgtgcctggtcggcacgccgcacgattcgcggccgaaatcgtatcccagatacccgatcgcgcctcccgtgaggggcagacgcggatcgcgcgcgccatcgcagggtccaagccgcttcttcacgacatcgaagaaatcaccctccacggcaacgccgtcgacgaggcatccgccccgcccatgttcgatcacaagataggggaagagtcccagaatcgagtagcgcccctgcgcccccggcatcgaggagtccaggaacgcgaagcgttcctcgccgcgcacgcactccacgatgtcggcaagcggtcggaacgtcctgagcttgaatacctgcgcgctcaccgggactccttcgtctgcgcccgggcccgcgtccgcgccaccatgcgggcataggcgtcgttcacgtcgcgcgacacgctccccggttcgaattccacgccgccgataccggccacgggcatggcacccatcagggagttggtgaggaacacctcgtcggcccgaagcagctcgtcgggcatgatcgggcgttcgacggcccccgtgaacccgatcacggcatggcgcatgaccccgggcagcagaccgcaggagacgggaggcgtcacgacgtctcccccgatgacggcgaagatattggagacggccccttcggcgacctcgccccgcgtattgaggaacaacggctcgtcgacggcgcggtcacgggcgcgacgcttctccatgatgttttcggcatacgccagcgtcttcatgcgcgcgaggggggaggattcgttcctgcgcacatcggcgaagtcgcaacggaagacgcgcttcgcccccggcgcggcatacgggttgcgtctcaacgagacgacgcggttgcgctcggtgaccgtgagcttgagggccgaatcgtccgatgcgccgagtccggcgcatgcgcggagcaccatcgtctccagatcggcgcgacgcgcctcaatgccgaggtatcgcaacgtctcacccaaacgcgtcagatggtcgtccaacaacacgggcgcgccgccggataccgcgatggtctcgaaggcccccatgccgaagaagaatccgtcatccgcatccacacgcgcccgggcaccggggccgatcacgcactcacccatcgatcagcgccccctttcccgtctcgcactgccatcaatcaggctatcagtcatgaagacggtaggtgcgccgccgacacgccgtccgtccggcgattccgtgcgtcacgaccggaccgatgcgcaatatccggcttccgcgttacactagtacggttattcgcgcgcgcgtggcgccctctacaccccgagccgcgaggacacgtggattccggccggtcatgccccacatggcaaaccgagaacccgcacacctagcattacaaggagagccattttggcaaccaagattcgtctgaagcgacagggcaagaagttctacgccttctaccgtgtggtggtcgtcgattcccgcaagaagcgtgacggcaaggtcatcgaggagatcggtacctacaaccccaacacccagccctcgaccatccagatcaagtctgaccgcgctcagtactggctcggcgtcggcgctcagccgtccgagcccgtcttcaagctgctgaacatcaccggcgactggcagaagtacaagggccttgaaggtgccgaaggcaccctgaagaccgttgaggctggcccggacgccgaggcccgcatcgcggccgttgagaaccaggctcagaagctgaaggccgccaaggccgaagctgccgccaaggccaaggctgaagccgaagccgctgccgccgctgaggaagccccggctgaagaggccgccgaagaagctccggccgaggcctgagcggaaacgaaaggctagctatgcttgcacaggctgtggaacacctcatcaagaacatcgttgattttcccgacgatgtttccgtcaagtcccatgagaacgcgcgtggcgaactgcttcgcgtacgcgtgaacccggaagacatcggccgtgtgatcggccgtggcggccgcaccgccaacgcgattcgcaccgtgatccaggcactgtctgaccacaaggtccgcgttgacatcatggacgtccgtcgataaccgataaggaacgattcacagcatggcacagcaagacatgcacggcgaccctcagcagctcgagttgctgagggtcgctcgtattggccgcgcacagggcctgaagggcgaagtcaccgtgcgcctgtacaccgatgatcccgagtggcgcttcgagccggactccgtgctctacagccaggatggcgagaccgagtacatcgtcgagggctcgcgcacgttcaaggatcgttggattctcaagcttgagggcgtcgacgaccgcaatgccgccgaggccctaaacggtgtcgaactctacggcgaggtcgacgacgcagaagatatgctcgaagccgacgaatggtatcccaaggatcttattggccttgaggcccgtctagtcgagggcaacggtctgggactgcccgccggccaagtggtcggcaaagtggtggatgtggtcgactcccccgctcagtccctgctcaagattcgtttgaccgagccggtggtaaccggccagaattccaagggcgaggatgtggtcgaaaagaccgcattggtcccgttcgtggaggccttggtccccgacatcgatctggaggagcaatacctcacgctcgatccgcccggcggtctgattccgggattgtaaacctcatatacgcgtgagaccaaaggactttctggctatttgttggcagaaagtccttttgcgtatgagcagaaacatcgagacgctaaaccttcctcattccggtatcgcatagcagataatcaatagtatactagtgaataaatgattttattcatggaaaactatatgttataacactcggagtatcgcaatgaagtatgtgcccaccaccaccaaacgcgatttacgcatcctaggcgaacagttctcgcaacagcgcaaactactgatgttgacggttgcggatgtagcacaccgctctggtgtcagcccgaccacagtgtcaaatctggagcaaggcaaggctgtccggtcagattcgctgttaaccatcgcgcgcgtgttgcaacttgctgacacactcgtagccgcatgcgacccctattccaccgatcttgggcgtctccgcgctggccaacaactcccgaagcgcgttcggaggtgaatccctgatggcaaaaactatcgaatcaactgtactgattacgctagggcctggaatggaagctcctgccggcacattgtatgcgactggcgacgacctatcgttccgctatgattcgacgtacacaatcagcagcgattccttcgacctcttcccatctatgccccgctcgctggccccattcttcttctctggacttggtccattttcggattccgccccagaccgttggggcagaaaggtgttttcccgcagtcttaaacggacgcgtgtcagcgagtcggaatatttgttcggcgtcaacgatctgacaagacagggtgccattcgattcattgttgatggcaagccagcggcaggagatgaaggagtacccgtactgtcaaagctgccggagttattggacactgcggatgcggtggaacagaaccgcgaggtaagtgatgtctccttacgcaggttgtatcgggcaaccggctcactcggaggcgcacgacctaaagcttcggtgtcggatcgtaatgcgctgtggctggccaaatttccgaaaccgaacggcgatgattgggatgttatcggctgggaagccgtcaccttggaaatcgcgaacatggccggcatcaaagtgcccgaacatcgcgtcattgcaataaaggattcggaggagagaagccggaccgtgctattgactcaccgttttgatcgcgtgtctgcaccatcagttgagcgaatggagcgattaccttatatatccgcaatgaccgcgctggaagcaagagatggggacggcggagactggttggatctagcagaatttacgcgtagggcaggaggagacaccatagagctgtggcggagagcaatgttcggcgcggccatcggcaacactgatgaccatctacgaaaccacgggtatttgcgtaagaataattcctggcaattggcacccgcttttgacatgaatcctgaaccattcgatccgtcgctacccgactcacaccagatgtcattattaggtgacaccgaagtcgatatagataaattgatgtccgatgagagtctgtctttgttcggtgtaagccgtaaatatgcggatcattggttgccgacattgcgatcagccttatctcaggcattatctcgagccgcgatgcgccgcattgacatgcattccatcaatctgatggccgaacgttttgataaggcggttcatgctctgcagtagagcgatggggatctaccgcaaactgttactcgtctcgtggctccggcctcggtatgtctctggtatcgcttaaaaagtcgcggcggtcctcacaccggagagcaacgattgcgatgactgcgtggccgacacgtcatacggcagctgattggcatccgactgctaaaggtcagttcaggcagatgacaaagttccgagaattctttccttacgttttctccatcggttacaggcacgttcgatacgtttatagccaattagctcggacggcaccaaatgaaaaatccttgcctacttccctattcgagcatccccaaaagggcacgccaccgctgcaatggcgtgccccgaatagagcgccgctgggctcagagcgcagagaagccttgacgcaccatacggcacagtccctcaatcccctcgtcggccggaacgagcatcacactagacccccgctttctcgcctcctccatgattaccaccagaaacgggcgaagctcggccaaatcggtattctcatccatatgcacaccgaccgatgccatcccgcatatacacgacgacgaatcgtaccgctagttatccacagggttatccacacaccatgtggatcaccccggaagctagaaccgcattgtccgcactactaaccgacgcttcagcaaccgacacgaccgccaaagcataagcatttacccacgagccgcagcggtgacgcgagccataaagcggtcgaggaattccggcacgtcgacgccgagcgcaacctgagtgtgcttgtcgaaatcttgcaaccgcgagcggtcaccaatggtgcggccacggaacgggccctcgagatcgacttgcaagttgaagccgaacgtggtgaccaatgatgggtcgagcgcggcggccacggccagcgggtcgtgcagtccacatccgcgaatctccggctggttcttcaggtagaagtcgatgtagtagtcggtcatggtgacgaggaagtcgccggccggcgtccccagagacgcccattcatgggctttctcacgggtgagcgcggtctggtgggtcacgtcgaggccgatcatggtggtgcgtgcgccacacttgaacagatagtctgctgactctgggtcttgggagatgttcgcttcggcggccgggcttacattgccgggcagcgtcaacgcaccgcccatcaacgtcacgttcacgccggaatccttcagatccggggcattacggaacacggtggccatggtggtcatcgcgcccgtaggtacgatggtcaggtccgggccgtattcgcgcgcggcggcgatgatgaaatcgaccgccgagcctggtgcttccggagcgcgcggggagtcggggatgattgcgccgccgatgccgttgggatggtggaccgccaccgagccgggagttggtgcccacgaagcgtccgtttgccagccgtccgcgccgccgttctgccagcgcgcgtaggcctgggtccgctcgtctggtgtggtgccacgcattttcggcaatgttgccggggcgatgggatggtcgactccgggatagaccggaacgtcgtcacggccgaacaagtgcaccaccgccagcgcgttgcgcgcggccagcggcaccgtgacattgccgtaggtggccgtgataccgatcagatcgatctcgtcggcactgcctagggcatatgcgatggcgagcgcgtcatcgatgccggtatcgaggtcgaggatgagttttttgcgcatggcggttccttcaagacgaatcaatcctcccgaatttgtgacgttaagccaacgtcagcggcacaaattcgggaggatggggaatgggcaatcagccgagcttggcgagttcttcgggggtgagttcgagctggtcggccttgagggagtcaaggatggtctcggggtggtgggcgccgggaatcacgaacatgtggtcgcccttggcgagctcccatgccagcacgacctgctggtagctcacgccgtgggccgccgcgacctcgcggaacgggtcgaacttggtctcatcataggggtgacggtagccgccgagcgggctccagcacacgaaggccagaccgaccttggcgcagtagtcgagcgtgtcctggggctccaggtgaatcggcgagtactggttctgcacggccacgagcttgtcgcccagaatgccgcgcgcaatgtcgatttgctcgatggaggcgttggagataccggcctcctgcgccacgccctcgtccaccagctgcttgatggcttcgacggactcgttgtacggcaccttcgggtccgggcggtggaagtacagcaggtcgatggtgtccacgccgagcgccagtgcgctctccttgccgcgccgaatcaggttctccgggcgaccgtccacatcccacgtggggcggccgtcggtgaagttgcggaagtggcccaccttggtggccaccagcacctcgtccttcggccccttccaggtctcaagggcctcgcgcaccagcttttcaccggtctgctcctcgccgccggagcagtagtaggcccaagcggtgtcgatgtggcggcagccggcgtccagcgaggcatgcagggtttcgatgccgacctcgtggccgcggttgttttcgatggtcagcggcatttcgccgtggccgatggcggtggtggagaacggtccgaggttacggaacaatgccatggtgattcccttcgtgaaacttatggaaactcgatatccacgattaagcctaagcatcccgttggatttcacactctcggcctgcccgcacaatcaatctatgaaatttccgcaacttcacggaatagaaaacgcaacttactcatacccagttcagtgaaaacgaggggccggaaccccatggattccggctgttccgctgatagatcagtggcctcgtctgagactcattcccagcaataccagtgcggcaatgatgatggccgtcgaccgcccctgtccaacttgattggccagggcgatcaacaggccggtcatcagaccttcccggtattgccggtcttgtctcggacggttgtcatggttgttgcctaccatgagaacctcctcttgaattttgagacgtcattatgccggttgacacaacgacaccgcgccaaagtggcacgctagtagaccttggtttggtcagtccagtgtactggtgagcttcggtggaggctggtatgctgtgttgtagcagaaaggtcacgctagcttcgaggcaatcttctcggcggcgccacagactttcgccccgttggacctgactgttgaggtctcctcacctcgattttgagagaaaggcccgatgtcttatgacaccgggccttttactttcagagctatagggactttcagaagcacaccgcttaccgcccgccgaacgaaccgccgccggaaccgccgctgctaccgccaaagccgcctgagccaccggatggcgaggccgcattgattgtcgcggtgatatccgcaaatccgtacgacaattgcgtgccgaggtcagagaacccagccgcgaacgacgtgcccccgaacgctggcaccgctccggccaatccgctgtcagccacggaatccgcgaacgccgagccattgtagaaacgcaacccataccagtcgtacggacgataattccaatagaacaccgtgtcggaggcattggcatcaagccattccggatcggatacttgcggataggccatggccagctcccgcatcacccggtcggatatgccaaatgcggcagcgtagaccatataccaatcccacagcgtcgaatccgcgactccacggtacttgaaaagttcgagaagccttgcatatatcgtttgagacccaagcattgcccggccatctgctgaccatgatcggtcagcacgtaggaattccccatcaggaagcagaatatgccgaccgtcatcaggggaatgccgatgagggccccggccaccagatatccggccaaaccgttgatgaatatgctggcgccaccgatcagcacggtgattgccccgggaatgagccatccgttctcggttttcggcgcgatatccgccgccgcgaattcggtcttgcacgcattggtgaacttttcgagttccttgtagccgtctttccaatccttgcaggcgtctttgatgtcatccatgtcaaatgccgtacgacctacgcgctcggaaatcacggtgagcagatagagcaatgcccgctcagaagcactgagatcgggctggtgtgcatcggacacgctagatgcggcagatccagatccgccagatccagatccatcaaatacggattcgacgaatactgattcatcaaatccctcagatacgccgtaatcggactgccacagcatcacaatcgtgctattggtacgcgcattattgcgcttgtatggatcggacccgattcgctgactgagctccaccggagaaacttgtttcagatccacgccgatatacaggtccgccgaaccggggaacacagcaatgactttcttcacggccagagaaagcaaggtcgcgacgagttggcgctcggaaatgtcgggtttgtcgccggaagtcacgatatcgatgagtttggccgccgatgcggggctcagctcggggcgatcacgccaatattcgatggagccacggtaacgtgaacgtccggaggagcgtaaggctgcaacaacaccaataatcccgaatatcaggccggccgatatggtggtcatccagttgttcaggcgccttgtggcgcgttggcgttccagattgcgccagaaccgttcgtcgtcggcttcgtcttccttcaactcctgcagatgatcgtcggtctcgacacgagccatatctcccgccttggccgcgtcgaaagcggccaccacgtctaggtactcgccgcttttcacatcatttacggtgaaggtgaagctgccatccttggttcggccggtttccgaggtttgttcagtgtgcagccaagtccacgagttgctcgcggtcacacctttggggaaatgcaccgtgccggtgaccgtaccaatcggcacctgattgttctcaccgaatggctcccattggaaggtcgccacgtccttccacttggtggccacgtcatgcatggtgaagctcaccgtgaacttgatgctgttggttttacggtggtgggaatattccagccgatctccacggtttggtcttgccatcgtcatccttgcgtttgcgcaacttgatatcgatatgctccgtgactttaagatcgccgtcggcggtggcggtcacatcgtaatcaagcgtgcggtagctcaggtcggcaccatctgtgccgagaatcaaggcaccggcacagagtgcggcaagaatcagcgcaccgacaaggcttaagcccagggcacgaacaatgcgtttcgacataggcatgcgctaccgcccgccgaacgagccgccacctgagccaccgaacgagccgccgaaaccggagccgccgcccgaaccgaagctggagaaatcgccaccggaatcggcggatggtgctgccgcgctgatggtcgagctgatgtccgccagaccggagttcagctgcgagccgaggtcggagaatccgccggcaaacgacgtgcctccgtaagccggagctgggccgccaacgcctaggtccatctgcccggcagcatcgtggtcgaatggaccattatgacggtggctgtaccagccatacgggcggtagttccagtagaacaacgagttggaggcgttggcatccagccaagccgggtcgttgacctgaggatatgctttggccagttcacgcatcacgcgatcggaaatgccaaacgcggcggcgtagaccatataccaatcccacaaggccaaatcggcggtaccccggtcggtgaagttggagaagtcttccatataacgcttaaggcccagagtccggccggcgatatcctgcccttgatcagtgagcacggtcatcgcgccggccatcgagcagaacagtccgaccaggaatatcggcagcccgataagaccagccaccgggtatccgataaagctgttggccagcagcgaaccaaatcccagcacggcggccaatacgccgggtaggatccattgccagcccacagagcgcgtggcacccagccgctggtattccatgctgcatgcaccggtgaatttgccgagctcaatatagccgtcttgccagttctggcaggtcgccttcatctggttcaggtcgaataccgggctgcccacgcgctgagaaatgacgatgagcaggttcagcagcgcatcttccgattcgctcaatcccaactgttgcgcgttgggtgcctcatcaatggcgagcggcagaatcacgatggtgctggtgatgcctgccgcatactgcttgccttggtcggcggcaatcatttggctcaagcccaccggcgtggcctggctcatgtcgatgccgcgatacatgtccgacggccccggataaatggcgatggccttcttgacggcgagcgacagcatggtggcggtcagctggcggtcttcatcggattggcgcgtcgacggatcgaccacgcgaatcagacgggctgcggaagccggactgatgccgggctggtcgcgccagtattcgacgctgccactgtattgcgcacgccggttgctggagatcacagcccagataccccacgcgcacaacgcgatgccgagcacgatgctgacaatccagaacacgagacgagctctggcagcgaatcgttgcttgtcgagccagcgctgctgttgcttatattcgtcctgtttcaggtccttgagatgattgccggttcccttgcgggcgatgcccttggctttggcggcatcgaacgccgcgaccacatcgaggtagtcgccattgtggatgttgtaggccgtgaacgtgtagctgccgtcgctgttgcgcttggtttccgaggtgcgctcggtgtgcagccatgtccatgaggttttgccggtgatgccgttggggaaatggacggtgccggtgaccgtgccgataggcacttggttcttcttgccgaacggctcccactggaaggaggccacgtctttccatttggtggccacatcgtgcatggtgaagcttacatcgaacttcatgctgtcggcctcggtggtgaccggaatattccagccgatctccacggttgtgtcatcttcggtggcggaggcgctgggcttgaggccatcggtaccgggcgtgtatgcctttggatggtcgctgccatcgctcacatcggcgacataccaatggttggcgtagtcgctgttccattccttgtcggaagagacgtcactgggcagcttgggctcgctctgttgtgcgtagtcgatgccgtcggtgacgttgcgcacgctgatatcgctgatatcagtcaaggtgccggagttcagcgtgtactgctggaacagctgcttccacggcttggtgttgtcgtcactgtcggtacgctcacgcatcttgacgtcgatatgctgcgtgaccttcaaatcaccgttcgcggtggcggtcacgtcatagtccagcgtgcggtagctgaggtcggccgaatcgccgaacgcggaagtcccgattatcgccaaggtgataactgccaacaccaccgtggcaacaatgctgatgattccggcgcgaatgaatcgtatccgcatatcttccctctcttaagacaatacgggcccggccggcggcttaccggacgggcctgaagcgggtcagaactggacctgtggcacctgacgggaagcgtcatcggcctcgaagtattgcgcctgctcaaagtggaacagaccggcgatgatgttcgtcggcacggtttcgatggcggtgttgagcttcaggaccacgtcgttgtagaactgacgggcgtaggcgatcttgttctccagttccttgagctggttctgcagatccatgaagttctggttggcttgcagctgcggatatgcctcagccgtggcttgcaggttgaacagggcgcgggacagctggttttcggcggcggcgcgctgagcagtggtcgtgctcgggttgctggccgcagccactacgccggcgcgggcggcggtcacctgagtgaagacttcagactcgtgggatgcgtaccccttgacggtattcaccaggttcgggatgaggtcggcgcgctgcttcaactgcacgtcgatttgcgcccaaccgttcttcacacggttcttcagcgtcaccaggttgttataggcgctgacgccccaaccaatcaagacaacgataataacgacaacgacaatgccgacgatcagaccagtactcacctatgctcctttgctggaccttgctgtgaccattcttccacactcgcaccgtaaacagaagattcatcacagagtattcatcgtgcggacttgtcttgtaccgctttacccgccgttctcccgtcgatcgaccgaagcgggaagtcgccgcccagtccgacaaagtattccagctcgctccgttgcgagaacgataatactcggcaatactcgcgttgaatatgcgaaagcccgccttgcggcgggctttgccgtttctcctacgcacaaatcattacgccgcgcgcaggaaacgatcagccgaaccttccagagatgtagcgctcggcttcttcgttttgcgggttgttgaacatcgtgatggtgtccgcgaagtactcgaggtgaccgggctggcccactgccttcaggttgaagaaggcggtgtagtcggcgatacgggcggcctgctgcatgttgtgggtcacgatcacgatggtgtagtcgctcttgagctcgttgatcagatcctcgacagccaaggtcgaaatcgggtccaaggcggagcagggctcatccatgagcagcacctgcgggtggacggccacggcgcgggcgatgcacagacgctgctgctggccaccggacaagccgatgccagggttgtcaagacggtccttgacctcttcccagaggttggcaccgcgcagagcccactcgaccagatcgtcggcgtcggacttggccaggtggtggttgttcaggcgcacaccggccagcacgttctcacggatggacatggtcgggaacgggttcgggcgctggaagaccatgccgacgtcgcggcgcacggccaccggatccacgtccttgtcgtacaggttcttgccttcgagcagcacctcgccctcgacgtgagcgccggggatgatctcgtgcatacggtccaaggtgcgcagcacggtggacttgccgcagccggacgggccgatgaaggcggtgaccttgttcggctcgatgttgatgttcacatcttccacggccagaaagtcgccgtaatagatgttctcgtggttgacgtcaatacgttgtcccatgatgtttccttatatttccttgtgttcttaaggcttaggcttagcgactggcttagcgctcggtcttgacggcgaagaccttcgccacgattcggccaatgaggttcagcagcagcacgatgacgatcagcacgagagccgcagcccacgcacgttccatcggaatcgtggtcacgcaggtggcgtcggcgttgggcgggcagttcgcgctgagcttcgagtactcctggtagacgaacaccggcagggtggtcatctggccggagaacaggttcacgttggtgctggagatgtagccggcggtcatcagcaacggtgcggtctcaccaatcacgcgggcgatggccagaatggcaccggagacgatgcccggcagagcggtgcgcagcacgatcttggtaatcgtgcgctgcttggtaacgcccagagccaaggaagcctcacgcaaatcgttcggcacgatcttcagcatttcctcgctggacttgaccacggtgggcagcatcagcagggagagagccacggagccttcgaaaccgttgatggtaccggggcccagcagaatcgtgaacatcgagaaggcgaacaggccggccacgatggacgggatgccgctcatcacgtcgacgagcagggagatcgtggtggcgagcttgccgcggttcgagtattcgaccaggtacacggcgcacatcaaaccgatcggaatggagataaccatagcgccagcggtgatttcgagagtaccgatgatggcgtgcagcacaccgccgtaaccaccggacggggtctggctaccaccgaccacaccggtcatgttgtagctcaggaagttcaggttcaggcgcttgatgccgttgacgatagtggtccacagcagggagatcagcgggatgcaggcgatcacaaacgccaccgcgatcagggcccacatgaagcggtccatgatattacggcgctggatggcggaacgggtcgggcggaaacgatcgaagtcgatttcgggcgtgccgtccatcggagtcttttcagtgttctcagcagcagtcatcacgcagtcgctttctcggtaagcttacgggcgatgaagttgaccacgaacgtgatcaggaacagaatcagaccggttccaatcagcgtggagacgcccagatcgttggcttcagggtactgtgcggcaatattcgcggcgatggtctggttctgcgaggcctgcagcagcttgatggagtagttgaggcccggggacaggatcatcaacacggccatcgtctcaccaagcgcgcggccgagagccagcatggaggcggacacaataccggacttgccgaaaggcagcacggccagacgaatcatctcccacttggtggcgccgagcgccagcgcggcctcttcgtgcaggcgcggggtctgcatgaagatatcgcgggacatggaggtgataatcggcaaaatcataacggcgagcaccacagccacggtggcgacggtgcgcgacgggttggcggccgggccctcgaacagtggaatgaagcccaagtggttggcaacccagttccagaacgggtagatggccggcaccagaatcaggccgccccacaaaccgtagataacggacgggatggcagccagcagatcgaccacatagctcagcgcggtggcgagcttcttaggtgcatagtgcgaaatgaacagcgcaatgccgatggacacgaagaaggcaatcagcagtgccagcaaagacacgagcacagtaccgaacaacagcgggagcacgtagccccagaagctgctggccttgccgccggtaaagctggacacggtgtcgctgttggcggcctgatcgccaccgatgagtggccaggcgcggaaaaacaggaacaggaacacagcggcaagtacaaccaggatcaggatgccgcaggcgtatgccacaccgcgaaacaccttgtcggcggtcttgcctccaactggctgcacagccgttttgtcttgcgaactcacggattctccttatatagggtggttatcaagtattcaagtggtgcggttttcgtctgtgactttgccaaaccgttcgggtcctgacccgctttaagccgcagccgtatggtttacgactgcggcttaaagttggcggcgactgctcttactactacagtctatcgttcagttgtcaggtccagtccacacgacccttgcgggccgacgtcatcacttggtcttgatggcctcgatggacttggtgatcttagacttcagggaggagggcagcggagcggtgccggcggcatcctgagcggccttctggccctcgtcggaggtcacgtaggtcagccaagccttggcgaactcagcctgcttggtgtccttgtaggccgggcagacgatgtcgtaggagaccaagacgatcgggtaggcaccctcggcctcggtggcgtggttgatcttgatgacgatgcggttgtcgcccttaacggtgtcgtcctgcttggagtcctcgatgaccttggagccggcctcggcggaaatctcgttgtacttgtcgccgaccttgacggccacggtgcccaggtcgccgacctgggagaagtcagcgtagccgatggtgccgtcggcctgcttgacggtggagatcacgccggaagtgcccttggcgccctggccaacctcgttcggccagttctcggagaggtcgtaggtccagttgtcaggggtgacgtccttgaagtaggagacgaagttctgggtggtgccggacttatcggagcggtgcacgacggtgatggcggtgtcgggcagcttcaggtccttgttctgatcggcgatggccggatcgttccacttggtgatcttgccgtcgaagatcttggcgatggtggcagcgtccatgttgatgtgcttgccggcatcggaaacgcccttgaggttgaagaccacggcgatcggggagatgtagaccgggacatcgaaggcggtgccttcagtgcacacggacttggactgctcaacttcgtcatcggcaagggccttatcggagccggcccaagcggtggcaccggtcaggaaggtctgcacgccagcgccggaaccggatgggttgtaggcgatcttggcttcagggttggtgccctggaagccggcgatccaggcttcaacggcggcctgctgagaggaggcgccggcgcccgagaagttgccggagaccggggtggacttggaagtggaatcggaggaggagctgttgtcggtcgtggtggcggtgttatcgccgcaggcggccacggaagcgagcatcacaatgccggacagagcggcaatggagcgaatgaggatgttcttctgcatgattattacttaatccctctatcaactattcgcgggcggctcagcgctgcccggtcaattcatgacaactacaagcgtattggtggtttcaagggcccaaaaccgaaatcagtaaacagaagatgaacacttggatgtttgtgggctacgttgaggctacgtagtttttggagtggactcgcctgcggcgagcccacaatccacaacaaaaaaggcggcccgaaggccgccttccatttactccgcgggagtatcgatcttgtatccgagaccgcgcacggtagtcagatacttggggtgcgccggatcttcctcgatcttggagcgcacgcgcttgacatgcacgtcgagcgtcttggtgtcgcccacataatccgaaccccagatgcggtcgatcagctggtgacgcgtcatcacacggcccttgttctgcatcaggtattcgagcagttcgaattccttgagcgggaagaacacggtttcgccgcgtacggtgacctgatgctggcctacctgcatggcgatatcgccgcacaccagcggaatatcgtcatccacagtgccggaagcctgggccgtggcctgattgcgacgcatcacggcacggatgcgggccagcagctcacggaaagagtacggcttggtcacataatcgtccgcaccaatctcaaggccaacgaccttatcgatttcggcgctcttggcggtgagcataataatcggcacacggctctgctcacgaatgcgacggcacagtgcagtgccatcaatgcccggcagcatcaaatcaagcagcaccaaatcgatgccgcccttggtgaacagttccagaccttcctcgccagtggcggcggcggacacgtcgtacccctcgcgtgtgagctggtataccagcggctcgcgataggattcctcgtcttcgacgataagaatgcgtgccatagtagcctttcttgggtatgttcccgtgcgcataggcgcaaagttttccgatactatcgtaaccatttgttctccgttagcctgctgtttcctgaaagtacgtaattgcgtaattgtgctacgcacggtgtgcgcacctcgcccactgtgtgattgtgcggcaatggaatggcaccatatcgggcaccaaccaaggccctacgcttgtgtcgactcgtccggccgggcctcgtcgtcatcctcatccggggcggccggcagctcgatggtgaacgtcgacccctcccccgtacgcgaccagaccgaaatccgaccgccgttctcctgcacgcagtgcttggtgatggccaagccgagtcccgaaccgccggtctcgcgcgaacgggccgggtcgacccggtagaaccgctcgaaaatgcggtccagtgatttggcggggatgccgatgccctgatcgaccacgcgaatggtgactttgccatcgcgctcccccacgccgaccgccacagtggtgtgttcgggcgagtaatggatggcgttctctacgaggttcttgacggcggtttgcatggcctctttgtcggccttgatcatcggaccgctcgtggccgggctgcctgattcttccaaggaaccttcgccatcggccagctcctcgaccttcgtgggcactgactgtccgttgacactcagtcgaatatccacatggcgggagtcggcttgggtctgattggcggcgatggcagcgcgtgccacatccagcgcggaaatgcgccgcgcatcaatcacactttgcgggctttgggctttctgcaagtcgataagatgatgtaccagttcggtcaggcgcgcggattccttggagatacggccggaaaaataccgtacggcgtccggatcatcggcggcgtcggtcacggtttcggccagtagcgagatggcaccggccggagtcttgagttcgtgcgaaacgttggtcacaaagtcacggcgaacggcctcgaaacggcgctgctcggacatgtcgttgatgaagatggcgtacaggtcatcgccgatatcgccaatgcgcacacgcaaatacagcatgttggacgggcgtgactggccggcctccagtcctcggccattagaggacggataggaattgcgattgaccggcagctgaacctcacgctcacgcacgccaccgtcggcggcggcctgagtgaggatgtcctcgacttcgcgcgagttgagtcggtcgccggagaccaggccgaatggcactgagccggggcttgaatattggaccaagccgttgcggtcggtaacaatcagggcttcgggcaggacttcaatcaggcgacgctcggtggggcgcacgggcgcatcatcaccgaatagagaacgcgtatcctcgtcgccggacaggtcctgttcggcggcgagccgacctgaaacgcggcctttgttgtaggcgatgacggcaacccacgccagtatcagcgcggcgagcaccacaatcacgacgatctgccagatatccatgatttccagagtaaaacgtgcaaggcgtagtgagatgcccaaactacgtaagttcgtctattgttcatttttggtgggacgacataacaaaatgctcccgctggcgggagctgtcgaacgcagtgagactgagggtggtcaaagaaccgaaatcccattggccaccctcagtccgctttcgtggacagctcccgccagcgggagcataatatggggagctctatttacagctcgtagtccttgtccttgctttccttaatcaggaacagagcgagcagagcgagggcggccatgatggccatgtaccagcccacaccggcaacgccgaacttggaggcgaccagggcctgggcgatggtcggagcgaatgcgccaccgaagatggcggcgaggttgtagctcaggccggcgccggagtaacgcacgtgcaccgggaacagctcaggcaggtaggcgccgcaggggccgaacaaaccacccatgatcatgaagccgacgcacaggaagatcatgatatgggcggcggagtgcacgagcagcatcggcacgaagaagctgaacaccaaggcggcggcggtcacggcaatcatgaccttcttgcggcccaccttgtcggcgtacacgcaggagaccacgatgaagatggcgaagaacaccacggagcacatctgcatgagcaggtactcgccctgctggaagcccaagcccttgacgccgtaggccagcgaccaagtgccgagtacgtagaacagggtataggtgatacccatggctacggtgccgagcacgacttccttccagtacggcagcaggtcgcgcagcgggtgcttggaggtgcgcttctcttcagtggccttctggaacactggggtctcagacatgcgggcacgcacgtacaggccaatgatcaccagcacggcggagcacaggaacgggatacgccagccgaaggcaatcatctgttccttgctcaggttggattcgagtagcaggttcaggccgtaagcgcagaagaagccaatcggggcaccaaggttcgggaaggaaccgtacagggcgcgcttgtcggccggagcgttttcagtggcgaccagcgcggcaccggaccattcgccggcgaggcccacgccctggcaggcacggcagatgcacagaatcacgacggaccatgcgccaatctgctcataaccgggcaggcagccgaccaggaaggtggcgatacccatggtcatcagggcgataaccagcgtcttcttacggccgagcttgtcaccgaagtggccgaacagcatggagccgaacggacgggcgaggaacgaaacggcgaaggtcacgaaggccatcagcgtggcgagggtctggttggacttggcgacgtccgtgaaaaagatcatgccgaagtagctagcagcggcaatggaatagcagtagttatcgtagaattcgatggccgtaccgaccatggaagcggcgatgatctcaggaaccgaatccttcttcaccggtttggtcacagccgcggttgcgcttgcagtcattttttctctcctcatgctgcagataaaccccagtgcagcgtgcgcattgtgtattcaatgcttcgcgacggtgttgtcgtcgcttaacgaattgagcacagcgaccggcatgcgggagaagaactggtacggcttgtggccccagcgatgaaccccgcacatcgctgtgccgaacaccgagtatggctcaggttataagcaatagtttgaaaacgctcatattgtggtcatcatacccaaaacgtggatggtgagatgggccagcccgccgactacaggcgcttgacgatgtcgacagccagacgggcggcggtatcggcgtactcggagatgtcgaactccttgaatacctcgtaatcggtgtcggcgttgtcggaaagggcacgaatcaccagtgccggcacgtcattgcgggcggcgacctgtgccacggcggcgccttccatctccacggcgtcagccccggtgagtcggatgacctcctcgaccttttggggcgtgtccacgaagtagttgccagaggcgatgatgccggtgatgtgggtaatgcccgcattggcaagcgcctcgtcggcaacttccagcagacggtcatcagagtggaattcctccaccggagcgtccgcagtgccgggcttccactggcctacgagccgcatgtcagtgtcgaggtagcgcagggtgccgccgagcaccacgtcgttgatgtgcaggtgggtgttgaggttgccggcgatgccgctgaaaatcacggcgtccggggcgaactcgtcaatcagcagctgcgtggtggcggccgcattgaccagtcccatgccgcctaccgttgcggcaaccttgatgacgtcagaaccgaaggagtcgaccgtgccggacacgatgtcaaggctgcccttggcggtgtgcgtcacatgcgtgagcgatttggcgatcagtgccacttcttcatccaatgcgccaataatagctacagttttcatacccatatgtaagttcctttcacaacgctttcgactcccatgtcaggggaggtggccgccgaatggcaggctgaggggtagagacgtttcgttgcattgctccccccgagagagccgatgacgcaactcagtgccaacgccgcgtggccacggcttccgcaagctcgcgcagcaaggcctcggtttcttcccagctgatgcacttgtcggtaatcgacttgccatagaccagctgatcaagcggcgcggccttctgattgcccccttcaataaagctttccatcatgatgccggtaataccctgttcgccagctgcaattctgctggcaatattgcgcacgacttcggcctgacgatgctcgtccttgccggagttaccgtgcgagcaatcaacaatcagaccgtgcgaggctgcggattcggcgggcatttcggcgcgtacgtcttccatggctttggccacggactcggcatcgtagttcgggccgtgaatcgagccgcgcaacaccacatggcagtccgggttgccaagggtctcgactgcgcaggcacgccccagatggtcaatgccgaagaacgtgtgctgctgagcagcggcgaagcaaccgttgaccgctgccttcaccgagccgtcagtggcgttcttgaagccgaccggcatggaaagcccgctggccaattggcggtggatctggctttccgtgttgcgcgcaccaatggcgccccaactcaccgcgtccgagatgaactgcgggctggtgggctccagaaattccgtggcggccgccaatccttccttcagcacaccaagcaaggttttgcgagcaagcaacaggcctttgcgaatattgtggctgccatcaatatccgggtcgttgatcaggcccttccagccgatggtggtgcgcggcttctcgaagtacacgcgcatgacgatgagcagctgctcaccgagctcgtccttcagcttggccaatcggtgcgcgtagtccagcgcggccttcgggtcatgaaccgaacaggggccgacgatgaccaacaacctgtcgtcttggtcgtacaggcacgcgcgaatctcatcacgcgagtaggcgacgatttcctgagcctgatcggtcagcgggagttcagcgagcacttgcgcgggcgtgggcagcggctccagctccaatacgcggcggttgatgatgcgactgacacccacctgatcttcccagcgcggcacatcagtggcaacgagcgggttcttcccctcccccatcgcctgacgaatggcgcgaagctcttccggggtgttcaacggctgcggaccgacttgcaacggatgcagcgaatgtgctgcttcctcctgctgctgcataacatctctccttggatcagtatctttcccaaggataaggtgtcacgggaacaaactgacatgaccaccgttattggcaaaaaatgctcactgagtgggtctcagtgagcatttttacaaagacaaagctatttagccgcgcggcgagtggcgacggcgtcggctagggtgtgcagcagctcgttggtgcgttcccacggcacgcaggcatcggtgacggactgaccgtagaccaactggtcgagcggggccggcttttggtgaccgccgaccaagaagctttccatcattacgccggtgatgccttgttcgccgtgcgccagacgctcagcgatctcttcgatgacttcggcttcgcggttttcgtctttgccgcagttgccgtgggcggcatcgatgacgaggccatgctggctcgggccggacgctttggaaaccttgaggtcttccagagcttgacgcacggattcggcatcgtagttcgggccgtggctggaaccgcgcagaaccagatggcaatccgggttgcctttggtttcggcggaaatcacgcgaccgtccaagttaatggacaggaagtgatgctcgaagccggccgcgaagcaggaatcggcggcggccttgatggagccgtcggtggagttcttgaagcccaccggcatggacaggccactggccagttcgcggtggacttgggattcggtgttacgcgcgccgatggcaccccagctgatcgcgtcgcagatgtactgcggggtgatggggtcaagccattcggtggcggcgggcaggccgaggctcagcacatcggtgagcaccttgcgggccagccacatgcccttacggatattgaagcgaccgtccagatcggggtcgttgatgaggcctttccaaccgatcgtggtgcgcggcttctcgaaatacacgcgcatcacgatcacgagacggtcttcaagctcacgcttgacggcagccagcttttctgcgtactcgtgcgcggccttcgggtcgtggattgagcaggggcccacgatgacgagcaatcgatcgtcacggccattgagcacgtcgcggatttcctgccgcgagtggagcacgagctcgctcatctcatcggtgagcggctgctccctgaggaaggcacgcggcgcgggaatggggtcaagctgacgaatgttgacatcgacggtctcgggaaagacggcctgctcccccaaacgacgttcatcctcggaactatccggaccacgtagtgctgccattgctcgactcctttccttgtatacgtaccgtcggtatggcgctatagacgcaaaagcccaactatagcagtctgttacggggactgcttgttgggccggcggttatggactttgggtgaactcgcctgcgtggactcgcctgcggcgatgctgtgttgttgtgcggcctgcgaccgcggcctccccccccccgtcagcggcttcgcgctgacagagggagagaccctagcagccggcaggctgcgaaaaaacacagcatcggccgtcaggccgattccgggaggctggcgaagtcaggccaaggcacccatcgggtcccatgcggggagcatggtggctggctcttcgagggccttctggtattcctccggcaacagggccttcgggacggctacctcgtagacgtattcggtgaaccagtcgtcggacatggtgaagtagcccttgtcggcgatcttggtgccccaagagttctccactcgccagcggcgggtggtgccgtcgtcggccacgtcaacgccggcgaaagccatggcgtggttcatggcggagtcaccgaagcgcacgcgggcttccttgtccaaatcgaagtccacgtcgtacacgcggccgtactcgaacaggtcggtggcccaagcgccgttctcacggtccatgaacgggtggcagtcggcaccgaaccataccgggatgccctgctcaacgagaatctgcttgacacagtccttcatgaactggtttggcacgttgaggtactcggtggcgtcgccgccagccacattgccgaggtgctcgatgccgatcttcttgcccttggcgtgctcggtgcgcggatcatccaccaggcacacgtagtcctcaagaccagccggacccacgtacttcttccagaactcaaccggcgtaatctcgccgtcgcggtggaattcgccatccttgtcggtccattcccagtcgaaggagaccggcggctcgcccaggtggatggtcagaatacggtggccggcagcagtggcgtcggcaataatcgcctcgaccttggaggcatcgccgtcagcggcgtacatgtgcgccacggcggtgtgcagcatgtggcgcagctgggtgttcatttcaccggtgttcttggaggattcggtctccgggaacaggtccttgggcacagcgccgtacttcttgtacacgttcatggccatggtccactggccgccatcgcccatcacgtcggcgagcaggtgctgcatcaggcgggagtcggaaggctctccggcagccaccagagcggccacatccttaaggaagtagttgacgcgctccagcttgtcgtagtacatcgcgtagttctgggagaactcgaactccttcaggttcatgttcttcttggccacgaaacgggccacgttcagggagctgaacagccagcagcggccggagcgatcctgatgggtggcttcgccattgtcaacgatggtggagaaacggcgctgcatcagacgagcgcggtcataattgcgagccaccttgtcgatgccggcggcggtcaccgcgttcatggccagacggttggtgccgctctgtgcgaaatcgccgcgcagggtattcaatgcttcgccggtcagaggcgtcaattcactcatgtcatactccttctgtgatggtgcgcttgtggcgcagatccaaacgaatacggcacctggctcgaaagcgcaggtgccgtaattcttaccgctagtagtctaatcgaaggcctgtcattcgccgttctgctcagatacggctggattctcctgagtcggggcctccggttcgccctgtgtctggtgctcggacggctcagacgattcggactgctcattctgcgtagctgaatcagccgaatcagccggtgccgcatctgtctcattgtgatcgtcggcagccgactcgtttccgctcaactcacccggctgatcatcggcctcgttgtgtacaggctggacttccgggacgggcgcgaccaccggcaatgacgccacggcagcggcttcctgactctgaccagaggccgccgcattaccaccgaaagcgaatccggagaacgcctgcgagaacatagaacgcagttccgaaacacgctgggtgatgacggactcgcgttcctgcagatcggcgatgcgcttggacagaccgtcaagctcgctttgggcggcggcacgacgctcctcgatctgcgcatcggcttcctcgcccgccttatgcacgattgcggcggcctggatgtccgcctcctcgcgcttggacgcggcatatgaatcggcttggtcgcgagtgttcttggcctggccgaccaactcatcggcttcccgcttggccgccacacgacgctcttcgaggtgctgcaggagttcgttgaccttcttcgtggcctcatcctgctgagcggcgatgtcgtgacggatctgctcgacttcggcgttgacctggctcatcgtgctggtgcgcttgacctcggcctcatcagtgatttcctgacccttggtcttggccgcatcaatgatttcgctggccttgcgctgggcttcggtcatcatcttggacacttgctcgcgcacgtcggcgagcttcttgttggcctcggcgagcgccgcctcaatctgatcgttggaatcggacttaagcttggtgatctcctcattggcgcttttgcgcattgcggcaacctgctgggtagcttccgccttcatatcggcgatttcgcgctcttgggtggagcgttcggaagccatcttcttggtgtgctcttcgcgcgcgttgctgagctcaagctcgacggtctgacgctgttcggtgatggtcttggcggtttcggagcgcagttgtgcggcgtcctcgttggcggaggtggtcactgattcggcctgattgttggcgttcgtcagaatcgaggcggccttggcattggcgtcgtcaacaatatgctgggcatccagcttggcgttgttgatcagcgtttcggcctgagcctgagccgtggtacggatggaggatgcgtcctgcttggcgcgttccaacagttcggtactcgtctgctcggcggaggcgagcatctgctgggcgttcgcccccagggaagcgaagctgttgccttccggcttcttgttcttctcttcctgaagctgggcctgcagttgcagaatacggtcgtcatccgccgcaatctgctcacgcatgctggccaacgtctgctgcgcacgcttcacactctcctgagtagcgtcgaaggcagcatcaaccttctccttgtcatatcctcgcagcaccaccgggaaacgatccaccatcgctgtttattcctttcgcacacgcataaagctcttggcacatccttgaagcactgtagcgcatcgcactagcgctgggcgttgagtgacgcgcaatcgttacaatgcgtgcgaaccatgttctattccggcgtggcgcgcagcgtgctaggcgatgaggatgccggagctggagggcttgagatagtagcgcacggcttcgcgcaccacatcacggccagcggcgatctgctggtcgagtggcagaccatgctggctggaatccgccggcacgaccggcgggaagctgacgaatccgcccagcacccgctcctgggtggcggtccagttcagcaagttgtagaacagcgaattacatacgaacgtgcctgcgtccgagctcagggtggccggaatcgaatcgtccgtgaaatcattcaggatcgagcgcaacggcaggcgggtccaataggcggccgggccattggggtcgatgggttcgcggcgtggggtcacgttgtccgcgtccggcttgatcgcgtccatcaggttggtggcgcatcgttcaagcatcacgcctcgggctgcgtgcttgagcccggtggcgatgacgatattgggcttggtggcctcaatcgtctctttcagcgtgggccaggctttggcgaagctcaccgggatgctgacggcatggacggtgacggcgacctgctccaacggatcgtccggagcagaggagacgcccaacccctgctcggcgatggccttgggcacttcgacggcgggattgacctccacgccgtcatagtggtcgaagccggagatcacaacattgagttcacgcataatgccagtctagcgatgcatctggccggccgcttgggccagcagggcgtgcatgcgggcgcgagcctcttccttgggatcacgaccgagaatctcctcggcgatacgctcagctgtgggaatatcctccagcgtggtgatcttcaggttggtttccgcaccggagacaatggcgacgggttcatcaggcagataatcgaccactacgcgcgtgtcgtcggtgggatggaagtccgggtcggcggcagccagatcgtaagcgtgacgaatcgtcgcgaagcggaaggattgcggggtctgcgcgcggaaggtgttcgggcggtccggcaccgacttgaccactttcaaatcgcccagatcctcggtcaacagcacggtgtcggttgaggtgtaggccacggtcgcggccgtgaactggtcgagcgcatcaatcgaaccgtcgatggcggactgttccacgaacggacggacggcgtcatggatcagaatcttggcatcgtccggaatgccagccgtagccagcatgtcgagcgcggcggcggtactgtccacacgttcgtcaccgccgtcaatgatgacgcggaccttggtgtagcccatctcgccaaccaacgtttccacttcgccgcgcaccttgggattgaccaccaccacgatgtcgctgacgcgatcgcaatgttcaaaggcatcaatgctccagcacacgatgggcttgccgcccacggagacaagttgcttgggattgtcggggtcgaagcgcgtaccgaagccggcggccagcaccacggccaccaccggcacggtttgtgccggtttggagccccgagcgggggccggctggacggtaggcgtctcgacgggggtatcgaaatctctctcagtcataggcaccaccgtagggtgagggctggccgtccgtgaactgcatcacatcttctccacggaatgtgctcgcattctccgtttagtcacgcacgatgagggcaaggaggcggccttcgtgtgttttgttggcgagcgcggcgcggcggtgcgagtaccacagtgggttttcgagcgtgcacatgctgtggctgatgttgtcgatgcgctccgcgagctcggccgggccttcgccgtccgtacggcacagttcggcgagttccgggtcttcctcaaggtactgggtggcggcgtgcacgcgcggcatcgaatcgaccacctggtgtacgccggcgaaggcgaggtcgatcatcgcggcttcggcgatgtcgatgccggcaccaccgaaacgggtcttcgtcttggtcagcgggaagcgcttgatgaactggtcggcgatctcgtcgcccacttcatagcagtcgccgcagatgcgcgggccgagtgtggccacgatgttcgccggatcggcacccttgctcttcatcaggtctaccgtggcgccgatcacaccacgctccagaccacgacggccgcagtgagccgcaccgatgatgccggtgaccgggtcgcccagcagcaccggcaggcagtcggccgcgaacatgcctagggcgatgccggattgtgcggtgacctggccgtccgcctcgatgacgtgcggagtgtcagtctcaccgtgtgtgccggacacgtcgaagccgaagggggtgttgatgacgaacgagtcgtccacgtccacagccacgccggaatgtacttgggagaccagcgataggcgggcttgcaccgcttcggcgagtgcgatgcggttcgacagtacggcctcaggttcgtcgccggacttgccgccgaggttcaggttgccgtaatcgccggcgctcaggccgcccagtcgcgtggtgtacaccaccttgatgccgggggccagtgcgatggggatggtcaccggaatagggcgaccggctttatcggtagagctgatgctgttggaatcgaggatttcttcgctgtattcaggcataaggcattctttcttgggtgcgggcggtgttcatgattcccatgaccacccccagtcagcgggggcggagtggtaggttattcggctttgagggtgggctttttggtgcgcgagcggatggcggcgttgatgggcacctggtgcgggcagggcatcgagaacacgtgcgccggattattgatggcgggtactggcgcgccatcggcatcgcgcaggccggtttccggcacggtaaagaccaatggtctctcgccaggcagcaggaattcaacctgttgaccgggctcgatcttgttacggctcatcagcgtgacacgtccgccttcgtccgcgctccagctcagcacttcgcccactaccagccatgagcggaagtaggcggagcggtcggtgttctgtgtgaccttgtgctccgggtaatagaagccggtggagtagtcgcggtgggccaccttgtcggtttcctcgagcagccattcgggcagttcgacgtgcggggccgggcgaacggccgcatgcttccaatcggtctcgatctgttcgaccgcggtgttggacttgcggcgcgtggagcgggcgtgggagctcatgccgtcgggttcgacggcggtgccggccgacgtaccagaggcagttgagtcggcggcatcagcaaccgtcacgcggtcacgttctgcggcaaccgagccggtgaccgaatcggcaaccgcagtatcagagccacggtcatatccctcatcggccacaccggcgaacgcggcatcggcattgctcatcacttgatcttcggttccttggccaaaatcggggtcgcccgggcgaatcacacggtcacggaaaggcttcagaacattgccatcagcgtcttcaaaaccgcgttgaatcatgtattcattaaccgcggttttgtaggcgttggtcatggcggcgatatagtaggcgcttttcgcgcggccttcgattttgaggctggtggcaccggagtcaatcaaatcatccaagtgccccagcatattcatgtcctgcgaattgaacagataggcgccgttctcggtctgctcgatcgggaagtactggccggggcgcttctcttccacgatcgaatacttccagcggcatggctgcgcgcattcgccatgattgccatcacgcccggtcagatagttggagaacaggcaacggccggagaacgccatgcacatcgcgccatgcacgaagcattcgatgtcgaggtcaccgggaatgttggcgcgaatatcacgcacggcctgcaagtccatctcgcgggccaacaccacacggcgagcgccaagctcatagaaggcgctcgcagcttggtaattggtgacgccggcctgcgtggagacatgcaattccaggttcggagccacttggcgggccatcatcatcacgccgatgtcagagacgatcagcgcgtccacgccggtgtccttgagctggccgacgtactcgcgcatggcttcgatctcgttgttgcgcggcagcacgttgcaggtcacgtacacgcgggcgccgcgttcatgggcgtagcgcgagccttcctcaaagtcctcaaggcttaggtttttgggggccgatcgcatgccgaaggctttgccgccgcagtagacggcgtcggcaccataatcgaccgcggttttcaggcccctcaggttgccggccggggacaacacttcgggctttttgcgggtggggaggttcatcgtcgtattcatcaccgcaatagtgtagtggtgaccgtgtaatgcgggcggggctaccgttaggctggataacatgaagatcgatatcgtgagcgtgttccccgaatactttgaggtgatgaacctcagcctgatgggcaaagcccaggccaagggattgttggagatcaaagcgcacaacctgcgcgactggacccacgatgtgcatcattcggtggatgatacgccggtcggcggcggggccggcatggtgatgaagcccgaggtgtggagcgaatgcctggacgaactgctgggattctcgcggccgtctgaatcctccgccctatccggcacaccggtgctcatcttcccgaacccatcggccccgttgtttacccaacgcgacgccaccgagctcagccatgccgaccatctgctgttcggctgcggccggtatgagggctacgatgcgcgcatcccggactactaccgctcccagggcgtcgacgtacgcgaatattcgatcggcgactatgtgctgaacggtggcgaagtggcggtgtcggtgatgcttgaggccatcacccgcctgatgcccggattcatgggcaacccagattcgattgtcgaggaatcctacactggcgaggacgcactgcttgaacatcgccagtacaccaagccggccgtgtggcgtggtattgcggtgccggacgtgctgttgtccggcgaccacggcagggtggaccgttttcgccgcgacgaagcgctggcccgcaccgccgagatccggccagaccttatcgcggcactggattgcaaggcgctggataaggccgaccgcaagaccctgatggccttgggctgggaggtctccgccacccatccgcgccggctcgccgattaattcaccacacggtgggagattcactacgcggcggaatcgtcggaacgctctatatccgagtcgtcatccgcgggctcgatgtagaagacggcggtttcgccgtagttgcggctttcagtgatttgccagccttcgggggcggtgggggtgtcggagcgtaccgagcgttcgagcataatcacggtgttctcgttggtggcgctgcccaccgccagattggccaacaactgattgcattcagcggtctcataggcgtagggcggatcaatgaatatcacgtcaaaggattcaccaaagccgccagccacttgctcggcctttttggtgaacacacgggccttgagcgaggcatcccacgaacgattcttctgtaactgcgacaaggtcttggtaatcagcgccgccgcaggccgggaactttccacggccacgagttctcgcgcgccacggctcagcgcttcgatgcccaacgcaccagtaccggcgaacaggtccagtacacgggcgtcatccagcactccccatgagtcgaggtgcgagaaaatcgcctctttggtgcgatccgtggtaggccgggtacccgttttcggcgtagcaagcgccacacccttgaatcgtccagaaattacacgcatagctttcactgtacaggttcatctgcgcataccaatcgtggaaaatggcggaatctcctttcccatcaaaaaaagattgcggaccgtcctcctctattaggaaagacggtccgcaacatttagtaacggatataacgcaatacgttaacgccggatggttcccttgaatggcttatccggagacaatgcgacacgtcccatatcagtccccagaacgttcagcgtaatctccgtgggcttcgaacagcgcaacgtatattccactgtctgatccgtccatgtcgcatccacttggattccacctcttgcgcggagcgcatggaagcttccctcatgccaatcctccggcagggccggaagaacgcgaatccagccatcgtggctttggacgagcatctccgacaaggccgccgggaatccaaggttcccgtcgatctggaacggcgggtgggcgcagaatccactgtcgtacactcctccgcccagcagattggtttcggcgttcgcatccaccggccgcaggaacatgcctatgattcgcttggcatgctccgcatcacgcagacgcgcccacatgatcatgcgccatacgatgctccagccggaaccatcatcgccacgcacttcgagggattttctcgcggcttcctccagacgcggagtcttagacgtgatgcctgcgccaggatgcagttcgtaaaggtgggacagatggcggtgctgtggatcggattcgatgaattcgtcgttccattcgaggattcttccatcagctcccaatcgcgtttcagccagttgggaacggacggattccgcttcacggaccagagcgctgtcctcttcgtcaaggttttccagatcgtgagaagcctgaatcaaatcatcaagcagattacgcacgatggccgtggcattctcactgctttgcgcaacggataccggttctccattcgccaggaaacagttctccggtgatgttgcaggggacggggccagcccatgctttgtctccgataggaaatccatgcagaatcgcgcgttgtcccgcatgatcggccagatgcgggccaggtacgatgcatcctggttgaacagatattcatcgaacaggttccggcacatccatgcctggccgaacggccagaacgaccacatcggatcgccgttcgcaggaagggccctacgccagagatcgacattatggaagacagccgatcctcggcagccgagaatcctgtcagcggcgtcgtgccccggtgccagcagctcctcattcatggagacgagcggctcgatgagctccttgagcgcgcaggggccggtcatccaatagttcatctcgacgttgatgttcgtcgtgtaggcgctgtaccagttcgggaagtccttatggttccaaatcccctgcagattcgcaggttgggtgtgtggcctggacgaggagataagcagataccggccgaaatcgaacatcgcttccgccagcatctccagacgatgcggttctttgttctcatccgagcgaaggatcgccgagaacggtagttccgtatcgtcatcatgggctgaaccgagatggatggccaccctgtcgaaatatctgcggtagtccgcgatatggcggtcgagcatggtctgcaggtcggtcgaccactcgtcgatggttttctccagatggtcggcgataaccgtcatgcttcgttccggctgctggtcgcttcccttgaatccgctcatactgcggaagcggagcgataatccggtgatgttcgagcattgcagactgttgtcccccacattgatgccgccacctgtgacggtaagggagaatgcaccggcgtacgccattccggttccgtcctgctcatcttcccaaggatgttcggaagggtgaggcaggagcccgatgttgagtccaggcatccggcccatgacgatgagggtggcccgatggccgtcggataccgcttccaacgaggcgcgtgattgcttgaggaaagtgccggagacactgacgttcacatcaatcggcgcatccgatgacattctgtagaccaacaggtcgtcgggctcgctgcaccatgcgtcgacatgaacgttggcatcacccatctggaatgtttcaccggcgagcgcccttgcaagatccagctggcgtttcatgctctcacggccgtctgcaggggtcgagtactgaatacgggccgttccgaacggctcgtaaatctgttcgtccttctcctgcagtgtggcttccttgatgattcgcgtggcggcggtgtaatcgtcgccggatgccgcctgacgtgccttggccacaatttccggcgtcactggtgaggtttccgcgtgtggatatccagaccaaagggtgtcatcgttgagatacagcacgtcggtttccggttcggaacacaggaccgctcccatgcgtccgttgccgagcgggatgccttcttcccagcacgaagagattccatcgaatgtgagtttcatggtgatatacccgccttatatccgcaccgcagccgcacggctgatcattggcgtgagccttgaatcatccacatgaagggtaaccgaagatacttcgacatcgtcgaaacggagtatcctgcggtatcccactgtgccggactgtccgagtacacactcagtgccgtcagatagcacgccagtgacgcgcatatgttcgatgcgctgcccacactctatggcctcttcgaccacaacggcattgatcgtcgtcagttgcgggaaagtgagcgtgacagcaggggccacgtcatcggtgctaggagaccaatacgtgtcttgattcccatcaataagtcgcattgcagcttcgttcgcgctactggtcttgacttcgcaacaagccgaagccaatgctttgcggaattcatcgatacggcttcccaaccccttgagtgactccacatccggttctgcgaaccgtccttctggggaaggaggaatattgagcagaagcgacgaattgccgccgactgcggaaagccagaggtcaaaaagctgatctgcgttcatgaccttgtcgtcttcatacttgtggtagaaccatccagggcgaatggaggtatcgacctcagccggataccaacagacatcatccccgtatccggaaaccgcctcacggcttccaaggtcgtcatcttgagagcgaaccgtagaggcaaaggacgcatcgtcctcctgctgtgatttttccatagtcagctccgccgagcgcagtcgtcggggcacgacgctccattcgttgtcacgcacatgtccggcttcatttccagcccaacgaacgtcgggaccgcatacggatatcaccgcattgggttgaagcgaacgaatgacgttgtagtaacgatcccagtcgtaatactgagtcttgccgttcttgccctcaccattggcaccatccagccatacagagaaaatcggtccgtactgggtgagcaactcagtcaattgtccaacgtagaaatcgtcatatgccttgcctttgccataggaatcttcggttcgatcccacggagacaggtatacgccgaacttcagtccatgacgtctggctgactcactgacctcacgaacgagatcccctttcccgcccctccatggcgaggcggcaacggtatgctgcgtgtaacgcgatggccacaggcagaatccatcatgatgcttgcacgtcaagatgacaccagtcattccaccagccaccagcgcatccatccactgttccacatctacattctgtggatcgaacagcgccggatcctcatgcccaagaccccattccctgtctgtcatggtattcatgccgaagtgtatgaaggcatacatttccatgcgctgccaggcaagctggcgcgacgatgggcgcacgtttgcgagatagttcaggttgatgcccgcatctgcaggattgctcattatattgctcctattcggttattagcgaatgacgccttttctgatgatgatgttcgcatactgtgactgctcacctgttgcaacgatgcagtaggctttttcggcctcatcataaaaggcgaaccgttccagcatgccaatagccgtttgcctgtcaggctcatgcttggcgattacctgacgataccgatcccatatcggggtgtcgacggcgtctccaggaaccttatccatcaaaaacaccggatgctccgtatattgatccaacggtataagctgc

SEQ ID NO: 29 - DNA, 4564 bp, Unknown
  R30_18m  MAG No. k141_9463
cccatgatctgttccatcagcccgttcagctgctcctgcctggtggcggaagcggaaaatccaatctcaagttcgttcataccgcccattatccagcaccaccggaaccgacatcgccgttcgacaacgcttttgagacgggtcggatgttatccatatgcatggtgcaacactggatagcggccaaaccaacggccgagagcgaaaggaagagtgtcatgccgggtctgttaagtgctttggaaggcttctgcgtcattggcatcgtcatcggcaccggttacgtggccgcgcgcatgcgcataggcggacctaccgcgcagatggtgctcaacaggttcagctttttcgtatcgagcccgtgcctgatgttcgccatcctgtccaaggagagaatcttcgagatattccactcctccattgttgtggcgttcttctcggccgtgctggtcggattggtgtttctgatcctcaataggctgttcttccatctgaaggcggcggatgccaccatcggcgcgttgaattcgctgtatctgaactccaacaacatcggtctgccgatcgccacgtacattctgggcaatcccgctttggtcgcgccgattctggtcatgcaacaggcggtgttcacaccgatcggcctgaccgtgctcgatgtgaccaccaaaggcaaggtctccacgagggagattctgaagcagccgctgcatcagccgctgcttatcggttcgctgctgggcatcgccgtatccgcgatttccgcaaaagccggtcatttcgtggtgccggactgtatttacgatccgatcgacatgatcggcgattccgcagtaccaatgattctgatggcattcggcatgtcgttgcacggcacgaagccgctgcaggacaagtcgaacattcccgcggtgttcacggtagcggcgttgaagaacatcgtgatgccaatcatcgcgttcctgctgtcgtatttcgtgatgggcttccgcggcgccacattgtacgcgtgcgtggtgctcgccgccctgccgaccgggcagaacgtctacaactacgcggcgcggtacaacgtgggtctctcgttcgcacgcgacggcattctcttctcgacactgacctcaccgatcttcatcgcaatcatcgcggtgctgctcggctgacctcgccagtcctcgccgcggtatccacgaccgccgcggcgaggccatcaatcgtccgtacggtagccggcatgaccgagcccgtgcgccgcatgattcgcggcacaccctccgagcaccatcagcgcataacacaagccgattcccgcggccaacgtaagcaacgaagccggattgagcaacgacattgccagaatcggaaacagcaacaacaccgagcaccccaacgaaacggccatcaccgtgttgagcggggtgatcacttccatcatgcgtgccttgtcgagcgtcgcctcatccgtaccttccaacgcaagcatgcggtacccgtcggcctggtcgtagacgttgcccgtctgcatcacgccggaactgacggcggcgagcaccgcggcaaaggcgagtgtcaggaaaccacccatcgctatatcgcgcatgtacagcatagatgggtcgaacgggtcgtggttgcctccgattccggtggcaagcaatccgcacaccgacgtcatcccagcgatgaacacagcgagcgccacaccggacacgttgcgccaagcacgcttgggattgtcgaggatacggcgcatggcaatcatagtggccgcgtccttcgggtgtttcgcacgcgatctggcgcgcatcgccaccacccaggtaccgacgacgttcaccatgatgaaaccgaggaagaagacgccgaagatgatggcgtagaccaccatctgacccaagtgcgcgaatgcggagatgctgttgagcagcaggtagcctacggccaacacggcaaggaaaatcagtgcgcgccatgcggacggcatgggttgtccggtacgttgcatcacgccaagcggggtgatggccacgcggcgtagggcgaccagcgcagagaccaaggcaagcagcgtgactccgacggtcacggccgccagagcaggcagtcccacccacaactgttcgaaggtgaaatgctggttttggaagtcgagcagcatgatcgccggtatcagcgcgaagtagccggccatgccgaccagtgcgccaagcagagcctggccacccgcatcgagcgcggtgagtttcgtgacctgcgcggtggtggcgcccgcaagtcgcagtgcggcgagacgtgcgtccctgcgggaggccgcgagacgggccgccgagccggcgagcgccacgaacggcacgatgagtagcagactggcgaatgcggcgagcatcacatagccgtcggaataggtgttcatgacggctgtggcctggtcggccgtccaatggccgtcgccgaccgtggcgacgagcttgtcggcgtgtgccagggctttggaccatgtttcgtatgtaccgggcgcgcacctgttggaatcgatcatacaaccgaacgtgtggtcggcggaggcccgccagatgaagccatgcaggcctccgagcacggttaggaagatggcggtggcggatgcgaaggcaacgatggccagcgcagaggtgcggccggatgtgccgcgggtgccggagcggtggaacaatcgccataatcggaacatgttcatcgtgcgcctccggcggtaggttgggattgctgcggcgagctcagcctgccgtcacgcatggtaacggtggcatcgcagaatgcggccacgttcgaatcgtgcgtcaccacgaccacggccgcgccggtctgtcgtgcggtccgcatgagaatgctcatgatttcgtggccggtggtctggtcgagcgcgccggtcggttcatcggcgaagatgactgccggctgcacggcgagcgcacgtgcgatggcgatgcgctgcatctggccgccgctcatttcgccgggacgttgttgcgcgagctggcgcaatcccaatcgttccagccatagcatggccgtgtcggtggcctgctggtagcttgcgccgcccagcatcatcggcaacgcgatgttttcgatggccggcagttccggcagcagttgtccggattggaagacgaagccgaaggcgctgcggcgcagtttggtgcgatcagcgtcgctcaaccgcgtcaggttggcaccgcgaaacatcacattgccggctgtcggggtgatgatgccggcgagtgcgtgcagtaacgtcgatttgccggaaccggacggtcccatgaccgcgatgctttcgcctgcttggatgccgaaatccacgtgattgagcgccagcatgtgtgtggcgtttggtgtcgcctgttgggtcgaataatccatgaccagatcggtcgcctgaagtatgtgttccatgtttcctacggtacggaaacggattggtcccggccatcagacggcgggatgaacttacaggtttccttccggcatgcatcatccgcaaggattagcgtaatcgcggactgcggatgagatgccgtatgtcagacgaggtgccaggacaggcggtgcaggtcgcttggcccgaattcagcgatggcgtcacggtgtgccgccgatccgtagcctttgttgttggcccattcgtagggcgcatattgcggctgcgcggcgagtttgaccatgagtcggtctcgtgtgactttggcgatgacggccgccgtcgccacggtcgcgcaatgccggtcgcctttgactttgcaggtcacgtccgccggaattggcacgtcgggtgcgtcgagggtgttgagtgctttggtgatgtagtcgttcggaccgtcaagaatcgcgccgattttcagattattcaacgcttccgatgattcagaagaccctgcgattccagcagattcacccccgccaatgccaagcttgcgttccgcttcggcgagcgcccgcagtgccgccacgccgagtgcgtacgaaataccccattcgtcgatttccgtattggaggctgctccgaccgcccatgcggcgcaccattgttcgagttcgtcaaagatggcttcgcgcttgtgttcggtcagcattttggagtcggccacgcctttcggcacttccagatgcgaagatttttgcgagtctccttgcgaagctccagccgacccatccaagtcacgcgcccaaatcgcagccgcaccaaccattaccggccctgcgagagatccacgccctacctcgtcaaagccgacgatcacatcgtagccttgttcggcaatagcgtgttccaaatccaatgtgggaattacagaaaccgccatcagaccgccgagcctccttctggaacgttgacgaacacttcatggtgcgaatcgagcccgctgatgcggttcaatggccaatatctcgcgagtccaacacccactacgtcggaaataggcacgagtccatgtgaggaatcgttctgatggtagcgagaatcggcggaattggcgcgattgtcgcccataacgaacacgtgtccttcggtcacggtcac

SEQ ID NO: 30 - DNA, 26127 bp, Unknown
  R30_18m  MAG No. k141_9771
cggcaggccgtatcatccgcgcgcctatacgctgggcgtcaacagttatcaccatcaggcgattcgcacgctgggccagggactggaaccgatggccactgcgccggacagcatcgtggaggcggtctggatgccggccaaacgtttcgtctgggccgtccaatggcatcctgagttctctcaccgcgccgatagcaaccaacgtcgcatcctcagcgccttcatcgacgcctgctgacgcaagctcccgccaatctcgacgaaacgtcttccaagaaatggcttgcccgcatccgcagccccctaccacgacatgagcgcccttgacaacgtcaccctcggcatgcgcttcacccgtgacagcaaacaggtcaggcagcgcaaggccaaggccatgctctcccggctcggactcggccatgtcgcgggagacaagatcatgaccctctccggcggtgaacagcagcgcgtcgccctcgcacgatgcatattgaagcccggggatttgatcctcgcggtcgagcccaccggcgcgctcgaccgcgatctcgcccaacatgtcttcgacgaaatgctccgcctccagcacgaatacggcaagaccctcatcatcgtcacccacgatcttggcatcgccgcacaatgcgacaacaccatcgagctacaggcggtttgacggagatattccggcagctttggtctaccgaagtcacgtgttgcccttcaatctcctcggaaatctaggtggcccattttttcaaagaatgcgatcggacgtaacgccccgtaaggagacctgcaatatgaaacgttgaatcgtcatctaaagatgacgttttcgtagatcttccggaatcgccagtcatctgcgatccggatatggcaccggtccggctcgatcgagcccggacgaccatggagaaaacgagcgatcgaatccgaacgcgggtaaagagcctgcgcgacaccattgataaagccaaatttaagaaaacagatcagtatgcataaattttacatgccttcagcctcgtcaaccggcagcgggccccagaatccagtcacagccaggcagagcgtacaacatactgcgtagtacatggcgcgaatcccaatgaccaccatcgattgatgacggccacgaatactcgtactcagccttactgctttggctcatttctgttcacttcacgctggagtaccgagacacgttgagcggaaataccggtaattcacgtacggttaccgaccattggcctgaacggtactcagcatccgcagtcacttgggggtatggtcatgacggagagccatcatgaccgatctctcattattctgggatgaatccggcgaggctggaactgaatctaaatattaaaacgcatgatgcacacgttgcggaattagtccaccagaacttcggcatgctcggcaggttcagcgggttcgatgtgacgggcacgcatggcatcgagggcggcggccaggtcggccgggtactgggaccggaccgtggtccagacgcgggtgcgaggatggcggaattcgagcttcatggcgtgcagccactgccggtcaagtcccaaagcttcagacagcaccggattggcaccgtacatggggtcgccgcacagaggatgcccaatcgaggagaaatgcacgcgaatctgatgggtacgtccggtctccagattcacggataccagtgtggcctcatggccgaaacgctccaacacatcccaatgcgtaacggccggtttgccggccggagtcacgcagaagcggaaatcggacactttggcgcgcccgatcggtgcctcaatggtcgctttgttctctttaagaccgccctgcacgagcgcatgataggttttctttacctcatgctcggcgaactgccgacgcatctcggtgtacgcaaggtcggacttgcacaccaacatcaagccggaagtgcctacatcaaggcgagaaacaatgccttcacgcccggccgcgccataggaagcgatatgcacgccacgatcacgcaacgatcccaataccgtgggaccggtccagccaaccgaggcatgcgccgccacgcctacaggcttatcgactacgacgacatcatcatcttcgtagacaacagccatatcagttgcgataggctcaggcccggcctgttcctccgccaaatcaaattcgacggtctcccccgcctgcaacatgctggaccgcgcaacttcacgccctaaaacgcgcgcctgtccggagtcaaccagatcggcggctttagatcgtgaaatacccagcattttggccacggctacgtcgaaacgcttacccaccaatgcatcgggagcagggaccattcgactcattacttggcgtccgcctccggctcagactgtagggattcgtcggattgctcgataagatccttgtgggagaacggctcccccataagaatcagaatcaccaggaccacaccggcgactaccagatagatatccgccacattgccaacggaccagccatagttaaggaaatccaccactttgccgttgaggaagccgtcagcgtacataacacggtcaatcaggttgcccagagcgcctgcaaacgcgaaagaaagcgccaccgaccatttcatggagatagtgcgcaccccagccacagcaagggccacgcaagccacaacggccaacagactgattacccaagtagcgcctgaccccatgcccaaggacgcgcccggattacgcaccaaggtgaaggacagcagtccgggaatcacgcgaatggtctgaccgttggataacgcggccatcgcccaagccttggtgagctgatcgacaatcagcgcagccgcggccacacatgcaaagacggccacgcgagtgcgcagccgtccctgttggttcgtcatacgacctgtacctgcctgcgctcagttggtcttggacgaggtctggtcgacgtagttgttcgactcggaaacctgcgatgccagctggccgaggtactcggtgaggcgggcgcggtattcagtctcgaactgcttgaggctctggatgttgccctcgacgaccttggactgagcctgaaggttgtcgcgcacctgctcggcatacgtatcggctgcagagcgggtgttcttgtcgtacgcatcagctgcggaacgagtgttcttgtcatactcggcggcacgctgctgcacttccttctcgtagttgtcagcgtcatcgtgctgagacttggagtagttgtccgcatcctgacgagtcttgacggagtatgcgtcggcctcagaacgggtgttctgggagtaggtctcggcatccgcgtgaatctggtcacggtaagcgtcggcctcggagcgggtacgatccgaataggtgtcggcgtcggaacgagtacgagtggagtagtcgtcggcctcggagcgggtacgctcggagtagttgttggccttggtgaccaaatcgttgtacttgttctggctggcctcggtgatttccttggccttgttcttgcccttctccacgtactgatcgtgcagctgcatagccagggtcagcatggcggtggcgcgctcgggctcggtgcccggcatggaagcgacgccagcgatcttctgcagagaaccggtctcagtgctcggctcgaccttggaaacctgggcacgaagctggttttcacgctgcttggcttcttcgagctgacgagacagttcagcgatctgagcggactgctgctgagcggcggaaccctcctgctgagcagcggcgagctgacgggacagctcctcgttggccgcgcggaactgatcacgttcctgctgaatggcggcgatctgctggccgacggcttcctggttaccggaggcctgagcggcctgggcggtgagctgatcgatttgagcgttcagctgatcgacctgacccttgagctgctcattctgggaggacagcgcgcggttggattcctcggcttcgctgagcttggcagaggcaagctgtgccgcctgatcattgccagcctgagcggcctgctgggcctgagccacagcgttcttcaaaccagcattctccgactggagttgctgcacctgaccggtaagatcggagatcttcgcattaaggttggtcacgtcagggcccagagactgagtggcctgaccgccggctaccgcctgacgtccaagagcctcgacggtttccgtgacctgatcaaggaagtcatcgacctcgtcgacatcataaccttccttgaatcgaacagtctggaaggtatgctccctaatatccttcggcgtcaacagagccataaatcttgcacctcgctttggggcattgcccgcacttacgttggtctcaagtcagaatgctatcacgaccccatcgtttcagaacattcaacgtgggtttttatgccagatatatgcctccggcgggtcaaaaacggcctcagaacactatcagaacaacactttctagtaccaccaacgcaaaatacagcacgatgaagctgacatcaagataaatcgagccgagcggcaatggacgaatatagcgacgtagccagcgcagagggggttcggtaatggaatacacaatgttgatcagctgggccaccacaccacgtggataccagtttcgtgcgagaacggagacccagtccagaatcatgcgcacgaacagaaccgtgatatacgcgttgatgagccatgcaagaatgcggccgatcagagagaacactaaggaaagcatgctgacagactaacaaccgcgcatgaaaagtttgctcggagcgcaataagaatcggccgactccttgctgggagtcggccgaataccgatataacgtcgaatgcgaaaactactgaaccggtcagtcagcgaacaaatcgtgggacgaggttggttttgtcggctcttcgaccttgatgttcacctgcgccgggctcaacaggaacacgcgcggagtgacacgctcgagggaaccacgcacgccgaacaccacgccggcggagaagtccacaatgcgatatgccacggcttcggccacaccggtgagattcagtacgaccggaacaccgtcacgcaatgcgcgaccgaccagctgagcatcctcatatgacttcggatggatggtggtgattctgttcacacggccaccggggaacggcttggtagtcgacgatgcggcaggcgcggtggttgacgccagcggcgtgaccgtatggtcggaatcaaatgcggacttcgaagccggcttctgctcctcgtcctcctcgatgtagtcgtcctcatcgtccacaacgtcactcatgcccagataggacatcgcgtttttcatgaacccagccatggatcaatcctttcagcgcaggaagtcagggatgtcgagatcgccagccggatcgttcacggcgatattcggatgagcggaagtcggatcatcaaaaggcaacgatgcggagtcaccgatagccggtgtgaatgccggttgggcagtggcagcgggctgtgcagccggtgccggtgctggagctggctgtgccacgggagtcgcaggatcggcggcggttggcacaaccggcgtcaccgtgctctgagtgtcgtcatcttgagcggcgacggggtcaaaaccagcagcaataacagtgacacgcacttcatcgccataagcatcgtccagagcaagaccccaaataatctgggcttcagggtgaatcgccttgcgcaccagttcggtggcagcagaggcctcctgcaacttcaggtcggtcggaccggcgatgttgatcagcgcaccgtgtgcgccttcgatgctttcctcaagcagcggagagctgatggcgatttcggcggcctgcgtggcacgatcctctccccgtgcggaaccgataccaaacagcgcagtaccagcaccacgaagaatggagttcacatcgttgaagtcgacgtgaatataggagttcatcgaaatcaggtcagtgatgccctgaacaccggcaagcagtgcggtatcagcggtcttgaaggcctcaatgatgccgatggaacggtcggaaagctcgagcaggcgatcgttcggaatgacgatcagcgcgtcgacttccttgcgcaggttgtcgatgccgtattcggcggaagcggaacgctgagggccttcgaagctgaacggacgagtaacaaccgcgatggtgagagcaccctgttgatgagccgcacgagcgacgatcgggctggcgccagtaccggtgccaccgccctcgccgcaggtgacgaacaccatgtcggcacccctaagcgcctcttcgatatccgactggtggtcctgggccgccttggctccacgctccgggtcggcaccagcaccgagaccacgactggacttatcggaaagggaaatcttgacatccgcatcagagcgcagaagatccttcgcatcggtatttaccgccacaaattcaacattctgtaatccctcggcaatcatgcgattgacggcattaccgccggcaccgccgacgccaacaaccttgatgttggtcttgtcgttgaactcattctgcgcgatctcgctcacgtttggctcctgtcacttcacggttacacccaagagtagcgcaaacaggctactcttggagggaaattcacgcgcagaatggcgcgtgttgcgtgtattttcagtattttctcagtaactggcgtccattgggtcgtcaccgaagagcgcctcacgctcttcgtgggtggtggtacgcgattccaaccagccatacggcaagtgcaccttcttggcgaaacgcacgcggccgcgcggtttgtcgaccacgcgtggcgggtattcgatagtcgggtcgagcttgccgatctcgcggtccacatcggccaggctctcgcattccataaaggccttgcgggtggagccgcccaccgggaatcctttcagataccaggcgatgtgcttgcgcagatcgtggacggccatcatctcatcgccctcataaaactcggtaagcagctcggcatgacggtgaatcacgcggcagacctcgcccagattcgggttgagccgttcgggattgccctcgaaggcgtttttgatgttggcgaacagccacggccggccctgacatccgcggccgatggccacgccgtcgcagccggtctcgcgcaccatttcgagcgcgtcctcggcaccccagatatcgccattgccgaataccggaatgttgaggtgttccttgagctcgccgatgcgggaccagtcggaatgaccgccatagtattcggcggtggtgcgggcatgcagggttacggccttgcagccctcctcctgcgcgatgtgtccggcttcgaggaaggtctcatggttatggtcgatgccgacgcggatcttcgaggtgacggggatgcccgccggctcgcatacggcgaccacgcgctggatgagctcggtgaagatgtcggttttccatggcagggccgagcctcccccgcgacgggtgaccttgggtaccgggcaaccgaagttcaggtccacatggtcggccatgttgccgtcgaccacgattttcgccgcctgttcggtgatggacggattcacgccatacaactgcagcgaacgaattttttcgcttttggcgaaatggcagagacgcagggctttcgggttgcgcgccacgagggcccgcgcggtgaccatctcggccacgtaaagaccatcgggaccgtattcctcgcagatcacgcggaacggccagttggtcacgcccgccatcggcgaaagcaccaccggggtcggcacggtaatgttgccgagctgcacgggggcgatgtataccggagtctcgggccgtgccggcgcgtccgtacgcgggtcgagattgttggtctcgtgagtagcggtgatggtggtttcggtttcagattctgccatgtggttcctgttctgaaatagttttggctcccctctttgaggggagctgccgccgtaggcgactgaggggagtcgcctcagcaagagccccccctcagtccacttcgtagacagctcccctcatagaggggagcctctatacagacccgtctttagtacagaccgccggcttcctgaacgccggactcaggccaagcctcgccgcccatttccacgggcttcaggggcacgcgggtgcgcttctcgccgatgcgggcggccacgtaatcggccaccttgtcgagggcgatacgctcctgggccatggtgtcacgctcacggatggtcacggcgtggtcctcgagggtgtcgaagtccacggtgatgcacagcggggtgccgatctcgtcctgacgacggtaacgacggccgatggcaccggactcgtcgtagtcgatcatccattcgttgaagcgcaggtcgtcggccaggttctgggccacggtctgcagttcaggcttcttgctcagcggcagcacggcggccttgaccggggccagacgcgggtcgagacgcagcacggtgcgcttgtcgacgccgcccttggtgttcggggcctcgtccacatcgtaggcgtccacgaggaagcacatcagggagcgggtcaggccggcggccggttcgatgacgtacggcacgtacttctcgccggtggcctggttgaagtagctcaggtcttcgcctgagtgcttggagtgcgcgctcaaatcgtaatcggtacggttggcgatgccttcgagctcgccccagtcggaaccttggaagccgaacttgtattcgatgtccacggtgcgcttggagtagtgggagagcttctccttcgggtgctcgtagtggcgcaggttctccggcttgacgccgaggtcgatgtaccagcgggtgcgggcgtcgatccagtactggtgccattcctcatcggtgccgggcttgacgaagaactccatctccatctgctcgaactcacgggtgcggaagatgaagttgcccggggtgatctcgttacggaaggacttacccatgttggcgatgccgaacggcggcttggaacgggaggaggtcatcacgttcttgaagtcgacgaagatgccctgtgcagtctccggacgcaggtagtgcaggctgttctcgtcctcgaccgggccgaggtgggtgcgcagcatcatgttgaagtcgcgtggttcggtccactggccacgggtgccgcagttcgggcagacgatgtccttcatgccgttttccggcatcttgtcgccgtgcttctcggcgtaggattcctcgagcttgtcggcgcggttgcgcttgtggcagttgaggcactcgacgagcggatcgttgaacacgctcacgtggccggacgccacccacacttcgggcggcagaatgatggaggtgtcgacaccgacgacatcaggacgggtgacgaccatggagcgccaccattcacgcttgatattgtccttgagagcgacgccgagggggccgtaatcccaagcggaacgggtgccgccgtaaatttcgccggcggggaacacgaagccgcgacgcttcgcaagggatacgacttcatcgagtttggactgagccacaatgcaccttctggtttgaacggtttggggtctaataacaaccgcttcaggatagccgtatacggtgacaggtcaggcggcattgtccggtatatgttccgcgtctcacgagcggccgttcgcagcgattcctatatcgcaacacctccatattgttcctgttgttttatccttcccgaatttgtaccactgacatcgcgtcagcgtcacaaatccgggagatattgctcggcggaggcgtctatatatcacgaatggacgggacgcgccagacctgacgacacgtatcgaacaaatccgtcacgataatgtccatgttggcgcatagcgtcggcactgtaatgcagggggactcgcatgtggttcgcgagttgagaaaggcctgagcctgacccttagaacctgttggttaaaaccatcgtagggagcagtaaatgagcaatagtgcatcatcgtttgccggtatgtccagcggttgtaccgccgggactccggttccagccgattcacccatccgcgacaatatcgccgatgccgttcgccgcgtgcgcgagacgaccccattggcccagtcgttcaccaatttcgtgaccatcaatttggttgccaacgcgcaactggcggccggcggcactgcggccatgagctttctgccggacgacgtgatcgaaaccgcgaaaatcgcgggcgcgaactacatcaacgtgggcacgctgctgccgttctataaggatgcgctgcccgaaatcgcccagcgactcaactacttggacaagccgtgggtgctcgacccggtggccgccggcatcggccacacccgcaccgccattcttcagaccttcaaggccgctcccccgaccatgattcgcgcgaacgcctccgaggtaatcgcgctggcgaacatgtgggggctcaataccgaaaccgtgggggacgcttccgagcaccgccccgccggagtggaatccgtcgacgacgtggagtctgcaaccggtgcggcggtggcgctggcacagtatctgaccgaacagcacgccaagcattcctcccatgacgcttccacccgctgtgcagtggctgtgtccggcatcgccgatctggtgaccgacggcgaaaccgtgtaccgactgccgggcggcagcgcgatgatgaccaagatcatcggtgcaggctgctcgctgggcggcgtggctgccacatatctggcggtttccgatccgttgaccgccgctctgtccgcatctctgctgtacaaccgcgcggcagagatagccgatacgacttcgcacgggccgggctcgttccaggtcgcgttccttgacgcgctgtggaatgttaccgccgaacaggtggcggaatccgagattttggtgcagtagtttcagttccctctgatgagggagctcataacagtttttcccaataagacttccacaagaaacaacaaaggtaggaataataatgagtaatgaatacccatacgcctccatgcgagacaacttcgacttgtccgcgtacttcgtggtggggccggaggactgcaaaggccgtccgctgaccgacgtggtggatcaggctctgcgcggcggcgcaaccttcatccaactgcgcgccaaggaggccgatgcctctgagctgaccgacatggcccgcgacatcgcgcagatcatcgaggacaatgagaagtccgattccgtggcctttgtgatcgacgaccgtgccgacgtggtgtggcaggcccgccgcaagggcatcaaggtggacggtgtgcatatcggccagaccgacatggagccgcgagaagcccgcgccctgctcggcgacgaggccatcgtgggtctgtcggctgagaccgaaagcctcgttcagctcatcaacgagctgcccgacggctgcatcgactacattggcgccggccctctgcacgtctccaccaccaagcccgaggcttccgtgggcggcaacgacggctccggcaagacactggacgccgcccagatcaacaccatctgcgctgccagcgaattcccggtggtcgtgggcggcggcgtgaccgcagccgatatggccatgctcgccggcaccaaggccgccggctggttcgcggtctccgccatcgcgggtgccgagaacccggaagaggccgcgcgcaccatggtcgaaggctggaaggccgtccgcggcgacaagaagcacggctacgcgccgcgcgtcgtagcccacacccccgctgctgatactcaggctgctcaggaaggggccgcaaagcctggctccgaggccactgagaagaagttcaccaacgccaaggacgccaaggatgcccagaagctcgccaagcagcagcgcgtggacatcgccgcccgtggttccaagcagcgcgacaaggcgcacatccgcaagaccaagtccgtaccgttcacctatcagtatggttcctacgacctggaagtgccgtacaccgaaatcaagctgagcgacacgcccggcgtgggcccgaacccgccgttccacgactacaacaccgaaggccccaagtgcgacccgaaggaaggtttgaagcccctgcgtctcgactggatccgcgaccgcggcgacatcgaagactacgagggccgccgccgcaaccttgaggatgatggtaagcgcgccatcaagcgcggccgcgccaccaaggaatggcgtggacgcaagcatgagccgatgcgcgccaaggaccacccgatcacccagatgtggtacgcccgccacggcatcatcaccccggagatgcagtacgtggccacccgcgagaactgcgatgtggagctcgtgcgctccgagctggccgccggccgcgcggtgatgccctgcaacatcaaccaccccgaggccgagccgatgattatcggatccgccttcctgaccaagctcaacgccaacatgggcaactcggccgtcacctcctccatcgacgaggaagtggagaagctgacgtgggccaccaagtggggcgccgataccgtgatggacctgtccaccggtaacgacatccacaccacccgtgagtggattcttcgcaactcccccgtgccgatcggcaccgtgccgatgtaccaggccctcgaaaaggtcgaggatgatgcctccaagctgagctgggagctgttccgcgacaccgtgatcgaacagtgcgagcagggtgtggattacatgaccatccacgccggtgtgctgctgcgttacgtgccgctgaccgccaaccgcgtgaccggcatcgtctcccgcggtggctccatcatggccgactggtgcctgcgccaccaccaggagagtttcctgtacacgcacttcgacgagctgtgcgacatcttcgccaagtacgacgtggcgttctctctgggcgatggcctgcgccccggctccctggccgacgcgaacgacgccgcgcagctttccgagctcatgactctgggcgagctgaccgagcgcgcctgggccaaggacgtgcaggtgatgatcgagggcccgggccacgtgccgttcgacaccgtgcgtatgaacatcgagctggagaaggccgtgtgcaagggcgccccgttctacaccctcggaccgctgaccaccgataccgctccgggttacgaccacatcacctccgccatcggcgccaccgagatcggtcgttacggcaccgctatgctgtgctacgtgaccccgaaggaacacctcggcctgccgaacaaggatgatgtgaagcagggcgtgatcgcctacaagatcgcctgccacgccgcagacatcgccaagcaccacccgcacgcgatggatcgtgacaatgcgatttccaaggctcgcttcgagttccgttggctcgaccagttcaatctgtcctacgatccggacaccgccatcgccttccacgatgacaccctgcccgccgagccggccaagatggcgcacttctgctcgatgtgcggcccgaagttctgctcgatggccatctcccagaacatccgcaaggcattcggtggcgaggccgctcagcagcagatcgtgaaggaggctgctgctggcatcgactccgaggcactggctaaggccaaggccaatgtcgataacgacgtggtgtccgccaacgtgctcagccccgaagaaatcctcgccggcatggatgcgatgagcgaaaagtacaccgcccaaggcggcaagctctactccaccgcccaggagtaaacctctctggctcccctctctgaggggagccaattattatgcccggtggtgtcttaattcgggacgacgctcgactcgctcgaaggcggtgacgaggtcggcagcacggatcgcgccgcggcggtccttggcggccaccagagcggcctcggtccagatggcgcacacttcggcgccgctccagccttcggtccgctgtgcgatatccaccaacggcagttcgccctcgattgacaacgaacgggcctgcacctgcagaatgcccaaacggtcgcgctcagacggcatcgggaaaggaatctgccagtcgaaacggcccggacgcaacaaagcgggatccacgtcctcaatacgattggtcgcagcgaccaccacaacattgcccttggactcgaaaccatccatcaacgtcagcaactgcgccaccaagcgcttgccgacgccattggtatcgttctcgcgcgaggacgcaatcgaatcgatctcatcaaagaagatgatggcgcgcttgtccgcctgcgcggcggcgaaaatcatgcgcagcgtttcctcactatcgcccacatacttgctcacgatggtcgggccggacaccagatagaactgcgcatccgccacattggcgatgatgcgggccagatgcgttttgccggtgcccggagcaccggtgaagatcacgcccttgatgggcttggcaccgatcgcacgcatctgcgcactgttgcccagctgcgtttcgataagctccttggcgcgcgtgatcacctgctcataaccgccgaacgaatcgaaggtaagcgacggatcgctgcccggcgtgatgcggtactgcttgatgtcgtcatcgtgatcggattcgcctgggcggatggccgtgggccacagcactcgttcgatgccgaacaggtcggtgaactgcacggtgttgccgggcatgatcgaattcgggtaatcgccttcaagcagttcgaggccatcggaagtctccaggaccacgccttcgttgagcgcacggcgcacgatgcccacacggggcttcaacggccacacatcatgcggcactttacgatagaaatccgtgccgacgagcaacacgtcgcccacatcgaacacctcctgacgcggaaatgtgagctgtgtggtgtgcccattaggcattacgccaaaatatgcggtgcgttcatcgtcaaaaccggtgatgcgtaccaagacgccgtcacggcgcagtacatcgttatcagccatgtcccctcccgaacatttcatgaatcaatcgcaatcagcaaaccctcccatctcaccacaggagcggcaaaacatcaaggaaaaccgctccgaaaaacatcatgggccccacttagaatgaacactatggcacagattgcaacatctacacttcccgctgttctcgcgatctccggctccgactcgtccggtggtgccggcatgcaggccgatctgaagaccatgctggcttgcggcgtgttcggcatgagcgccatcaccgcgctcaccgcacagaacaccaccggcgtgcgttccattcaggacaccaaaccggacattctcgccgaccagatcaacatggtgtttgaggatattccgccggtcgcggtgaaaatcggcatggtgtctgccactgacatcatcgacgtcattgctgaacgactcaccttccatcacgccacgaacatcgtgctcgacccggttatggtggccacttccggtgccaagctcatcagtgacgatgccattgcggccttgaccggcaagctgttcccgatggctacggtcgtgactccgaacattcccgaggccgaagtactgaccgatacgctgattcgcgatcaggaggatatggaggccgccgcccaccgcatcgtggagcgttacggctgtgccgcgctggtcaagggtggtcatggcaccgaggatgccaacgatgtgcttgccgagacggatggaaccgtgacctggtttgatggcgcgcgtatcaataatccgaacacgcacggcaccggatgcacgctgagctccgccatcgcctcgtatctggcgcttggcgacacgttgcccaaggccatcaagcatgcgaagaagtacctgaccggtgcgctgaagacccagctgaatctcggccacggctccggcccgatggatcatttctggaagtatcgctgacataagtgtggttgttaagctccccttgccaggggagcttaacactactgaaaaaggagaatcatggttcttgaccgtaatgccgttactcaggaagtgccgatcgacccggaaaccggcaaaccgtacctcaacaccgtggcagccatccaggtgtcggccaatggcgtgggctccgaggtttcaccatacgtggctcaggccgtcgaagtgattcgcgaatccgccctgccgcaggaaaccaacgccctgttcaccaacgtggaaggcaatctggacgacgtgctcaaggtggccggtgaggccgccaagaagctcgccgagcagggctaccgcacttctctggtgctgcacatggatatccgtcccggcttcaccggacagctgaccgaaaagcccaagctggtggatgagatcctcgccgacaagcaggcgaaatagcaaagcatcgcttccaccagcaagggcatgctttgttattacacgtttcatggggcggtaactcacccatagggcggtaaatatctcatggggcggtaaaaccctcatggggcggtaggcgaaaacggctctattctgcggaaaggcaaaatccgctaaccgccccatgggccaaataccgccccatgagtgttttaccgccccatgggaatcacggttctgccttctttcaacggggtaagagcgtaagtggggcatatataggagcgttacaaactctgttatcgttcataatgtgaccgcaacgcggcgtgccacaagatcgaacctatagttaagccccatgtagtgagctatctcacaacgattggctcgctacgtggaattcaagacttggactgcaaacgtcgttcatcccacacaatgggagggcgaacggaacacgcagtccaatcaagagttcgctcgccgcaacatcattgagcagttgcacgcgggcaggtttgcaagaagagggctcaaatatgactgctgctgaacagcagatttccggcaatcccgcggctatggaaagcgcacaagcacgtaccaccgtgacggatcaagccaaggttcaggatattatctcgcgcgtggatcgcgcacatgaaaccccgatgttccatcgcatcgtggcgctggtcgccgctggcatgctgatggacagcatcgacgtatatattggcagcgccgttgcctccagcgcgttggccacacactggtccaccgttgcgcaaaattccacctttatgtccgcaggcttcctgggtctgctggtcggttcgctgctggccggcttcgtcggtgacctgaagggccgccgcgtggcttaccaaatcaacctgctgctgtttggcggcttcaccttcctcggcgcattcgccccgaacatggccgtgctgtccctgtgccgtctgggtgccggcctgggcctcggcgctgaaatcgtcaccggcttcgccatggtcaacgagttcgcaccgatgaaccgccgtggccactggtgcgcgattgtctcgctcgtggccaactgcggtgtgccgatcgctatgctgctgtgtgcatggatcatcccccgctggtcctggcgtccgctgttcgtggccatcggtctgggggccgccatcatctggtggctgcgccgcgacatccccgaatccccgcgttggctcgccgtgcacggccgttacgatgaggccgacgccatcgtcaagcagcttgaggccaacggctccgaactgatcgacgcagccgccaaggccgacaccagcgacacccgcaacgccggcggccgttcgctcggcatctgcctgcttgtagctgtggttgctgtggccgccacgaacgtgtgctcctacgccttcacttcttgggttccgacgattctggtcaagcgtggtattaacctgtccagctcgctgctcacctccacggcgatgatgctcggtgccccggtcggctgcctgattggctctctgcttatcgaccgcatcggccgcaagcgcacgattgtgccggccttcctgttcactggcgtgttcggtttaatgtatgccttccagacctctaccgtgagcgcaattatcgttggcttcctgctcatgatgtgcctgtacgtgcttatggcttccgtggtggctgtgtacgctccggaactgttcgccaccaaggttcgcttccgttgcgtcggcttcgcgaacgccgtggccaagctgctcaatgtgttgatgcctatggtggtgggttggatgcttacctcgcttggtgccacgtccatctttgtggccatcagcgcaattgctattgcatcgatgctgattgtcggcttctttggcgcggagactgcgcagaagtcggttgggtgatcggtttcctcacagtggaataactgctgataatgtccattcggcgtcttgcgtggtgatatgcagggcgccgttttgttgttctagtaattgtcggtaacggttgagaccggtaccggtggataggtccgcactgccatccgcatccgaatccgatgacgtgcgggccatgtcgatgcaggcgatgcggacggtgtccagtccgatgccaatcgtcattacatagcccgcttccgggtcggcatgtttggcgatgttgccgtacagttcctccagcagcccggcgatcaggccactccgaccggctgcgccatgagcaccggaaataatcgtctgaccttcaaagccaagctctgataatcggcggtcaccattgctcgcaacatcacgaatttgctcggctagcgggcaatcagcgtctgtgatgccacatgcaatgccagaagcggcatcaacggtcgaatcatgcggagtcactgcactgtgcgccgcttctcccctgccttcaataacatcaatgacctgatgcgtgcgatccaatgcgcccatagccacgctacgcagttcgcgtaattcttcttcagaaggggtcttgccatcggcaatatccttgtcgaatcgcaaaatcaggtatgccaaatcattggatacgtaatcgtgaatgtcctgagctgtgcgttcctgctgacggcggtgagccaactccgctcgaaccaagctgcgttcgtgattccatcgcgccgccatgccaccaagcatgaagccaataaacaacacggccactggcatcacaccatagagggcaatcgcaccaagaatcacttgcccagtgcgatgctcggcagaagaaccgctcgattcataggcgcttccggtgaagtcgcttcccgactgccctgcgctgtcagacccactggatgaagagccaccatcagcagcgccaccatcagcaacactaccgtctagggcactactactcgccgcgccatccgcagaaccgctcatcgtgtctgagccgccatcaagccaaggaatggccacgccaccacgcgacaacatccacaccacaacggcaatgccggcaaccgccagcgccaatcgcttatcggcgtatccggcaatacccaccgccaataacacggcgagcattgcacccgacggcatccagatcggactcatgcacaacactatccaagccaccgctaccgccacgcatccggtgaccggacgaaacgccatccaccccacaatggcaacgaatatgaactccgcaaggcagtccgccgccgagacactgtcagcagccaagcccgccatggtttccatcgtgcatatcaaggcaacaaccagtatggcaatcaacagccatgcattgcgaacaccgctatccagctcggccaatcggtgtcgtaacgctttcatagcagttcctttcctaccatccatgccgttgcacataccgcccatgccaactcttaaatctcatgccgtttcacgcagattgatatggcatgagcgcgactgcgagcgccgagtttggcgagtgcgcggcgttcaaaagtcgccacagtggccacgctgatgcccaatcgctcggcgatttccttggtggtcgacccatccgcatacatacgcagggtgtcgcgttctttgccggaaagcgcgccacggtgcacgtatgacgtatcttcgagcaccgcgtaggcggttgcggcatccatgaaggacagcgaattaccgctcccctcatctcccagtaccagctcattggtcgacaatccttgggctgcattgcgaatagcgagcgcaatgccgttcaaatcggttttaccaaccaaggcctgcgccccgcagcgagccgcctcgtcgtgaaatgacgcgagcgcgtatgaggtgacacccaccagcccaacctcgggtgttttggtacgaatcgcacgacagacttcggtaccgggcacgtcgcccatagacatatccgtaaccagcacgtcaggccgcttggtggggctcaggcatcggctgatggccacggcacccaaatcgcaggtccatatcacggcaaaatcgctggacatgcgctcgattagcgcgccgaacactttcagcgcatacgggtcattgtccacaatgccgatgcgtatgttgcggttgcgcgcctctcccattacattcaccccttcagtgtgcccgacgccgaactgctccgtcctgacatgtcatggtcactatgacaactatcattccacatttcctgcgcgatttacgatggaatcatcatcaatccttgacaaggcggtaaaggaggactgcaatgaaccgtgcacaagcactcagcaagctcaacaggagcgatatgcgcaatgccgccgccgagcgcgggacgcaacgaatattcgcgtggaaccgcgcacattggattggcatggttgtactgatagcggtgttgttgctgctgcagtggagctcatcaatgtatctcatgcccgacgaggtccttgacagggctgccaaaaacctgttcgtatggttccccggtatggttctgcactggccattggtgttgggaatcaccaacctgatactcggttcgatacgatccggcagtctgtctttcccattggcgagcgcaatcatcggaccgctggcattcggctgtaccaatcttcgcttacggccggggttcccataccgttcctgggctcagtggtggaagctaatgcacgctgaaagcggccatcagctattggttcattcgttgatcggctcggccatgctgttgatctgttatacggccgttgcgttcatctgctatgcaatcggacgctacggtctgcgcgaattgtttgtggatccgaatccgcagacggcgagcggacgactgctcacatggattcgtcaggatgcgattcgcttcggctgctggctggcgacggcaatcatgtacggcttgctattggcgctgaccttacggggcggcatggctgcgatggccgccgcgttgctaatcaactttgtgattccgcccgccttgctggtcatcaacggcatctacgcgctacgcccggcctcactgacgtatccgtggaaaagcctgctgttcccgttggcgtgcacactggtacctgcgccgatgctcatggcgctcatcacggtgtatgaagacacgtgcccgataggaagtacctgcacgctgatcggcgaccgatacctctcctggggctcgatggatcaggtcttgcatttcgtcatcgtgttcgccgtggcgagcttcctcggattcggcgtggtgtgggccgtgcggtggattgtggctcgtcgcacaaaataagagagaccaaaatatactggaatcaggggcttcgtgcaatgatgcacgagccgatccaagcaaaggggctgaccatgagcgagaaactgatggaacagtaccggttgcgcaaacaacgcaaacgccgtaacgcttgtatcgccgccatcgtgacagtagtgcttgtccttgccgtcgccggcggcgtatggtggacggccggcgatggcagcgcactggttcgcaatatgttcaagccgaaggccacgcctgccacacagccggtagtcgacagcaccgcagccttcgcctaccgcaccgcaccggaattcctggcgatgggagccggcgaccgagacaccggtaatgtgaactactcccctgcttcgatgtggatggcgttggccatcgccgcgcagggcgccaatggcacgacccgctcgcaactgaatgagctgctgggctccggttcgctggccgacagcgactaccaatcgctgctgagttcggtcaacgggcaatattcgggggcgaaatccgagatgagcgccgcgaactcgctgtggatcgataacgactactcccttgccagcaattaccaatccaccgtcaagaaaatgttcgaggccgaagtcaccacgctaccgttcgacgatcaggccgccgccaagatgtccgattggattgccaaacatacgaatggttcgctcaagccgaagatcacgctgcgtgaccgtgaagtcctatccatcatcaacaccgtctatgcggatggccgctggaaggatccgttcgaagagcagtccaccggcgacggcaccttccacggcgaagccggagatgctcaggtgccgatgatgcaccggaccttcagccaaatgacttacagccatgatgagtacaacacttggcagcgggtggagattccattcgacaacagcggcaatctggccatcgtgctgccggccaaagggcatttcgacgagctggccggcaatgccgagaaactcggatgggcgttcggcacgtgttcgtcggcatcccctggcgaggacgcaatgggttgcaccgcggacagtctgcccggatggggcgtctccgtcaactcggccacggtgaacgtctcgctgccacgattcaccgtcgacagcatgttcgactcggaagccaccatcaaggcattcgaaaaactgggggtgaccgatgcgttcagtgcaggcgacgccgacttcaccaagatggtcgacaccgattcgcacggcgagaatctgtatatcggttcgattctgcaaggcacgcgcatcgaggtgaacgaggccggcgccaaggccatgtccttcaccaaagccggcgcagacttcactagcgcgccggtggacaacatcgagttcacggtggatcgcccattcctgtattcgtacgtcaccccggacggcataccattattcatcggtgcggtgcgcaacctcggcggagtcggtggagaacactgatactttcccgacagtccgtcaattagggtgtatcgtttgacgcatggctacgatgaaggaaatcgcgaacaaggcgggggtttccgtctctacggtgtcgctggtgctcaacggacgcgacgaggggcgcgtaaagtccgaaattgcggacaatgtgcgcgccatcgccaccaagctcggctaccggtcgaatccgctggccagttcgctgcgtacaggcaagacgcacatcctcggtttcatcagtgaggaggtggccaccaccccgtacgccggcggtatgattctgggcgcgcagaccgccgcaagccagttcggctatatgctcatcaccgtgagcaccgacggtgagaacagcgagagcgaggaaatcgccgcactcaagcgatacggcaccgacggtttcctgtacgccaagatgtcgaaccgcatcacccatgcgccttcttcgctggccaagacgccactggtgttggtggatgccaccgactcgcttggcaaaatcccgagcgtggaaccggacgagttccgaatcggctacgacgccaccaccagattggttaaggccggatgcgcacgtatcgcctatgtgggttgctcggaaccgatgattgcgcaggatggtcgtttggaaggctatcaggcggcgctcagggacgcctgcctcgactatgacgatcgtctggtcgtcaatgtgctcaataacgggccggcactgaccgcagtcagcgatttgttcgacgccgagcatccggacggattcttctgcttcaacgatgcccgcgcctggtatgtgtacgaatgcgccgcacgccgaggactcacggtcggcaaggacatctccgtgatcggcgtggacaaccatcgcgtgttcgccgaaacgctggaaccgatgctcaccactgtggaactgccgcatttcgagatgggctactgggccgtggccaagctggtgtcaattatcgaaggacgctcgatggacgacgtctcacggccagcgaccaccgctcccctgccgccgatcgacgcgccgattccggcgaagatccactgcacgctgatcgaaaaggcctcggtgaagtaaccgaggcccacgcgatttctcaaggcctccgttcagcgcggaggcctttttgcatgtcgaacgggtacgacacgccgatgacgtcaatcgattgacgtaaatcgattgacgtcgcatagtaattactacacaacaacttctacaaaggcacagccgcccgagcaggaacgtcacataaccaataaccaaccaagtagtaatcaaaggatgattatggcaagtgcaaccaaatccgcatggaagaatccttcctatctgcagagctctttcggcatcttcatgttcttctgctcctggggcatctggtggtccttcctctcccgctggctcaccgacccgacccacggtctgggcatgacctccgcagagcagggccagatctactccattaactccttggcaaccctggtcatcatgttcgcctatggtgccatccaagatcagctgggcatcaagcgcaagctcgtgatcttcgtctccgccatcgcagcgctcgtcggcccgttcgtacagttcgtgtatgccccgatgctgactgccggcggcaccacccgtttcatcggcgtgctcatcggctccatcgtgctctcctcaggcttcatggccggctgctccctgttcgaagcgctcaccgaacgctactcccgtaagttcggcttcgaatacggccagtcccgcgcttggggctccttcggctacgccatcgtggcactgtgcgcaggtttcctgttcaatatcaacccgctgctgaacttctgggtcggctccatctgcggccttggcatgctgtgcgtctacgctttctgggttccggccaagcaaaaggaagagctcaagaaagaagccgatccgaacgcggctccaaccaacccatccttcaaagagatgatctccgttctgaagatgccgactctgtgggtgctcatcgtcttcatgctgttcaccaacaccttctacaccgtgttcgaccagcagatgttccctaactactacgcttccctcttcccgaccaccgaaatcggcaacgccacctacggcaccctgaactccttccaggtgttcctcgagtccgccatgatgggcgtcgttccgattatcatgaagaagatcggcgttcgtaactccctgctgctcggcgcaaccgtgatgttcctgcgtatcggcctgtgcggcgtgttccacgatccggtcagtgtctccatcgtcaaactgttccactccatcgaggttccgctgttctgcctaccggcattccgctacttcaccctgcacttcgacaccaaactgtcggcaaccctgtacatggtgggcttccagatcgcttcccaaatcggccaggtgatcttctccaccccgatgggcgccctgcatgacgccatgggcgaccgtccgaccttcttcaccatctccggcatcgtgctggccgccctaatctacggcttcttcgtgatcaagaaggacgaccaggaagtcggcggtgatccgttctacaccgacaaacaactcaaggcccgggccgcagctaaagcgaacgactgagcgtaaccgccaaaatcggcaagaatacagctaaatcgtgctgcccgaagcgtttccccccttttttcgcttcgggcagcattcttacagcttttacttaaaaactcaataagcaacaattcaacaatcgcaagattcaacaatcattaagaaaggctattcaacgatgactggcttcactccggacgcacccgtcctccacgaaatcaagaaccacagcgaagctctggcacaggcggaagcaggcgttgcagccatggccgccgaacgcaacaaccgctggtacccgaagttccacatcgcatccaacggcggttggatcaacgatccgaacggcctgtgcttctataagggccgctggcacgtgttctaccagctgcacccgtacggcacccag

SEQ ID NO: 31 - DNA, 2777 bp, Unknown
  R30_18m  MAG No. k141_10613
gcattgatggttccggtgtgaaggtggcggtgctggattcgcaggcggtggaggattatcccgcgttgaagcatgcctcgatcacatacaagctgggacgattccataacgtggatgacaagacggtcgagtgcaaggtggacggcaagccgttgaccgcgacgatcaagtccggtgaaggcggctactactcctcgcacggcaccgacatgctggcatggatcgtgggtgatggaagcaactacacctcgaagtggcccggaatcatggggtcggcgcccaaagcggacgtgttgcatattacggatggggcggttaatgcggggcctgctgtgacaccttgcgatcagaaactcgcgggtgatgcgacaagcgacagtggtgcagatgtcaagacggcggtggactggggcgctcgcatcctcaaccgttctcagggaggtgctctcgtcagcacggattatgctgggtatgtggatgccctgcgtcatggggtcgtcatggtcgaaggacgtgcgaatgacatgaatcccggcttggatgatctgaccggcgacccgcgcagcatggagaccttccccggtgtggtgatggtgaacagcgtggacgagtctgggaacctagctcccacctcggatgttatggacggcaatgtggcggtgctgtcctatggcatgaacgtattagactcggtcaatcctctttcgaatgtctacgatatcgcgggcaatggcggcacgtcaaccgcggcagcggtgttgtcatcgtacttggcgctggccatgcagaagtggcccgacgcgacgggcaaccagatcatccagtctttgatacgcaacacgaagagcggcaagggcaagccggtcattgaccctgaacgcaagcgagggttcggtgaggtggacctgaatgcgttgctgacggttgacccggcccagtacaaggatgtgaatccgattctggagtaccagatgaaagcggccgcccaatacccggatctgaaggactggtacacgcaggattgcaagacgaacccggacggcgttggcaccgcggcggataatgtcccatgtgaggccgggctcatcgggcgggagtatgagcgtcagcaggcggcgtggaagaaggtggagcagtgccgttccgatggcggctccgactgcatgcaatactccgcgacgaacaccgccaatggtgcgaccacgtcaaccaagacgctgggaagaaagggtacgttccttgtctcgacgtggctggcttacatgattgctggtggtgtgaccgccctaatcgccggagtggtgattgcattgatcttcgttcatcgtcggcgtcgcgctgactaatgttggcaggatggtattgtgagcggtaatgatttggtagcgtaggcgccacgcgtaaacggccttcggggcacagaccccttcggaagccaaggccacggttccgggttcccccggccgtggccttttccatcgctcgcttggaaggcggattatgaaacgtgacatctccggatggctcggcgtcgtcctcctgctgctcggcgggctgacgctcagcgcaccattcgtcctgcaagccatcgactccgccggacagaccgcgagcgccgaggccgcagccctgcccacaccggacggcaggggatgatcgaggaagacaaggcatacaacgagggcctttcggcaaggccgcagtcggtgcttggcgaggccggggacaacttctcaaggacctcatacagcggggggacaaggagtaccgtgggctgctcgacgtggacggcaagggcacaatgggggcggtccgctatccgaggctgcacatagcctgccggtgcgccacggcacggactccgccacgctggagaagtcagcagggcacctctacgggacgtcgctgccggtgggagacgaatccacgcacgcggtcatcgcggcccaccggggtctggcggacaggctgatgttcacgaaccttgggctcgccgagaaaggcgacctgttcgagatcgacgtgcagggggagcggctgcattacaaggtgacgaacagcatgggggagtccacgcctttttgcttgcgtatggcgagccattcgtccagcgccccgcacatcacatcgtccaagaccacgattctctcgccgctgtccgtcttgggcgggcacaaccagaagccgttgcccagatcggtcacgtcctcgcccagaggccagtccgccctcccagagtccgggacccgctgcaactggtggtcgatcaccaaggcgcgtctgtcgttcagcgtcgtcagctcgtccatcgtcagtccgagccgttcgccctgcctcagtccggtggcgaaggcgagcagccagttgagacgccacatcgggtcgggctcgttccttatcagcttcgccgcctgcgcgggggacaggaccttcatcggcctgcgcctgcccgacaccgggcggaccatcttggccgggttcctccgtatgaggttttcgtcacgcgcggcctcaagtgcgttcttcaggacggaccaagtgatcgtggccgtcttcgggctgtagcacttcaggccgtcctgaatgtcggccatatccttatggcccagcgagttgatgcgcctcgcgccggctatcctgttcagccgcacgatggcgttctcgtagcttcgcctgctgttcggacgcaggttggcctcggcccgctcgtggtaccaagtctccagccagtccatgaggcgcggcgacggcgagttcggcgtgaagcccttgcgcac

SEQ ID NO: 32 - DNA, 6703 bp, Unknown
  R30_18m  MAG No. k141_10659
gcgctatcggcgcagcactaccgccctaacgcttcggcaaggaaatcgcgctgcaggatcagcagattttcggcgacggtttcgtcgttggtcatatgcgtgatgccggtcagcggcaggaacgtgtgcttgcgtccggccgccatcagcgcttggctcaggcgtaggctgtgcgcaatcgtcacattgtcgtcggcgaatccgtggatgagcatgagcgggcgatcgagttgcggcgcgtcggcgatgatgctgttacgttcgtacacggccgggtcgaggccgaggtaacgctcggtgtagtgcgtgtcgtacagcgtccagtcagtcgggggtgcgcccgcgcaggccgcagcgaacgtttccggcgcttccaacacggcgagcgcggaaaggaatccgccgtacgaccagccgatcatggcgacgcggttgaggtcgggttgcgggatggcggtttccgaggattccttgttttcttgcgcggccagtgttgccaacgctttcggcagcgcacgtacggcgtctacttggtcttcgagcgtcacggatttcatggtttcgtagatggcgcgatcccatttcggcccacgtccggtggtgccgcgtccatcggcggtgaccacgatgtagccttggtcggcccaccattgcgcatcccagtagaaggattggctttcgacgacttgctggaatccggggccgccgtaaggcttcatgagtaccggcagagtgtcggcatgcgcgtattcgctgctagccgaggggagcacgattgctgtgtacaggccacgttcgcctagtcgggtgaagcgtacgttcggcgtgaatccgggggtttcggcatggttttcgattggtgcgaccaccattgacgccacgtccgtaccattttcgtcggttgtggcgatgttcatgcaatgctgcatttgcacagttgcatcatccaggccgcggccggtcaccacgcagccgttgcctgcgcgagacatggtccactggccgggcgcgtaggtgaggggttcccatgtgccgtcatagcggatcgacaccacgtcgaagcttcgggcgtcatggtcggctgcgttggattgccagaggaatggcaggtcactttccggcaggatttcaggggtgcgctgtaccacgcagagcacgtcgtcgtcggtcacgtcgagtacttcgcgcacctgcagtccggctggggtgaatggcatgccgttcgtggtgaggcggttcgtgtcggcatccatgtcgttcatcgcgcagatcagacgtccgttcggcgtgaacgcgggcgtaccgtggatcaggtcgagccagtaggcgttgctgtgttcttcgagcacgcgcgtgctgcccgggcgttcaccttcggcatattcggggatggcgatggagaaggtttcgacttggtcgccttcgtcgtcggtaaatccgttttccgcgtctcgcatggtggcgatcggttcgcccacgtggatggcgagtacctgatcgtgctgctggagtcggtcttgcacgaggatgatcggctcatgcccgctcgtccagctgactgcggccaagtattcgtaggtttcatgatcccactgcacctcattggcgattgccccgtagcagcagttgtcgctgtcgaagccgagttccagcagggtcagtcgcacgttggcattggcggtcaatgcttgcggatagcggttggatcgtgcaggattcgcaggattggctgggtctgaaagatgccagattggttccggggattcgtcgtaggtttcgaacagcacatatttggaatcgggagaccaccagaagccgtcgtagcggtccatttcctcgcctgctgcgaattccgccaagccgatcttccattcgccgtcttgcgggattgaagcgactaccgaaatcgcgtctccgatttcgcaatcgtcgtcaccggaagccgtatcgaaagcggtatcggcaagatcgacattcaccagataggtgccggtggtgtacatgacatgttgcccgtcagggctgatacgcgggttcagtaccggcttgagctcgtcttcctctatggcgatggctcgcgtcacaccggctgcgatgtcggtgaggaagagttgtccgttgatggtgaaggtcacgcggttgccgcttgcgtcggtggaatagccgacgattccggaaccgccttcgcgtgcacgttcgcgacgcgcctgttcttcagcgggaacgtcttcggcgtcggcatcggcgagcagcgtgcgtggatcggcaagcagcatttcgctggcgttgccgttttcgtcgatcacgctcatccacagtgaggtgacggtgtcttccggaccatcggaacgcaggaacaatgcacgggaaccgtctgcaatcacacgcgcggcacgcggagctccgcaggaaaatcgcaatgtacgagcttttttacgaggaaactgtcgaatcacatctgtcatattcccaacctatcaccattccatatctcctttcccacagacatccatcgcacagcatgggaatcgaaatgatggtgacaaacccacaatcatataccccccaagtggtataaagaccgaaatagtgcatgaaatttttgcaattaaagggcttacgaattggcgctcggcgctctaccgcgtaggatgggtgaggatagaaagggacaagcatgagtgttctcgaccgatttgagaagagcgtggaaggcgccgtcaacggggttttcgccaagttcgggtccaaggacctgcagcccgtcgacctttccagcgcgctggaacgtgagattgataaagaggccatgcccgtcacgcgagaccgcaccgtggcgccgaacgagtaccgtttcaagctcagcacaccggatttcaacaacatcgtcgattggggtgccgaggcgctggccaacgagctggccgacaacctcacccagtatgcgaaggaccagcattatgcgttcgtaggcccggtcgtggtgatcttcgaagaggacctcgacttgaccaagagcaacttcaagctgacgagcgaatccgtgcagggcaacaccgtgcccgtcaccaccgaggcgcaaaccgaggattgcccgatgctggagatcggcgagcaccagtatctgcttacggaaagcaagaccatcatcggccgcggatctgactgcgacatcgtgatcgacgatccgggcatctcccgccgccatatggaaattgacgtcaccgacaatggcagcactgtcatcgcgcgcgatctgggctccaccaacggcatgtatgtcgaaggccaccatgtcgaggcggccacgctgctcgacggcaacaccatcaccatcggccgcacccgaatcctgtattgggcctcttcgcaggatcaggagtaaccaaccccaacctcgggagttgcctctatgctcactgaacttactttcgcgatcctcaagtacggcttcctcgtactgctttggatcttcgtagcctgcacagtgcgttcgctgtacagggatgtggaaacgctcagcccgcgcaagtcgcgggctcatcgccgtaaggagcgtcgcgcgcgcaaggccgtcgaagcgccagcgcccgtggccgcccccgcgccggtggtcagcgccacatcaagcgctaaacccaccttgctggtcatcatcgatggtcctcttgccggcagttccgtccccctgaccggcaacaccatcacgcttggtcgttctgcatcgaacaccgtggtcttggatgacgaattcgtctcgtcccatcatgcgcgcgtctacacggatcccgccaccggcaaatgggccgtcgaagatctaggttccaccaacggcactgtggtcaaccagcagcgtctgagcgcgccgatgatcctcggatcgcgcgttcccgtacgcattggcgcaaccaccttcgaattgaggtgacccgtttgccgacttcccccgcttcacaaccgctgttcatgtattccaccgtcgtttccgacgtgggtaccgtacgttccaacaaccaagattccgcgttcgcaggcgagcatctgatcgccatctgcgacggcatgggaggccatgcgggaggcgacaccgcctccaccatcgccatccgttcgctggctcacatcgagcaagacaatgtgcagggtgatgtccagattattgcccgcatgctgaaaacctcggtgatggccgcgcatgacgcgatcgtcggcaaggcgaagcgtgaacgccgcctcgcgggcatgggcaccaccgtcacttccgtcgcgttggttgcgggatattgggttgtggcgcatatcggcgattcccgcgcgtatttgctgcatgatggccgtttgatccgcatgacgtccgaccacagctatgtgcagcatttgatcgataccggccgcatcagcgagtccgaggcgcgcaatcatccgcagcgcaatgtcgtaatgcgggttttgggcgatttcgatatcgattcgcgcccagatatcgccgtgcgcaaggcgcatccatccgaccgttggctgctatgctccgacggcttgtgcggagtgcttgaggattccacgttgcaggaggtgctatccacctgctccgatcaggaagaatgcgctcaacagctggtttcaatggcgcttcgtgccggcagcaccgacaatgtcaccgcagtcatcgccgacgcgacgctcgccctcgacgcggacacgttcgacctgccgcatcagacgccgctggttggtggcgcggccagcgcaagcctcgaaccgatcgccgacatcatcaacgagccggtcgcatccgcacccgccctacgcgaaggcaagaagtcaccggcagcccgtgcggcggcattgcgcaacggtaagaatcccggcgaaaacgacaatcctccggaacagcgcgtggcacaaccctccacggtacgcgaggaaaacggcgaccgcgtcaatcccgataccggagaaatccccgtcgtacaaaaggatgacggccgtatttccgccgatccaaacgatccggaagtcgccaaagccatccgcaacgagcatatcgagcaacgcaagacgaagcgatcacgcacccgacgcaatcgcgtgatcgccatcatcgtcgccatcgtagtactgctgggactggcgggcggcgctttcgcaacctaccgctggagccaaaccaagtactatatcggcgataataacggcgaagtgtcgattttccaaggcgtaccgaccagtctgttcggcttccagctgtcgcatgccatcaccgacaccaatatgaagacgagcgaactgccgccaagttggcaggagcagctcgcgcagggcattcccttcgacacgtacggcgaggcgaaaacgcatacgcgcctgatcaaaaagcagctgaaacagcagcaggacgccgaagcgcggaagggacaagacaagacgaacagtggatccgacagcaagtcgtcaagcaaatcctctgatacgacttccgacaaatcgtcaagcaaatcaggtgattcgggcgacgcttcggcaggcaagtcaggcggtgaccagtcatgatggcaacccgtctgaagcaattcggcctgctcttgttcagcatgctgatttgcggcatcgcgttcttccagatgttcgaacgcaccaccggcggttttccgcataattacctgtggatgctcgcattcatcggcgcattgttcctgacttcctggggattgctgctgcggttccagccgtacgccaaccaggcgattatgtgctgcgtgatggtgctgacgggcaccggcatcatgatgatcgcccgcatcgatcaggattcgaacacgtccgtcgcattcaaacagttgctttggctgtcgatcgcgctggtcgtggcgaatctgctggtgattttcatgaaagattaccgtgtgctgcggcggctctcgtacgtcagcatggtgatcggtttggtgttactgctgtcgccgatgcttccggtggtcggttccgaacagtatggcgcccgtatttgggtgaggattcccggtttgggatcgttccagccaagcgaattcgcgaagctgttcctcgcgttcttcttcgcctcctacctctatgaccaccgcgaccaacttgcggtcggcggcaagaaggtgttgggcctgcagttgccgcgcatcaaggatctggggccgatcatcgtggtttggatcgtgtcgatgggcgtgctggtcatgcagcacgatttgggcacgtcgctcatgttcttcgccatgttcgtgtccatgctgtatgtggctacgggacgtaccagttggattgtgattggtttcatcgcgttcgccgtgggcgcgttcgcggcggccaacattttcagccatgtcggcgcccgtgttgacgcctggctgcatccgttcgactcgacgcagtacaacaaggagtatggcggctcataccagctcgtcacgggtattttcggcctggcatcaggcggcttgatgggcaccggccttgggcaaggtcacccgtcgctcactccgatcgccaactccgactacatctacgcggcacttggcgaagagctgggcctcaccggcctgatggccattctgatgctctatttgctcatcatcgccgccgggatgatcactgcgatgaaaatcaaggatgggttcggcaagcttctcgcatcgggcctcgtgttcaccatggccttccaggtgttcac

SEQ ID NO: 33 - DNA, 7002 bp, Unknown
  R30_18m  MAG No. k141_10767
atcgacgggtacttcgactacaccgtgcctccgctggagggcttatggagcatgggggagggtgtgcccggcgtcgattacgcgcacaaagccgacttccattggacttcgatgattcgtctgccggaattcgtgaccgatgaggtctttgcgtgggccaaggcatcgtttgcctccaagcatcccgaagtcgacatcaatcgtgcatatctcttcgacttcgatgaaggcgtggtcgcgcaggtcatgcacaaaggcccgtacgacgacgagcccgcaaccgtgacgattctggacggctacgcgcgttcgcaaggctacgggctcgacttctccgacacccgccgccatcacgagatctacctatccgacccgcgccgagccaaaccggaaaatctcaaaaccatcatccgtcatccggtagtgaaggtgggttgactttcagcgaactgctcgaagcgctcaccgcgcagtagcgtgaacaatctgccggaatcctcaccgtggtcaaagagcgctaccaagaactcgataagcaaaataactagaagcactggttcctctcggagagattctgcccgagcgaccttatgaatccttgcgcgggtcacctttcccggtgcaggaagcatccaggctcatgtgcattgatgacgccgatggattgcagataggcgtagacgatggtggtgccgatgaatcgcatgccgtacgtcttgagatccgctgcgatggcgtcggacagaggggatgtagtcatgcctgtctcgtagatgacgtgacggccggtgaaccgccaaatatagtcgtcgaaactgccgtacgacgtctggatatcccggaatgcgttggcattgccgaccgtcgcgacgattttgcgacggttgcggatgatgcccggatcgttcatgagttcggcgatcttgttctcgtcatagcgccggatccgttcgatgtcgaacccatcgaacgcctgacggaaacgctcgcgtttgttcagtatcgtctcccatgacagtccggcttggaaggtctcgagcaccagcatctcaaagaggtggtggtcatcatgcgacggaaccgcccattcggcatcgtgataggcaacatagacgggattgctgagattgcaccagccgcagcgtgggttcatgtcatccatgtgttctccctatgggtcgttggagacggtcggttctagatgttgattcgatgtgtgatccagtataaacggtgtgttcggatagcggtctggatgtgcggattgtctgaaccatatttgccggattgcaggtataaaggggttagttactgcggttgcgggtatttcggtactagttaggggtgattctgggctgtaactcgacaccttttacctgcaacccactcccgcccacgggattacacaatcggttgcaggtattttggtgtcatttgagattgggaagcggaaatcgatgtcgcatggaagcgaactgactagcaggtggggtcccaacatcacaaaagtcccttagaccgcaaggccatataggttctacggtcatcggataaaaccggataaatcgtttagcggtcggataaaagaagaagcccagaatcgttgagattccaggcttttttgtttgtcgggctagcgggatttgaacccacgacatcctgctcccaaagcaggcgcgctaccaaactgcgctatagcccgatgtgccattaaggcacgaggaatcattataaacgacgctggatacattgcgtgtcgagcatatgaattcaaaaaggttctggattctcttgatagcttatgagtgacatctttattcattgatgctctacaacgactaggtttggatctgcatcgatatccggcgcatccgctggactaacaaggaccgtgcaaacgatgtggcccccgacttcctgcgaggaagtcgggggccacatcgtttgcacggtggactatcggatcaattctgatcagatcagctcgaggtcgacatcgaggctgatcggcttgtccgccgggatatggtactgggggtgcaccggcgacatccaggaatcatcgccgccaacgcccatctgtgcggcaaggacgcgcaggaacatgtgcttcggcttcggcagctcgtcctggtgctgagcctcctcaagcatgaagctggagtacggcaacaggcttaccgcgaacggcgcggcaccatcggcgcggctgacgcgcatgccgtggccgtgatcgtcggtaatctcggcccaacgcacatcctcatggttgcccgtctcctgcggcatgaggtacggcgcatgatcggcgaaggcgttggtgctccacacgccgagcttggcgtgtttgcggtccaggtacgtctcctccgggccggtgccgaagaacctcaggttcgtgtactgcacaggcagcgtccattcgatgccgaacgccgggatggtgggcaggtcaccctgctctccggggtattcgacgtgcaggttcacgcggccatcggtgtgggccgtgtaggagacggtcaccttggtgcgctgcgcggtggcgagctcatacgtgtacgtgcccttgagcgtgctgtcgtcgatctgctcgagcacgttgtccacgcagcgggcatagcggccggcgcccagccactggacgcgctcgaagccgtgaccggcaccgcgatcgttgtcggtcagcggacggaaggtggtgattgcgggacggcgcagcacgaactcgttgccggcgaaggtgtaggagaccatgccgccctgggtgcgcgacagcaggacctcgcgtccggcgcctcgcacgccggcgttccaacggcccacggtgatggtcccatcggccggcttcgtgtcgggcgtcgcggtggcgtccgcgggcaccacggcctgtccgaaggcaagctcgtagccgctctcggcccaatcggtcgccttggcgagacgctgcgaaacctgcagcaccagttcgcgggcgtcggcgcggtacgccgccaccggccatgcgacatcgaacgtgcgggtctcaccggccggcacgtcgaaacgccgggtggactgccagaccggcttgccgtcggcgagaacgctcaggacgaacacgtagtcgctggtggcggtgaacaggttgtcgttcttgatggacaccgagtccttcgtcacgtcgatgtggacgttcgagtacagctgcttgacttcctgggccttgggggaaggcttgcggtcggcgaacagcaggccgtcgccggagaactcgtagtcggacggacggtcgccgaagtctccgccgtagcgcaggctcctggtgccgtcgggctgggtggcgtagatggcctggtcgatgaagtcccagatgaagccgccctgatatttcgggtagcgttcgagcgccgtgtattcgtccaggttgcccacggagttgcccatggcgtgcatgtattcgcaggagaggtacggcttcttcgggtcgtccttcaggtacttctcgatctcgtcggcatgcgagtacatgcgggtctcgatgtcggtgacgtcatcgtagtcacggttgtgggtcacgccctcgtagtgcaccggacggttcgggtcgatgtcgtgcacgtgcttgtacatggcgcggaacacgtcgcccacgtaggattcgttgcccagcgaccagatcagcacgctcgggtggttgtagtcacggcgcatcatgctgttgacgcggtcgacgcaggcgccttcccattcgcgcttgctgcccggcacgatggtgtcctcggtgaggacgtctccgggcagggaccagctgccgtgggcttcgaggttggcttcgtcgatcaggtagatgccgtactcgtcgcacagttcgtaccagcgttcctggttcgggtagtgcgaggtgcggatggagttgatgttgtggcgcttgcagaagaccacgtcatcgatcatgtcctgctcggtgatggcgcggccgcgttcggcgtcgaactcgtggcggtcggcgcccttgaacacgatgcgcttgccgttgatggtcaggatgccgtcctcgatgcggaagcggcggaaaccgaccttctgggacgtgcattcgatgacgtcgcccgcttggtcgatgacgtcgacgtcaagttcgtacagcgtcgggctttcggcgctccagggttcgatgccctgcagcggctcgctggagatcgcggtctgcgcctccgcgtcgcccgtcgtctgccacaccgtgttgccgtcggcgtccttcagggtcgcgcggaccgtggccgcgtcggccgcgttgagcacggtcagcgcggcgtcgagggaagcggtgccggcctcgggatcccaatcggcttcgatctgcgtgttctcgatgtgcacgtgcgggcgggcggcgagttcgacggagcggaacaggccgtgcagacgccagaagtcctgatcctcaagccaggaggcgctggagtattcgtagcaggcgacggccacgatgttctccccgtcgtgcagcagttcggtgatgtcgaactcattgggcgtgaagccgtcctcgccatagccgacgaacgcgccgttgacccacacgtagatcgccgtggccatgccgtggaacacgatcgacaccgatccgccggcctgcttggcgtttgccacgggggcggagacggtgaacttcctgcggtagagcgcgacgtgattgttctccgggatgttcggttccaacgggttctcgtggccgtcccacggatactggacgttcacgtacttgtggttcatcagaccggccgtctgcaggtggcccggaacctggatacgctcgaacgaggagtcgtcgaacgactcggccgtcgcgggttcctcttcgaggttgatgtcggcggcctgaacgacctcgacccgccactcgccgtcaaggctctgcttgagatcggaccattgtccgctctgggggtcgcgggcgtaccacttgtggctggaatgggccggagtccggttcacctcgaacaccgtcgggtcggtcagccaagcctgcgatgcgcgatcgacatgtgtgacgtctgtcatgctctcctgctttctgtcattacctcgttgtgaatgatattatggaggaggtcggggcctcctttaccgaaaagaataaacagtttttatataaaacgcaaatcctgtttaccgcttccaaatcactggcactgcttgccgtcgacgctacgccgcgtccatgcaatgtctcggttcagcccatgttatcccatccttgcgacacgctgtttatctccttgtttactaatgctttttactttcggtgataaaacttgtatgcttactttacaaaatcaatgagtgattccatgctctgggttcttaaggagaagattaatgagcaacgaaaatgccgcggacggtgacgtccgcaggaagagtggtttaagccagcgcatcgcctacgcgttcggcaacctcggtcaggccgccttctacaacgcgatgagcacgtacttcatcgtgtatgtcaccagctgcctgttctcgggcgttgacaaggcgcttgcggccaagctgatcggcgtcatcaccagcctcgtggtgatcatccgcatcgccgagatcttcgtcgatccgttgctgggcaacctcgtggacaacaccaccaccaagtggggccgtttccgcccgtggcagttcttcggcggactggtctcctccgtgctgcttgccgtggttttcagcggcatgtttggcctggtgaacgttaactccacattgttcatcgtcgtgttcgtcatcacgttcatcgtgcttgacgtgttctactccctgcgtgacatctcctactggggcatgatcccggcattgtcctccgactcccacgaacgttccacctacactgccctcggctccttcaccggctccatcggcggcaacgccatcaccatcctcgtgattccggtcgtcacctatttcagctgggtgttcaccggcgagaacgccgagcaccagtcgggttggaccgctttcggcatcatcgtcgcggtgctcggcatcatgaccgcctggaccgtcgccttcggcaccagggaaaaccaaagcgcccttcgcgccaacgccgaagacaacggtggtccgttgcaggcgttcaaggccgtgttccagaacgaccagctgctgtgggtcgccctgtcctacctgctgtacgccatcgcgaacgtgaccaccaccggtgtgcttctcttcctgttcaagttcgtccttgacaatcaggccgctttctccgcgaccggtgtcatcgccatgatcgcgggcctggtcatgtccccgctgtacccgattctgaacaggtacattccgcgccgctacctgtacatcggcggcatggtctccatgatcgtggcttatgtgatgctcgccctgttctccagcaacatcgtcctggtcttcatcgcgctggtgctcttctacgttcccggcacgctcatcatgatgacggtcatcctctccctgaccgactccatcgagtacggccagctgaagaacggcaagcgcaacgaggccgttacgctttccatccgcccgatgctcgataagattggtggcgctctgtcgaacggcatcgtcggcttcatcgcccttgcggccggcatgacgggtgacgcaaccgccgccgatatgaccccgacgaatatccacgtcttcaagatctgcgcgttctatgccccgctcatcctgatcgtgctcagcctggtggtgttcgtctccaaggtcaagatcaccgagaagatgcacgcgcagatcgttgacgagcttgaagccaagctcgcttccggcgagatcgtcgacgatgaggcgcagcccgtggcggccgccgaagccgccgcagccgccggtgatgaggcgcaggcagttattaagaactgatctcccgttcccatccctcccataaggcccgtccgcctgaaccgcaagatgcggtccgtggcggacgggcctgttcgttcctgcggtcggcggtcatgaaca

SEQ ID NO: 34 - DNA, 114220 bp, Unknown
  R30_18m  MAG No. k141_188
ggagctgactgtaaatcagccgcttcgtgcttcagtggttcgaatccactatccgccacgccccgatagctcagtggtagagcacttccttggtaaggaagaggtcgtgagtccaattctcactcggggctctctggcggggtagctcagctggctagagcgtacgactcataatcgtaaggtcaagagttcgagcctcttcctcgctacaaatcgcgcccgctaaccggtgggcgcgcactatacctaagaacacagaggtgaatgacaatggctaagagcgccgacatccgtccgggcatcacgctggcctgcaccgagtgcaaggagcgtaactacattacgactaagaaccgtcgtaatacgcccgaccgtcttgagctcaagaagttctgcccgcgctgcggcaagcagaccgtgcaccgcgagactcgttgatcgcaagcatcacagctttacaaagcccggcccattcggccgggtttttgcgtattgactccagagccgagtggtagggtgcggaatcagtatccgcatcgcgtaagaaacggcagaaatcccgcgtctgaacgaacccctcgcgggcgttctgccgtttcagccgatgattgccccgatatcgcacctgcgccactaagataggaagtcatgacaagctttgcagacatcaccaccatgggcgtgggcggccccatcgcccatttcatcgagccgaccacgcgcgtggggctcatcgaagccgtggaggatgccgattccaaaggcctgcccttggtcgttatcggtggcggctccaacctgcttgtttccgataagccttttgacggcgtggtggttcgagacgcccgacgcctcatcactgtgccggacgaggctgcaccggtagagggcgaggatcgcaccgtgcatgtcaatgccgaggccggtgccaattgggatgatttcgtggccttcaccgtagagctcgggctcgagggcgtcgagggactgtccggcattcccggcacagtcggcgcttccgtggtgcagaacatcggtgcctacggacaggaagtcgccacttcggtcgaatcggtggaagtctgggatcgagacaccaaaacaacgcgcgacctcacacccgccgatcttcgattcggctatcgatactccgcactgaaggccagcatgtacgccggtcccggccagccggccgaccgattcttcccgacgccacgttacgtggtgctctccgtcacctttgccctgacccactcggccgaaggcacggtaggttacggacagcttgccaaagcgcttggcgtcgaagtaggcgaccgtatggccaccgccgacatccgcaaagccgtgctcgcagtacgtgccgccaagggcatgcttgaggatcccactcgctacgccttgcccgacatggccaccgccaagcgcgaggccaatatcctgaccgatctggagcgtctggcctccctcaatgaggccgccggcgttcccgttggcgatgacggcctgcctgctcccgactacaatcgccacagctgcggctcgttctttatgaatccgattctgaccgtcggccaagcggcggccctgcccgaagatgcgccgaagttcgacgcgactctgcccgacggcactcccggcaccaagacgtccgctgcctggctcatcgaccatgccggctgccataagggatataaggtcgatgcggacgcgccggccagtctatccacgcagcacacgctggccttgaccaatcgtgggggagcgagcgcagccgatatcgcagctttggcgcgcgcggttcagcaggcggtcaagagcgcgttcggagtggacttggtgcccgaaccggtctgcgtcggtgtgctgtaatcgcgctattgatcgatggagtggggtattaatcccatatattgcggactctaagtcttattaatagacaagacacgcgggctcttctatactcgattgtcggtattgtgcgcattcggtgcgcaaacaacagagaaaaagaagagcactatgcaactgttccgtacgaaatccgtcgaacagaccattgccgaaacgggtgaagagggccgcaagctcaagcgcaacctgacttggtgggatctgtcaatcatgggcgtggccgtagccgtgggtgccggcatcttctcggtgggcgcgcaggccgccgccttccacgccggcccggccgtgatcatcagcttcctgatcgccggcatcgtgtgcggcgcagccgtgatgtgctacgccgaattcgcttcgatgattccggtggccggctccgcctacaccttcacctacaccacggtcggcgagatcatggcctggatcatcggctgggatctgattctggaaatgctgatggccggctccgtgatttccaaatattggggcgtatacctcaacgatttcatgcgcctgatgggctggaacgccaacaccaacctggcgttcggctccttccatatcgatatcgccccgatcatcatcgtggcgttctttaccacgctgctcgtattcggcaccaagatcggcgcccgcgtggacggtgctatgaccgtgctcaagatcgccatcgtgttctttgtggtgatcgtcggcttcttctacgtcaaggcctccaacttcaccccgttcattccgccgagccagccggcctccaccgtggaaggttcctccgccgtcaccggcgtgatgacccagccgctgtggcagttcgccaccggcatgaccccatccgtgtacggcgttcccggcatcctttcgggcgcggcgctcgtgttcttcgcgttcatcggcttcgacgtggtggccaccgcctccgaggagaccaagaacccgcacaagaacgtgccgctcggcatcggcgtgggcatgctgctcatcatcgtcatgtacatgctcgtggccgtggtgaccaccggcatggtctcctatgccgatctcgccaagcaagacagcccctcgctggccaccgccttcgaactggtgggtgccgactgggccgccaagatcatcagcttcggcatcgtgctgggcctggccaccgtggtcatggtgctgttgctcggcctgacccgtatcgtcttcgccatgagccgcgatggtctgctgccgcgcggcctgtccaagaccggcaagcatggcaccccggccgctctgcagatcgtcgtcggcgcggtggtggcgctcgtggccgccttcttcgacatcggcgtgctctccgacatggtcaacatcggcaccctgtccgccttcacgctggtggccatctccatcccgattatgcgcaagaagcgccccgacctgccgcgtgccttcaagatgcccggcgacccgtggattccgatcctcatcgccgtggccaacttctggttgatgctcaacctgtccgtactcacctggattcgtttcgtggtgtggctcgtggtcggcgtcgccatctacttcggctacggctactggcatgcgcgcctcggcaagggcgacctgaccgaaacgctgtccgccgaaaccgataaggccgttaacggctgagagcgaggagcgtcccaacgggcgcgtaccctcgtaccagtatctgttaaggaggattccatgccatatgtgatcgctcagccttgcgtggatgtcaaggacaaggcttgcgtggacgagtgccccgtcgactgcatctacgagggttcccgctcgctgtacatcaaccccaacgagtgcgtcgactgcggtgcatgcgaaccggtgtgccccaccgaggccatcttctatgaggatgatctgccggacgagtgggcttggtacaaggatgccgctgtcaacttcttcgctgaagtcggcgatttgggcggcgcttccgccaatggcccaatcggcaaagacccggaacaggtcgccgcgctgccgccgcagaaccagtaagctgatttgcggataagcgccgcacacagcgcatagttcggattgaaccctcggtctatcacggccgagggttcgtcgtatcttaggaacataccgtccaagaaaggggttctcatgggcttccacgcatattcgtcgccatacgactggtctcgtatcgccggcttcaaagccaccgccaaaaccgtgccgggtggcatgatcgacctgtccgtaggctcgcccgtggacccggtgccgagcagtgtccagcaggcgctggttgccggcgcagacgcccccaacgcccatggatacccggtcaccgccggcagcgccgaccttaaggccgctatcgatacatggttccgcgaactgcgcggtgtggatctgaagtccatcaacgctgccgccgtacccaccgtgggttccaaggaggccgtggcactgatggccagcctgctgcaccttggcgaaggcgatgtggtcgtccaaccggccgtctcctacccgacttacgaaatcggtacccaacttgccggcgccaccgtggtcaaagtcgatgatgtgaccgacgtcgattcctgggtgaatattccgaacgtcaaggccatctggatcaactcgccgtgtaatccttccggcgaggtcatctccgctgactggctgaccgacatcgtggctgctgcccgtcgcatcggtgccgtggtgctctccgacgaatgctatgcgttgatggactggcgttcggtgcgccgcaatacagcctcgtcctctgcgcctgccgcgtctgcatctgctgcgtctgtgcctgccgcaccggtggccgaatccaacgagcccgcctccgataccgcattcagtctctccgccacgccatgtgccctgaattcacatgtgtgtgaaggttcggcagctggcatcctggtgctctactcgctgtccaagcagtccaacatggccggctaccgtacggctctgattgccggcgattaccggctggtcaaggaaatggccgaataccgcaagcagatcggccagattatccctggcccagtgcaggccgccatggctgcgggtctgaaggacacagccgccgtgcacgagcaatggggtcgttaccgtcgccgtctatccgcgctggttgacgcactgaaggcatatggctattcggcacaaatgccctccggcgcgctgtacgtatgggtcaaggccaagtccggcgactgctgggccgatatggccgagctcgccaagatcggcatcatccccagccccggcgaattctacggcgctcccgcctacctgcgtttctccgccaccgccaccgacgaggccatccgctccgcctgcgaacgtctcacggcgtaatgagatcgcaagtggcgttgagccgttcacgccccaaactgggcggccttgctgccaaatttgcggcgtacggcgtccagtgcggcctcggcatcatgcaaacgtgcctgtgaggtctggccgcgggcattgtaggcctcttcgagcatgtcatccagtgaaggctgcacggccgtagccgccgcctcactgagcgaagacgtgctcataccggccaagcgaatagttttgggcaggggagtggcagactccgccgaggccggtagccccagcatgactttcagctgtcgcacgcattcggggtacagcacgccggccgtatcggtcggccgctccatcgtaaaagaccgggtctgatagctcaggtcggcgaaccgcaacttcaccgtcagcgtgcgcgccaccagtcccttgcgtcgcagcgtgctggccacatcgtcgcaggccgaacgcagcagaccgcataccacgcgcatatcgcgcgtatcctcggccaaggtttcctcggacccaatggatttctcctcgcgcaccgtggtgattttgcgggaatccaacccgtgcgaggccgcccataatccacgtgccgcagccggggagccagtggcgcgagtcaatgcagcttcatccagctgagccaattcagccaccgaatgcacgccccaagcattaagccgcttctccaaagacggcccgatgcctggaatgccgcgcaatggcatcatctgcacgaactcagccgagcgggccgccggaatcagcagcatgccgtccggcttggcattggtcgaggccattttggccaccagtttgttgcaggcgatgcccaccgaacacgtcacgtggaagcgctcggccacctgagcgcgaatccacgcgccgatcgcgctcggccgcccccactccagcagtgcggcggacacatccatatagccctcgtccaccgaaacctgctcgaaccggttggtgacggtcaaaaacacctcgtgcatgattcggtgcgacatcatgcggtaatacgccatatccaccggcagaaagacgccgttcgggcacaactgatgggcgcgcgcggccggcatcgccgaattgatgccgtatttccgggcttcatagctcgcggcggacaccaccgcgcgcggcccggtgccgatgatcaccggcttgcctttgagcccggggttgcgcgccacctccaatgaggcatagaaggcatccatgtcgatatgcagcacggtgcatccggtctcgtcgtggccccaatcgcgtttggcggcctcaagtctcggtgcggtgctcatgccaccattgtaggaatgccgaacgaggtcatgctcactatgtggcgcgcatggcgcggcgctcattgtcgtaatgccaaatatcgccggaattccaagggtttgcgcactgtgcggctgtttcgcatggtgggtgcgattccacggaatcgtccacattgcgtcactgtccgtaacgccttccaagtcgctgcgcgctgtcccgactctccgagtagcgtaaacctcgtgaagaaggcagtggtcggtatcctcaaccgtgttcccgtggtgcttatcgtgattggtgaggcactggtgatttatttggctacggccgtcgccaaacttgcgttcacccagctcgacccgctgtattcggtgtggtaccgcgtgggattcatggcggtgctgttgctgctgtggtgcaggccctggagcaaggctaagcgagcgcagctgtttcaccgcgacgcccgcggctgggggctggtcgtactgctcggctgctcgctggtgctgatgaataccctgttttatgtggccatcagcaatatggatatgggcattgccgtgtctatcgaatttttgggaccgctttcggtggcggtgattaccggcaaaagctggcgtgagcgggtcggtatcggcatcgcggcggtcggtgtggtgctgttggccggcatatcattggccaatccgtccggcaatggcacgtttttgtatggtctgattgcgattttgatcggcgggtcgatgtggggcatgtacatcatcaccggccggcgcgtggcggctggcggcaattcgctggataatctgtgcatcgccgtgaccatcggttggctggtccagtccctgttccttggcgtgccggctgtggctcatgtggttcaccccaaggccgatgccacgtgggcgcttgagcccggcggctcgctgaagctgctggctctgctgtttgtgatttccctgatggcctcgttcattccctatgtggtggagcagatcacgctgcgacgcaccacatccggcgcattttcggtaatgcaatccatcaatcccgccatggcggtggccgtgggactggcgtttggcgagattcccagcgttggtgaaatcatcggtgtggcgttggtgatttgcgcggttatcgttacgttctccggcgatgccgcgcccgcggacggtcaataatgtgtcgttcggcacgccgtatccgcaggacgtggtacagtaatttgctgttgcgcattattgcgtaacgtggagtcatgcctgagtggccgataggggcaccctgctaaggtgttagtcgtgtaaacggctcgagggttcgaatccctctgactccgccgattaaggttccgggtgaaagcttggaatcttttttgttttccggaaactcctgatgatgggcctgttcgcacttcgcggagtcagagggattcgaaccccgggaatacggttctggtgggttgtccggatatctgttttgcgacgcattcctgggaatgtgtttctaggggggttgcttgggggtctgttttgcgaaactttcctgggaatgtgtcgctagaaataaccgaaataaccgagggcggtcggtctccgcttgtggtaagcggagtcggaggtacgccattgtccgtccgcctccaaaccgccattttagcgggtgaacgagtgcggcacctcggggaaaggctaacaaacgaaagaagaatgtccactaagtgagacttttgcgtggtgttcgtgaatggtgattgaagattaaccggtttatgtcgcttgtccaatcgcttgcccatcgccttcctccccgcagtgtttgactgagatgggcggtatcctagagagagaagaagagttccgaagggtgggcaaagatgagccatatcgctgggcaggggcaacatcgctccaactcgacacgaaccaaccgtgcggcgctgattatcgtgttcgtgatcacgctcgccgttacgctgggcatcggcgcatggttcgcaacccatcgcacggacggcaatggccccgcacgcgccggagtgtcggacgtcgcgttgaataaagcgaagaacacgcccaaaccggtgaccgaacatcacggcaattcaccggattgcccggatacggactgcatcgccatgctggtcaacggcgatttgttgttccatgagggattgtggagccatttccaaggcccgaaccccaacgccacggatggcaccgccttcaacttcgacccgctgttcgcgccgatgaagcagtacattcaggcttcggacatcgccgtgtgcgaattcgaaaccccgatcgcccagcgcggcggcccatatgccgcgtacccgatcttcaacattccgccggaagtggcggatgccgcccgcaacgtgggatacaacgcctgcacacacgccaccaaccattcctgggatcagggggcggatggcatcgcccgtctgtgggacacgcttgaggccgatggcatcgcccagaccggctcgtacaaaaccgaagccgactccaccaaaccgttagtcatcgattccccgaccggcggcggcaagctgggtctggtcaccggcacggtctccctcaacggcatgaccgccgacgaggactggcaggtggatcgtctgcgcgaagacggcgacccgaatcacggcagcgacatccagcgcgcggtagacaaggccaacaaggcccgcgagcaaggtgccgatgtggtggccatcgccatgcactcggtgcaggaataccttgattacgccgattcctggcagatttcggaagcccatgagcttgccgacactggtgccttcgacgttatctacggtgccggctgccattgtgcgcagcccatcgagaactataacggcacgtggattatctacggtctgggcaacaccgtcaccgagtcggcgaacacgccggaaaccttggtcaacaaccagggtgtgaccgcacgcatccagttcgccggcaagaagggcgtcaaggggtcgtggcgcgtcaaccgcatcgactgggtgcccaccgccaacgtgcatcaaggcaactaccaatggtgcccgatatccagcgaccatcccataggcacatgttgggacgaagcctacgacgctcagatacgccaacgcatctgggatgtcatctattcgatgggcgcggaccagaacgtcgtcaaggaatggaacatcacgcaggagcaggcggcaaagcaatagttgctcggcttggtctcaaggaggggaagccgcaaggtgacgcttttcccgtcggcctcctaatgtggagcccatgaccgagatttacgaaacccaaagcgaacgcaccgatctgcccctcgtcgtgatgccgtccgtgctcgacgcgatgatcgagcccatcaaggcccagttccccgcgctccacgacgttgcccgcgtgcgtatgttcgaggaattcacgtccgacgaggcgaccatagccgagcgtctgaaggatgccgacgccctgctggtgggcggctaccacatttcggatgatctgctgcgcaccatcagcgagcaggggcacgtcaagtgcatcgtgttctgcggtaccggcgtcgccagctacatcaatctcgataaggcgcgcgagctgaagatccgcgtctgcaacgccgaacattatggcgatcacgccgtggccgagcacaccttcgccctcctgttcgagctcatccgccgcgttggccaactcgataaggatgtcaaggccggcaactgggcgtgggccggcggcgatggactgcaactcgccggccgtcgcatgggcatcatcggactgggcggcatcggcgccaccgtggccggcatcgcccgcgccttcggcatggaggtcgccgcatggaattcgcatgtgccgcccgagcatttcgaacgctccggcgccactccggtcgacgatctcaacgagctcatcgaaaccagcgacgtcatctccgtccatctgccgctcaacaacgccactcgcggcatcgtcaccgccgagaaccttgcgcatgtgaagcccggcaccctgttcatcaacaccgcccgctccgaagtcatcgaatccggtgcgctgcttgcccgactgcaaaagggcgatgttcccgccgcactcgacgtgttcgaccacgagccgctgaccgccgacgacgccatctgccatgtgcccggcatcgtcctgaccccgcacgtcggctggcgtaccgacggcgcgttcaaggagctcacccgccagatgatcgcctgcctgaccgcctacttcgccggcgaggactataacgtcgtcgtctccgaacactgatagtcctgtctagcctcgcgctcaatcgaacacccagtcagccgaccaccggaacacgcttatgcagacgattctcaacacgtccgacgatcccgcccacgattcgctcgtcgaaaaaaagtccgaattcatcggcgacgccgcccatgtcgatacgctcgacgaggcgctcgcgttcgtggccgcgatccgtgagcagcatccgaaagcccgacacgtggcgtatgccgccgtgtgcggaggcgcggatgggcgactgtccgaacgcatgagcgatgacggcgagccgtccggtaccgccggcaagccgattctcgacgtactcaagcagtccggcaccaccgattgcgtggttgccgtcaccagatatttcggtggtattctgctgggctccggtggtctggtccgcgcgtactcatccgccgcatcattggcgatgaaagccgcccgcgccgcccgcatcatgaccgccaagcgataccgggtccgtctcgaatacccgcagctggcacgattccagcagatcctggcgcagctcggtggcaaccaggaggatgaatcgtatgcggtgaacgtcgagttgaccgcggtggtgccgcaggatgattgcgcgcgattcgaggagtgtgtgcgggaagcgttcaatgccgcggtggtaccggacccgattgacgtggtcaacattccgattccgttcgcgtgacgcctgtatgactaagctgggcatcatgaccgacgagaacaccaccagccagcggacccagcccaccgaggccgcaaccgagactgcaaccgacacgggcgcccagcagcgggaccaaggcgcgcaggccgcagccgagtccgccgctccggtggatttcgaaccgctgaccgctacatacgaacgtctgcgtcattccaccgacccggccgaactgtccgaattcgcccgtcggccgttgcctgaccgtgccgatcaggcggcgttctcccgcgccaccgcacttttggaggctgtggccggcaacccgcacaccccggtggccgatcgcgtgttcctcgccgacaccatgccgttcccgaacgtattggtcaaactctccgaagaccccgaaccgtccgtgcgccaagccgtggccgccaacggggatgacaagaattggctggtcggccgcctgaccaaggatccggtacctgcggtccgggatacggcattgaaaaacaagcgcaccagctggaagatgcggcttgagggtgcgcaggaccccactgcggatgcggagacattggatttcttgggcgtacttggcaccgaatccgaagagggagcaccggcagtgctttcctcgatggtccgccgtgccgtggcgctgaaccccaatacgtccgaagcgatgcttgccaaattggccaacgacccctcggccgaggtgcggcacgccgtggaaagccgccgctaagcacactattgctgtgttttgccgtgcaaatttggccggcaatcaccctctattcaccattgtgagcgctcacatctcactatgtgagggtaaaaagtacataatttggcggaatcacggcattttgcttacggtgtggcgcaatcaaacggcgttagactggggctatgagtgagattaccgagagtgaagagcgtctggcccgtccgttgattcgactggccaagttggtcggtgtcggcacgagttatgtgggcatgagccatgactaccacgagatagacgatgacgtcctgatcgaggtgctggcagcgctgggcatcgacgcctccagcgagaacgcccaactcatcgccatccgacgcattctgaacgagcgttactcccgattggtggcacccaccgtgctgcatatcgccggtagcgaggaccgggtgctggtgaacaccggcattctggacgtgccttcggcgagcatcacgctggagaacggcgagccatatcagggcaccgttgaagttggtcctggagatggatcccaggcctacgacttggatggcacgttcatttcgaatgcggctgtggtcattcccgccgatctgccgattggctaccatacgctgcacgtcaaggtcgccgaccgtgtgcaagacgccactttgatcagtgcacctgatcgcgtcgatctgcttgacccgatgaagggcggcagtctgtggggctggatggcccagctgtactcgattcgctcctccaactcctggggcgtgggcgattacgaggatctgaagaccatgctggtggacgccaagcagaagaccggtgccgacttcgtgctcatcaatccggtacatgccgccgagccggtgtccccgctcaccccgtcgccgtatctgccggtaagccgtcgcctgatcaacttcacgtacatccgccccgaggcgatcgccgaatatgccacgctcagcgcgggcgacaagaacgccgtcgacggactgcatgccgacaccgaaccgctgaacggtgattcccagctcatcgaccgtgacgccatgtggcgcagcaagatgcacgccctgtggattatcttcaaggccggccgtaccgccgaacgccaaagcgcgttcgaccaattcaaggcggactgcggttccgacttggaggcgtatgccacgtggtgcctgtgctacgacaagtggggagcacccaacggcgaggagagcaactgggagcgcaagttcaaccgcaactccccggaaatcgccaatctgcgcaagcagtacccggacaccttggacttctaccgctggctggaatggactgccgccgagcagctgtcctccgcccagcaggcagccaaggacgccggcatgcatatcggcatcatgtccgatatggccgtcggcgtgcacccctccggcgctgacgtgtggtggaatcccgagcgcttcgccaagggagccacggtcggtgcaccgccggacatgttcaaccagcaaggccagaactggagccagccgccgctgagcccgatcaatctggaggccaccggctacgagacctaccgcaatatggtgcatggcatgttcgcccgtgccggtgcggtgcgcatcgaccacattctcggcctgttccgcctgtggtggattcccgagaaccggtcggctatggatggcgcttatgtgtactacgactcagacatcatgctgggcgttctggccatcgaggcctctcgcgccggcggcatggtcgtaggtgaggacctcggcgtggtgccggaccatgtggccgattccctgtcgagccacggtattctcggttgcgccgttgaatggttcgagcagtgcgacggcgtgttccgcgccccctcccagtggcgtccgtacgcattggcctccgtgaatacgcacgatttgccgccgaccgccggttacctggaatacgagcacgtcaagattcgtgagcgtctgggcttgctgaccggcccggctgaggaattcgaagcctccgcaaaggccgagcaggatgcgatgctggccatgctggtcgagcagggctatcttgatgccgacttcgccgaacatcgtgaggatcacgaggcggatatcatcgacgcgctgtaccgcgcactgaagggttcgccgtgcaagctgctcgccgcctcgatcaccgacgcggtgggggagaagcgcgcgcagaaccagccgggcaccaacaacgaatacccgaactggcgcatcccgctggccgacgccaagggcaacgtggtaccgctcgaaaccctcttcgacacccccggcgtccaacgcttcgcccaaatcttcaattcctgacccactttacctccctctgacgagccgagtcgttaagcggacagtccagtggactgtccgtagacgaggcctgaacgaagcgatagctgagagaaggcagggaattgcctcaccgtaggcgagtcggttagccgaagtgggtgggagagaaaccataaataggggaagagaagccataaacccaatggagtgtccccagttgccctatgtcaagcccggcgatatactagtggattgttgtgtttccctaaggggtccttcaaagcgctatcccactcgccatcgaggactttcagggagcccacggataatgaggttcgatgcctcttggatgcggccctgaccaagccacgccaagcagctgagacccggaacacaatatagaaaaggtaatccagtgaaaactttcactccgaagccagctgatctgactcatgactggtatgtcatcgacgccaccgacgtggtgctcggccgtctcgccacccaggctgcaatcctgctgcgcggcaagaacaagccgacctacgctccgcacgccgattccggcaaccacgtgatcatcatcaatgccgacaagattgctctgactggcaacaagatgggcaaggaactctactcgcactccggtcgtcccggtggtctgcgtcgtgactcctacgccgagctgctcgagaagaaccccgagcgcatcatcaagaacgctgtcaagggcatgctgccgaagaaccgtctggccaaggtgcagctcgaccgtctgcgtgtcttccgcggcgccgagcacccgcacaccccgcagaagccccaggtcttcgagatcgcccaggtctcgcagcaggccaagtgaaacctgagaggagataagaatcatggctgaaaacaccaacgactcccaggttgtcgagaccgaagaggagctcaccaactacaccaccgagaccaacgctggcgctggcaccggcacctccgcgatcgagccgggctacggcaccggtcgccgcaaggaggctgtcgcccgtgtccgtctggttccgggtgacggcaagtggaccatcaacggccgcaccctggaggagtacttcccctccaagctgctgcagcgtgaggtcaactctccgattgttctgctcaagctcgaaggcaagttcgacgctatcgtcctcgttgacggcggcggcaccaccggccaggccggcgctatccgcctcggcgttgcccgcgctctgaacgccatcgatcgtgatgccaaccgcgccgccctgaagaaggctggcttcctgacccgcgacgctcgcgtcgtggagcgcaagaaggctggtctgcacaaggcacgtcgcgccccgcagttctccaagcgttaatttcgcttgtcctgtaccgagcatgcaaaggctctccgtggaattccgcggagagcctttgtgtttgtgtcgtgctgttttgagtgtgactcacacctgtttcatcagcgtgatgctcagcgccggcatggtccagacattgtcgtcgacgggagtgtccggcgtatcatccacaggggcatcaggcatatcagctgatacctcatcccgaggcgcggacgaggtgccgtttgcggcgtgatccgttgctggcatcgcgaattcgatggtatccgcttcatcctcagtcgaggattccgtgcgctgcatggccacttcttcgaccagcgtgcgtaccgtctcgctggcgtccggtacatgctgcgtccaaacggtggtgtcatcgttcaaatcgcattcctcgacctgaatgccatgcccggctcggcggccgttgatttcggccgagcaccatttaggcgtccagtgagtgtctggcggcaggtggaatgtgcggtcgtcagcggtgccgttgaccacaatgcacacgtccacctcactgttggacagcaatcgcatggtgaagctacgtacgcccagatcgaaccagtcacgctccatcggcgtggtgccgtcgggcaggaaccactgcacgcggcttgagggcttgagtaggccgagttgggtcagtcgggtgaagaagtcctcgtggtgatacaggtccagtgatttacgtagcgccaccagtcgagacacggttttcaggcgacgcatttcgcgtgtcttgttggtggaatacatccaatcccacttcagccacgtgatgtcgttgtcttggcagtaggcgttgttgttgccgtcctgtgtgttgcggaattcgtcgccggcgagcatcatcggcgtacccagcgagagcagcagcatgccgatcatgttcatggccgcctgttcgcgtgccgtgatgacgtctggatcatcggtgacgccttcgacgccgaaattggcggaatggttcaccgacgagccatcattattgttctcgccgttggcttcattgtgcttggagcggtatctggtgaggtccgtcagcgtgaaaccgtcgtggcaggacacgaaattgatggaggccggagcgccgcgcccgggttcggtggcgaacagatcggccgagccgcagagtcgcgtggccatctcctgcaaactgatacgaccgaaatcggagccgccgtccacatcctcaagccagaaggtgcgggccgtgtcgcggaagcggtcattccattcggcgaacggcacggagaattggccggtgcgccagccgaggttgcccagatcccacggctccataatgagcttcaggttgcccagcagcagatcggaacgcagggcgtagaggaacgggtgatgatgggtgaattcgccttccaggcgggccagcgtgacgccaaggtcgaaacggaaaccgtctatgccgatacgcttggcccagtatcgtaatgagtcgatggcaaaggtgaccacatgcgtgttggtgaagtccagcgtattgccgcaaccggtggtgtcttcgagtcgaccggtattggatttttgatggcgatagtaggccaggtcgtcgaggccgcgccagcagaccgtcgggccttcgacgccgccttcgcatgtgtggttgtagaccacgtccatgatgacttcgaagccggcctcgtgcagcgcgcgcaccatgtctatgacttcttggcgcacggcggccgcgcccttctcttgggctgctttggtggcataggagggttcgggggcgaagtagctgagggtggagtagccccagtagttcttgcggccgtgttcttgcaggaagagctcgtcctgcttggccataatcggcagcagttcgatggaggtgatgcccaatccctgcagataggcgagcgttgtggggtgggcgagtccggcgtaggtgccacgcaacgcttcgggcagccacggcgcgttggcggtgaagcctttgacatgcatctcgtagatgacggttttgcgccacggcacatgcgggtgctgcgggtcgccctcatgcttatggatatcgcgatcgtcgatggccacggacaccggcacatggccgagcgagtctacggtgctcatggcaccgtatgccgagccggttaccttgtggtccacgacatcgcattcataggagaaggcggcgggggtgagctccatggagccgtcgatgcccttgccatacgggtcaagcaggaatttgtatggattgaagcgcacgccgtgtttcgggtcccatgcgccgtccacgcggtagccataacgcatgccgtcccatgctttgggcaggtgcacgtaccacaggccgtagttcggtccggtcatgcggaacagggtctcgcgcagatacaaatgttcgataatgcgcgtgcacaccggaaactcatggatctgctggatgaacgaggcgttcgggtcttcgaacaggcggatggcgtcttggaagaaggcgccgggctcgtcaatgggctccagcacacacagccaaacctgatcggcagtttcggaacgaacaacgacgtcagccccaccgtcgtcagtgaagtacagccctgggcgagtggcgtaacgatgcaacggtgggtttttcatacctccattgtagacgtgttgtcacttctggtggaagcccttgatttcctgccgcgttccgcagcaccacagatatcgtcgagataattctcggcgaatcgcaatgcggcaccgatgatgttctggtcttcggcgcagtagctcttgcgcagattgaaatggtcggtgccgaacggactgcgtgcgatgacgcgcgccttcagatcctcgatgtcactgtcttcaagatgctgggctgcttcaccgccgacaatcacgtcgcccgcgatgatggatcgcgcgttgacgatggcctgcgccacgtaatccagccattcgtccatgcgctcgcgatgatgccgttcaccctgctcaagcacgctgaagaagccgggaatactttcgtaatcctcgggcaaggtctccggcgagcagtaggtgtccatgcaaccgcgctggccgcagtagcattcgcggccgcccggcaccagcgtcatgtgttcgatggcgccattgcacatattcggaccctgatacagcttgccgcccacgatcaccgcgccgcccgggcgtcgctccagatagacgcacaccgcatcggtgagcgtggagtcgaaccatagctcgaccatggcggaggcatcggaatcgtggatcatcatgcacgggtaatggaccgactggctgatggtttcgagcgtaagccccgtgttgcccataatggtgccgaaggtgatggtggtggcgtcgggggagaggatgccttggatggcgaacgagacgccgagcactttgccgtgcttcttttcgacgtcggaggcgaagttgttgatgatgccgccgatacgctggtagtaaacgttggtgttgcggtaaggcagggcatcgttgcgtttttcgatgacgttgccgtacaggttaatcgcgcacaggcgcagttcgttggaccgcatcactacgccgatggcagtgcgatgatcgggattgaactcataattttgcgccttgcgcccgccggtggaatcctgcagttcgcctttgcggatgagtccgtcatcttctagggcgcgcagattttgggtgatggtgggcaggctgaggccgagttcgcgttccagttcctgcttggtgacatggctatggccatacagatactgggtcatggcactgcggttgtgcgctttcactgcggtcgatggcattgccctcatatttacccctttgtacgatgagatatatgtaagtatactttatgaaagtggctttcatgtgcctcgacgcggagattatgaggcaacaatcgtatatttgtaggcgattttgggcacttttttaaaccaattttctagaaatgtggggaaaatgagtacttttggaaacttgatttaagaaagttgtcggattgcgttgtttgcaagcatgtgattttcggtaaaaagtgaacaaaaagtaccaaatcgccgaataaagtgaggatttgttcgatatttcgcacaactcttaacaaaaactgttcaatatcgcacgtgaaacgccgtcgattttgtgcgtatgcatcgcgccggaccgttcggtatattgtgactcaagtcacatatgcaatgtgacaacgcatcaccggtcattttcggttactgaggcggtatcccgctggtgcaactgaggtgacgaggcgatggcccagaactttgccataataccccaagaagatcgaggaggaccccaagtggcagaagcaaagaagaaagtcgaagctgccaatccgaccccagaagagaagcaggccgcagctgaggccgaagttgacgcgctggttgcccgcgccaagaaggctctcgacgaattcgagaacctcgaccagaagcaagttgatcgtatcgtcgccaaggcctccatcgccgctctgaacaagcacctcgttctcgccaagatggccgtcgacgagaccggccgtggtctcgtggaagacaaggccaccaagaacatcttcgcctgtgagcacgtcaccaactacctggccggccagaagaccgtcggcatcatccgcgaagacgacgtgatgggcatcgatgaggtcgccgagcccgtcggcgtggtcgccggtgtcaccccggttaccaacccgacctccaccgccatcttcaagtccctcatcgccctgaagacacgctgcccgatcgtcttcggcttccaccccggcgcgcagaagtgctccgtcgaggccgccaagatcgtgcgcgacgccgccatcgaggccggtgctcccgagaactgtatccagtggatcgagcacccgtccatccaggccaccggcgcgctgatgcagcacccgggcgtggccacgatcctcgccaccggtggtccgggcatggtcaaggccgcttactcctccggcaagcccgccctcggcgtgggtgccggcaacgccccggcctatgttgattccgatgtggacatcgtccgtgccgccaacgatctggtgctctccaagcacttcgattacggcatgatctgcgccaccgagcaggccatcatcgcccacaaggacgtctacgaccagctcatcaaggagctcaaggtccgtaaggcctacttcgtcaacgccgaagagaaggccaagctggagcagtacatgttcggctgcaccgccggttccggcgtcaagcccgtgctgaactccgtggtgccgggcaagtccccgcagttcatcgccaaggctgctggcttcgagattccggccgacgccaccattctggccgccgagtgcaaggaaatctccgacgacgagccgctgacccacgagaagctcgctccggtgcaggccgtgctcaaggccgacaacaaggagcaggccttcgagatgtgcgagaagatgctcaagctgggtgccggccacaccgccgccatccacaccaacaaccaggagctcgtgcgtgagtacggcgtccgtatgcacgcctgccgcatcatctggaaccagccttcctcccttggcggcatcggcgacatctacaatgccatcgccccgtcgctgaccctgggctgcggctcctacggcggcaactcggtgtccggcaacgtgcaggccgtgaatctcgtcaacatcaagcgcattgctcggaggaacaacaacatgcagtggttcaagatcccggccaagacctacttcgagccgaacgccatcaagtacctgcgcgacatgtacggcatcgagaaggccgtcatcgtgtgcgataaggtcatggagcagctcggcattgtcgacaaggtcatcgaccagctgcgcgcccgctccaaccgtgtgaccttccgcatcatcgactacgtcgagccggagccctccgtcgagaccgtcgaaaagggcgcggagatgatgcgcgaggagttcgagccggacacgatcatcgcggttggcggcggctccccgatggatgcctccaagatcatgtggctgctctacgagcacccggaaatcgccttctccgacgtgcgcgagaagttcttcgatatccgtaagcgcgccttcaagatcccgccgctgggcaagaaggccaagctcgtgtgcatcccgacctcctccggcaccggttccgaggtcaccccgttcgccgtgatcaccgatcacaagaccggctacaagtacccgatcaccgactacgcgctgaccccgtccgtggccatcgtggacccggtgctggctcgcacccagccgcgcaagctggcctccgacgccggcttcgacgccctgacccactcgatggaagcatacgtgtccgtgtacgcgaacgacttcaccgacggcatggccctgcacgcggccaagctcatctgggacaacctggctgagtccgtcaacggcgagcccggcctggccaagaccgacgctcaggagaagatgcacaacgccgccaccatggccggcatggcattcggctccgcgttcctcggcatgtgccacggcatggcccacaccatcggtgccctgtgccacatcgcccacggccgtaccaactccatcctgctgccgtacgtgattcgctacaacggccagattcctgaggagcccacctcttggccgaagtacaacaagtacatcgccccggagcgctaccaggacatcgcccgcaacctcggcatcgacaccggcaagaccccggccgaagccgtggagaacctggcgaaggctgtcgaggactaccgcgataacaagctcggtatgaacaagagcttccaggattgcggcgtggacgaggattacttctggtccgtgctcgatcagatcggcatgcgcgcctacgaggaccagtgcaccccggccaacccgcgcatcccgctgatcaacgacatgaaggacatcgccgtcggtgcttactacggcgtctcccaggcggaaggccacaagctacgcatcgagcgcgagggtgaggccgccactgaggaagcctccgagcgctgattgcaggcggttggcggctgttggcaccagcagtagccaccaaccgcggtgttgcagcttagtggctgcatagcggacacaaggagcccgaccccattacaggggccgggctcctttgcatatgtggcgctccctcagccggcaggtgcctccatggggcggtaacctactcatggggcggtaacttgcccatggggcggtgaaaaccccatggggcggtgtacgaaaacggctctattctgcggaaggtaaaattttaccgtccgccccatgggctaattaccgccccatgagggaattaccgccccatggaatcgctgagcgtcgctaaatcaccgcaataatgcagccaaaagcaataaagctggcaaacgcctcggtaatgccggtcaccacgggcttcaaggttgtgcgccgtgtaaccaccggcaacgcaacggcgcgggccaacagcagcacagtcatcgcaatcagatacgggctgcgtccagccggcacggcggctagcagcaatagcgccacatgccatacccacgaagccgccacgtacgaacgcttcccgcgttcccggatcatggttttgaccaccaaaaccgacccatactgcgtcagcgcaaacagcacggtggcaatcagcccgttcacgggcaatgaacccgcaggccaccaggcgtgaaggtcgaatatctggctcaaatctggcatattccgaatcgcggcgcgtgcggcggtgacatcagcggctgcgcacgaggcatgtgctgcgttgatgggaataacacatgccgtctcaacagcgttgccaaacgacgcgatcaccgtggccatggccgatgcggcaatcaccgacacggcattgccccacagcgagcgctccttcctcagccacgaggacagcatcgacagcgcaaccagtactatatataaaggagcccaacgcagtatgccggtatgcgtaatcaggaatggcaagccgatgacgatgagcgctacggcataagtgagcatcggcggcagataacggcgtgaaaagtgtgctttgaaccagtgcgcggcgctgaactgcacgcaatagcacacggcccacgtcgccaacagccaaagcgtatcaagattaggcccgccgataaagaagccagccgcagcgggtagcataaccattacccatgcgccaggttggttgtcgaaccaatcgcgtttaagggtcttgcggcgggaagtcatatctgtcatgatatcgcagcgaatggttctcaataagaaagatgtgagacctgcattgcgacaatcgaacatgggaagtgcgagaagcctgtgtttcagccattatgcaacatgtgcgattgttcggaaatgttcatttggctcacattgtgtaccgtgacggcgatattatgcgagactaatctcgttgagtatcgccctcggcgctggaaatggcctcggctatcggatcttggctgaagtcgtggttgcgataatcagggtcgtccaccggcagatgctgcaccaaggtatcgaacacctgactgtagattttgccgcgctcaagcaccgcatcgagcacatggccgccgaacgtcttgtcgtcggacaggaagtgctcgtggaatccggccacagccgcgccgtggaacatcatgggggagaagtacccgagcatggtgcccttgacgtcgtggcgcaggaacacggcctgccggtcggccacctccaccagcgtggggtagggtgcctgctgcttgatgaccgcgcgcgtcttgatgaagctgaacgtgccgcgcacaattaccgaaaagaacgtgttcgcgcggccgttcgccttgacgatcttatcgttgagctcttctaggccgatatcatgacgctcgcactggtactggaaggccgcgcgatggctattggcgaatggcatggtgaagtcgtccggcacgcgttcggccacaccggattggcctatcttgtatgccacgccatccaggatgatgagctcgccgtccaagccctcgccggtgccgatgccggtgtcgccatgcttgagcaattcgccgatggtggtggtgccttccagcagccccggcacgagtaaggccagagtgccgtgctgatataacacgttggcgccgtgctcacgaataggtttgatgttctttgccagtgattgtgtcacgagccttaagagtaattcgtgttaccatccaactcaattaatcaatccatattcgccaacgtgagctataccactatatataggtaagtctcagaaggatgttggtaggcgacacgcggagcggctatgccgcgaggtaatacgaacggcatgagcgcgacacgcgcgaattcctccgcactgtcccacctcaatgcttgaataaacaagttgcctgatttgggctcgcaaattggaattaaaaaagcgagcgcgggccgggagccacttcaagtgaagtgacagccggaaaccgcgcactgatgtcggatgaccgccagaggacgtatgtccaagggaggccatgcgcgccggtgccctagaagcaggttggtaaacagtacaacgaacatcgctagaaagggcggacggcaatggcgggacagaaaatccgcatcaggcttaagtcctatgaccacgaggtcatcgaccaatcggcgaagaagatcgtcgaaacggtgacgaacgcgggcgcaactgttgttggccccgttccgctgccgaccgagaagaacgtcttctgtgttatccgttctcctcacaagtacaaggattctcgcgagcacttcgagatgcgcactcacaagcgcctcatcgacatcgtggacccgacccccaaggccgtggactccctgatgcacatcgatctgcctgcggacgtcaacatcgaaatcaagctgtaagggaggaggaagcattatgtctaatcgcaaggctctgctgggcaagaaactcggcatgtcccaggtatgggacgagaacggcttcttcgtgcccgtcactcttgtcgacgtgtccaccaacgtggtgaccgccgtgaagaccgaggaatctgacggctacaaggctgtccagctcggctacggcgccatcgaccccaccaaggtgaccaagccgctggctggccactttgccaaggccggtgtcaccccgcgtcgccatctcgtcgaagtgcgtaccgatgatgtcgatcagttcgaggccggccaggaactggccgctgacctgttcgaagagggtgctgaggtcgacgtgaccggcaccaccaagggtaagggcttcgccggtaccatcaagcgttggggcttcaagtcctaccgccgtactcacggttctcacaagaacgagcgccgtcccggttctgtgggcgcatgcgccactccgagccgtattctcaagggcaagcgtatggccggccgcatgggtcatgtgaccgccactacccagaacctgaccatcgtctccgctgatgtcgagaacggcatcctcgccatcaagggcgccattcctggccccaagggcggcatcgttctcgtccgctcggctgtgaagggagcctgataaaccatggcaaacgttactctgaacgtcaccgacgccaagggccaggccaacggcaccgttgaagctcctgaggctctcttcggcgtttccgccgaggatgtccaggctcacatcccgctgatccaccaggttgtcaccgctcagctcgctgctgctcgtcagggcacccacgccaccaagactcgtggcatggtttccggcggcggcaagaagccgtggaagcagaagggcaccggtcgtgctcgtcagggctccattcgtgcaccgcagtggtaccacggcggcaccgtgttcggcccgcagccgcgtgactactctcagcgcacccccaagaagatgaaggccgcagctctgcgctacgccctgtccgatcgcgccaacgccggtcgcgttgccgtggtggagttcggtatcaccgagccgtccaccaaggccgctgtcgccgccctggccccgattaccgcggacaagttcaccacggtcgtcttcactcgcgacaacatcaacgagtggctctccgtgcgcaacatcccgaccgttcacccgattttcgtcgatcagctcaacacgtacgacgtgattacctcgcagtacgtggtcttcaccaaggaagccttcgaggctttcgtggctgccaagaccgagccgaaggaggcctgatttagatggtcgctattcacaagcccgctcacgacgtgattcttaagcccgtcgtctccgagaagagctacgccgcttccgaccgtggccagtacaccttcgtggtggctccggatgcgaacaaggtgcagatcaagcaggcaatcgaagagatcttcaaggtcaaggtgacgaacgtcaacaccctcaaccgcgctggcaagaagcagcgcactcgcaccggtttcggccagcgcgcttcccagaagcgtgcgatcgtgaccgtcgccgagggccagacgatcgacatctttggtaactgaaggctagccgagaaaagttaaaggaagaactacattatggctatccgcgtttataagccgacgaccgcaggccgccgcaacgcgtccgtctcggatttctccgagctgactcgttctacgcctgagaagtcgctggttcgcaagaagtccaagaccggcggtcgtaactcttacggccgtatcacctcccgtcatcgcggcggcggccacaagcgtcagtaccgtctcatcgatttcaagcgttgggacaaggacggcgtgcccgccaaggttgccgagatcgagtacgatccgaaccgctccgcccgtatcgccctcctgcacttcgcagatggcgagaagcgctacatcatcgcgccgaagggcatcaagcagggcgacgtcatcgagaccggtgctcaggctgatatcaagccgggcaacaacctgccgctgaagaacatcccgaccggtaccgtggttcacgccatcgagctccgcccgctgggtggcgccaagatcgctcgttccgctggtgctgccgttcagctcgtcgccaaggatggcgcctacgctcagctgcgtatgccgtccggcgaaatccgcaacgtcgacgcgcgctgccgcgctaccgtcggcgaggtcggcaacgaggaccacgccaacattcagctcggcaaggctggccgcgcccgctggatcggccaccgtccgatcacccgtggtgagtccatgaacccggtcgaccacccgcacggcggtcgtacccgcggtggtaagccgccggtctccccgtggggcaagggcgaggttcgtactcgtcgtccgaagaaggcttcgaacaagatgattgttcgtcgccgtccgtccggcaagaaccgcaagtaagggagtatcgagaagatgactcgtagcatcaagaagggccccttcgtcgacgcccacttgcagaagaaagtcgacgagcagaacgagaagggcaccaagaacgtcatcaagacgtggtcccgtcgttcgatgatcacccctgatttcatcggacacaccttcgccgttcatgatggtcgcaagcatgtcccggtgttcgtcaccgaggccatggttggtcacaagctgggtgagttcgcccccacgaagaccttcaagggtcacgtgaaggacgacaagaaggcccgtcgctaaggataaggaatagaacatggaagctaaagcaatcgctcgtcacgtccgcgtgacgccgcgcaaggctcgccgcatggtcgacctcatccgcggcaagaaggcgaccgaagccgtcaccattttgaagttcgcccctcaggctgcggccctgccggtccgcaagaccctggagagcgccatcgccaacgctcgcgtgaaggccgacaaggccggcgagccgttccgcgagaacgacctgtacatcaaggagacctacgttgacgaaggtgtgaccctcaagcgcttccgcgctcgtgcccagggccgcgccgctcgtatcaacaagcgcacctcccacatcacggtcgtcgtggctaacaaggaaggagcccgctaaagatgggtcagaagatcaatccgtttggctaccgtctgggcatcactgagaaccaccgctccaagtggttctccgactccaacaaggccggcgaacgctaccgcgacttcgtgcttgaggatgatcagatccgcaaggagatgagcaaggacctcgagcgcgctggcgtgtcccgcatcgtcatcgagcgcacccgcgaccgcgtccgcgtcgacattcacaccgcccgtccgggcatcgtgatcggtcgtcgtggcgccgaggccgagcgcgtccgcgccaagctcgagaagctgaccggcaagcaggtccagctcaacatcttcgaggtcaagaacgccgcgctggacgcccagctcgtcgctcagggcatcgctgagcagctgaccaaccgcgtcaccttccgtcgtgccatgcgcaaggcccagcaggacgccatgcgcgccggtgccaagggtatccgcatcaagctctccggccgcctcggcggtgcggaaatgagccgttccgagttctaccgtgagggccgcgttccgctgcagaccctccgcgccctcatcgattacggcttcttcgaggccaagaccacgtacggccgtatcggcgtcaaggtctggatctacaagggcgacatgaccgaatccgagttcgaagagcagcaggctcagcagaacaaccgtccgggccgtcgtggtggcgatcgccgcccgcgccgtggcaaccgttccgccgccccgcaggccgtcgaagcccccaaggctgaggctcccgccgaggccgctccggctgcagaaacgaaggagtgagcaagaatgcttatccccaagaggactaagtaccgcaagcagcaccgccctgtgcgttctggcatgtccaagggcggcaacgagatcaacttcggtgatttcggcatccagtccctcgccccggcctacgtgaccaaccgtcagatcgaagccgcgcgtatcgccatgacccgctacatcaagcgtggtggccgcgtgtggatcacgatcttcccggatcgtccgctgaccaagcacccgctcggtgcccgaatgggttccggtaagggtgccccggagttctggattgcgaacgtgcgccctggtcgcgtgatgttcgaaatcggtggtgtgtccgaggacgtcgctaaggaagccctccgccgcgctatcgacaagctcccgatgaagtgccgcattatcgcacgtgaaggtggtgatatctgatggcagtcggtaccgctgattactccatcaagaatctcaacgagaagaccaacgcggaaatcgaaggcttcctgaagaagtccaaggaagagctgttcaacctgcgcttccagcacgccaccggtcagctcgagaacaccgcccgtctcaaggctgtcaagagcgacatcgcccgcatgtacaccgtgcttcgcgagcgtgagcttggcatcagccaggagccggccgccaccgaatccaaggagaagtgattatggctgaagagcgtaacttccgtaaggttcgccgcggctacgtcgtgtccgacaagatggacaagacgattaccgtcgagctcgagcagcgttcgacccacccgctgtacggcaaggtcgttcgttccaccagcaaggtcaaggcccatgatgaacacaacgacgcccacattggcgacctcgtgagtattatggaaactcggcctctgagcaagaccaagcgctggcgtctcgaatccattatcgagcgcgccaagtaagtaaagttcggcaaggctcgccatttaccggggcattatgggcaaccacgatgccccggtaaatggggagaaccagctcggctaaggagaatcaatgattcagcaggaaacgcggcttcatgtcgccgacaacacgggtgcgaaggaactcctcgccatccgcgtgctcggcggatcgaagcgacgctatgccggcatcggcgacgtgatcgtcgcctccgtcaaggacgccattcctggcgggtcggtcaagaagggcgacgtggttaaggccgttgtcgtccgtaccgtcaaggaatcccgccgtgcggatggttcctacatcaagttcgacgagaacgccgccgtcattctcggctccggccgtgaaccgaagggcactcgtatcttcggaccggtcggtcgtgaactgcgcgagcacaagttcatgaagatcgtgtccctcgccccggaggtgatctgacatggcagccaagatcaagagcggcgacctggtcaaggtcatccgcggcaaggaccgcggcaaggaaggcaccgtcaagcaggtgctctccaacgatcgactgatcgtcgaaggcgtgcagatcgtcaagaagcacgtgcgtgcaacgcagcagggccagcaggctggcatcgtctccactgaggctccgatccatcgctccaacgtgatggtcatcgacccggagaccaagcagccgacccgcgttggcatcaccgttaaggaagaggcgcgtgacggcaaggtgaagaccgtgcgcgtgcgcgtcgccaagaagtccggaaaggagctggcatgaccgatactactgtcgaagcgccggccaccccgcgcttgaaggtcaagtacaacgagcagatcattcctgagctcgagaaggagttcaagtactccaacccgatgcaggttgcccgtgtccagaaggtcgtcgtctccatgggtgttggtgccgctgcccgcgactccaagctcatcgaaggtgccgtcaaggacctcaccctgatcaccggccagaagccgaagatcaccaaggccaagaagtccgtcgcgcagttccacctgcgtgaaggccaggccatcggtgcgtacgtcaccctgcgtggcgaccgcatgtgggagttcctggaccgtctgctgaccctcgcgctgccccgtatccgcgacttccgcggcatcaacggccaccagttcgatggccagggcaactacaactttggtctcaccgagcagtccatgttccacgagatcgatcctgattcgatcgatcacgtgcgcggtatggacatcactgtggtgacctccaccaaggacgacaaggaagcctacgcgctgctgaagcacctcggcttccccttcaaggagaactgatatggcaaaaaccgctcttaagaacaaggcggccggcaagccgaagttcaaggtccgcgcttacacgcgctgccaggtctgcggtcgtccccactccgtctaccgcaagttcggcctgtgccgcatctgccttcgtgagaaggctcaccgcggtgaactgcccggcgttacgaagtccagttggtaaacatcgacgctgaaggtccgcggcccgaacgcttctagaagaagcgtgagggcggcggaaaccatagcgagaaagggcaacaagcccaaatgacaatgacagatccgatcgcagacatgcttacgcgtctgcgtaatgcgagcgcggccaagcacgaaaccgtggatatgccgtactccaagttcaaggcgaacatcgccgagatcctgaagcgcgaaggctacatcaaggacttcaccgctaaggaagccaaggtcggccagactcttgaggtcaccctcaagtacggtccgaacggtgagcgttccattcagggcatcaagcgcatctccaagccgggccttcgtcgttacgcgaagtccgactccctgccgatgccgctcggtggcctgggtatcgccatcatctcgacttcttcgggactgctgactcagaaggaatgcctcgaccgaggcattggcggcgaaattgtcgccttcgtgtggtgagaaaggagagctgaaacatggcatcgcatattggtaagctccccatcgccatccctgctggcgttgaagtcaagattgaaggccagaacttctccgccaagggcgctaagggttctgactcctacgtggttccggaaggcatcaccgctgccgttgaaggcaacgagatcgtcctgaccgccgctgatgacctgcgtccgacccgtgccaagcacggtctggcccgctccatcatggccggcatggtcaagggtgttcacgatggctactccaagactcttgagatcgtcggcaccggttaccgcgccgtcgccaagggcaagggcatcgagttcttcctcggctactcccacaccatcaccgtcaacccgcccgaaggcatcaccctgaaggtgaccgacgccaaccacgtggttgtcgaaggcaccgacaagcaggtcgtgggccaggttgccgccaacatccgcaagctgcgcgctccggaaccctacaagggcaagggcatcaagtatgccgatgaacgcatcctgcgcaaggctggaaaggctggtaagtgatatgagcgttgctattctcggaaaaggcaagaaggtagctctcaagcgccgtcacgcgcgtatccgcaagcgcatctccggtacccccgagcgtccgcgcctggtggtcacccgctccaaccgtcacatggttgctcaggtggtcgacgataccaagggtattaccttggtgtccgcctccacccttcaggccgacttcgccggtttcgaaggcaccaagactgaggccgccaagaaggtcggcgagctgatcgccgagaaggccaaggctgccggcatcaccgcagtcgtgttcgaccgcggtggcaacaagtacaccggtcgcgtcgcagccgttgctgatggcgcccgcgagggaggtcttgcactgtgagcgacaacgaaacgaaggaaacccaagtggctgaagaaactcagaacactgtggcgaccgaatccaacaacgaggaccgcaagggtcgtcgtggccagcgcggtgaaggccgtcgcggcgagcgtcgtaaccgtcgtgaagaaaaccacggcgacgagctgctcgatcgcgtggtgaccatcaaccgtgtgtccaagacccacaagggtggccgtaccttcagcttcgctgcactggttgtggtcggcgacggcaacggcaccgtgggtgtcggctacggcaagtcccgtgaagtcccggccgccatcgccaagggccagctggacgccaagaagcacatgttctctgtgcctcgcgtccgcggcaccatcacccacccggttcagggtcacgacgctgctggcaccgtcctgctgcgtccggctgccccgggtaccggtgtaatcgccggtggctccgtgcgcgccgtcatggaatgcgcaggcatcaccgacgtcctgaccaagtcgatgggctccgccaccgccgttaatgtggtgcgcgctaccgtcgacgccctcaagcagctcgaagagcccgaggagatcgccgcccgtcgtggcctggcgctcgacgaggttgctcccgatgctctgctgcgcgcccgtgccgccggcattgccgaggctcgcaaggctcgcgaagaggctgctgccgctaaggccgccgaagagaaggatggtgagtgatactcatggctaagaacctgaagattaccctgcaccacggcatcgtgaaccgtaccccggctcagcgcgccaccgtcaagaccctcggcctcaacaagatcggtaagaccgttgtccgcgaggacaccccggccaaccgtggtctggtgaacgccgtgcgtcacctggtcaccgttgaggaggttgactgattatggcagataacgaaatcctgcagatgcacgacctgaagcccgccccgggcgccaagaaggaccgcacccgtgtgggccgcggtgaaggctccaagggtaagacctccggtcgtggcgccaagggccagacgaagcgtaaccacgtgcgtccgggctttgaaggcggccagctgccgctgtacatgcgcctgccgaagcttcgtggcttcaagaacccgttcaaggtcgagttccaggtcatcaacatcgctcgtctcgtggagctcttccccgagggtggcgaggttgctgtggccgacctgatcgccaagggcgctgttcgtgacaacgctccggtgaaggttctgggcgacggcgagaccaccgtggctttcaccctcaagggtgttaaggcttcggcttccgccaagtccaagatcgaggccgccggcggttccgtttccgaggactgattagtcctacggggagcgcaataggctgtacaacccccgcccgccaataggtggacgggggttcccttttctaaaaaattgttgttctgagcgcagagaagcagtctcaacacaatgatcgttttgagtatgcttcccccgttcagtacgacggagcataattcaggtaacattcgcgagacatgaagtggccgaagtaggcactgtagactatgctcattcgttagtttgcgtatttcgcgtgattggcgcgctattgggaggaaatctaggtgaggacactaatccaggccctgaagaccaaagagttgaggaagaagattctcttcgtcctgttcatcatcatcgtctaccgcatcggttcgttcattccgacccctggcgtggactacaacgtggtgaacaagtgcatggccactatcggcagcgcctcccaggagaacttcatcggactggtgaacctcttctccggtggcgctatgctccagctgtccatcttcgcgctgggcgtcatgccgtacatcaccgcgtccatcgtggtgcagctgctgcgcgtggtcatcccgcgcttcgaggccctgcataaggagggccagtccggagaggccaagctcacccagtacacgcgttacctgaccatcggcctggccgtgctgcagtccaccaccatcctggtcaccgcccgctccggtgccctgttcaactaccgctgcgaccaggtcatcccggacggctccgtgtggaacctcgtggtcatggtcctcatcatgaccggcggcaccggcctgatcatgtggatggccgagctcgtgaccgacaagggcatcggccagggcatgtccatcttgatcttcatgtccatctgctccggcttcctgccgcagctgtgggagatcggctacggcaccaacggcaagaacggcgactggaccaagttcggcatcgtcgtgggcgtgctcgtggtcatcctcatcttcgtcgacttcgtcgaactgtgccagcgccgcgtcccggtgcagtacacgcgccgcatgatcggccgtaagatgtacggcggctcctccacctacctgccgctgaagatcaacatgtccggcgtcatcccgccgatcttcgcctcctcgatcctcgccatcccgaccctgatcgcccagttcggcaagtccgaccagtcctgggtcaagtggatcaacgccaacctggcgaacaccacatccgtgtggtacatcgccctgtacgcgctgatgatcgtgttcttctgcttcttctacacctcgatcacgttcaacccggacgagaccgcggacaacatgaagcagtacggcggcttcattcctggcatccgcgccggcaacgccaccagccgttacctgacctacgtgatgaaccgactcaacaccgtgggtgccgtctacctgctgttcgtggccctgatcccgaccgtgctgatcatggctctcggactcaacgccaagctgccgttcggtggcaccacgatcctgattatcgcgggcgtgggcctcgacaccctgcgtcaggccaaggcccagaccgaacagttccagtacaccggcttcctgttcgaaaacgtggaccacaaagaaggctgacgcccgcttggcagcggtcgcccgcaatgggcaggcggccgcgcgaggagttccacgacggagcaatctttcttccacatataactcaatggctcccctaaccaagggagccaaaaccgtattaataaccgacacaaaaggagaccaccatgcgtctgctcatcatgggcccccagggcgtgggcaagggcacccaggctgctctgctcgccgagcacttcaacatccccaccatctccaccggcgacatcttccgctacaacatcaagaacaagaccgaactcggtcttgaggcgatgagctacaccgacaagggcgagctggttcctgactccctgaccaacaagatcgtcaaggatcgtctggccaaggaagactgcaataacggctggatcctcgatggctacccgcgtaacgccgcccaggtcaccgctctcgacgagatgctcgccgacctcgacactccgctcgaccacgtggtggccctcgaagccgcccgtgacgtgctgctggagcgtatgaagaagcgcgccgccgagcagggccgcgctgacgacactccggaggccatcgccaagcgcctggagacctacgagaaggaaaccgctccgctgctcgacatctacgaatcccgtggcctgctcgtcgtggtcaacggcgtcggcgacatcgacgagatcagcggccgtatcatcagccacctcgagtagtaggttcggcagcccggccaacaagccggagtgatgccgaaataccacatcaacgtttccatacccctgtgcgacacgccgagtgttcgtacaggggtatgtgcgtatatagttgacagttggtgtgtcttcggatatgccatagtaatcatccaacggaataggactagaggcacatggcaaaagacggtgtgattgaagtcgaaggacaggtagtggaagcactgcctaacgcgatgttccgcgttgaactcgagaacaagcacatcgtgctcgccacgatttccggcaaaatgcgtaagaactacattcgtattctgccgcaggatcgtgtcgtgctcgaaatgagcccttacgacctgaaccgcggacgcattacgtaccgttacaagtaaaggtacacaagaaaaggataaccatgaaggtcagccctagcgtgaagaggatctgcgaaaactgccgcgtgatccgccgtcacggccgcgtcatggtgatctgcgtcaacccgcgccacaagcagcgtcagggctgagagcagattctccagcggcactaagtaaataaggcactctctcacagtgcttcccgcaagggaacgacactgaaccacgggtacgtaggcccgtgccgggtaaccgggcgagcgggtgcaagacctacggcaacaagaaggaatcgcaatggcacgtcttgccggagtcgacatccccaatgagaagcgcatcgagatcgccctcacctacattttcggtgtgggtcgcactcgtgccaaggaaacgcttgccgcgaccggtatcagcccggacatccgcgtcaaggatctcaccgacgagcagctgattacgctgcgtgactacctcgaagccaactacaagatcgagggtgacctgcgtcgtgaagtcgatgcagatattcgtcgcaagattcagatcaactgctaccaaggccagcgtcaccgtaagggacttcctgtgcgcggtcagcgcaccaagaccaatgctcgtacccgcaagggcccgaagcgcacggtcgccggaaagaagaaggccaccaagtagtcggtggcatgattcgggccacgggatgatttcatcccatcgcccgaacgtcaacaacaaagttcgttactaggaaacgagggtcaatggcagcgcctaagcaagccgctcgtaagccccgtcgtcgcgaccgcaagtcggtcccggtcggccaggctcacatcaagtccactttcaacaacacgatcatttcgatcaccgatccgtccggtgccgtggtgtcctgggcgtccggtggtgatgtcggcttcaagggctcccgtaagtccacgccgtacgccgctggtatggctgccgagtccgccgcccgcaaggcgatggaacacggcgtcaagaaggtcgacgtgttcgtcaagggcccgggttccggtcgtgagaccgccatccgttccctgcagtctgcgggcctcgaggttggttccatcaccgacgtcaccccgcaagcccacaacggcgttcgtcctccgaagcgtcgtcgcgtctgagcactcagcaataccaaatccatccaaaaccgcctgaccggtgagtgcaccaccgagttcaagctgaaaggataaccacagtgcttattgcacagcgtccgactcttaccgaggaatctctgaatccgcagcgctcccgcttcaccatcgagccgctcgagcctggcttcggctacacgctcggcaactcgctgcgtcgcacgctgctgagctccatcccgggtgctgccgtgacctccgtgcgtatttccggtgccctgcatgagttcaccactctgccgggcgtccaggaagacgtcaccgagatcctgctgaacatcaagggcatcgtgctcaccagcgaatatgacgagcctgtggtcatgtatctgcgcaagagcggcaagggcgaagccgtggctggggacatcaccccgcctgccggcgtcactattgccaacccggagcagcacatcgctaccctcgccgacgatggcgaactcgagatcgagttcaccgtcgagcgtggccgtggctatgttcctgcccagatgaacaagcaggacaacgatgagatcggccgtattccggttgattccatctactccccggtactcaaggtgagctacaaggtcgaggccacccgtgtggaacagcgcacggacttcgacaagctcattctggacgtggagaccaagcccgccatctccccgcgtgacgcggtggcttccgccggttccaccttggtggagctcttcggcctgtgccgtgagctcaacgcccaggctgaaggcgtcgaggtcggtccggccccggtggccgaggagaccaaccccgagatggccgttccgatcgaggacctcaacctgacgcagcgttcttacaactgcctcaagcgcgagggcatccacaccatcggtgagcttgtctcccacaccgagcaggatctgctcgacatccgcaatttcggtatgaagtcaatcgatgaggtcaaggagaagctgcagaccctgggcctgagcctcaagtcctcgccgatggccttcgataccaataatctcgaaggtggcacgttcttctcgccggaagacgagtgatctgcctctttgaccaatcgttcgttcactaggcaagcggatgttcgggcatatgcccacctgcttgcctgaagaacggacatataaggagtaaacccaatgcctacacctaagaagggcccgcgtctggcttccagccccgcacacgagcgcctcatgctggcaaacatggcgaccagcctgttccagaacggccgcatcaccaccacgctgccgaaggccaagcgccttcgtccgctggccgagcgcctgatcaccttcgccaagcgcggtgatctgcactcccgtcgtcgcgtgatgcgcgtcatccgcaacaagtccgtggtgcacattctgttcacccagattgccgagcagatggagcagcgtgaaggtggctacacccgtatcgtcaagatcgccccgcgcgttggcgatgccgctccggccgctgtgatcgagctcgtcaccgagccggttgccaagaaggctgttgtgaaggaagctgaagccgccgccaaggttgccgaagaagaggctccggccgttgaggctgaggccgctgaggctccggtcgaggagaccgccgccgctgaggctgaggctcccgctgaggaagccgctgacgccgagaaggccgagtgagctgaatagcgtttcgccaagctagctgaaagggctggaatccgtttgggttccagcccttttgcgttgtttcatagaaactacaacgtacgtacggctcgaatggcctcggctcttgcggccagctgatcatcgacggggtatgcgatatgctccaaagtcaggccctgcggcgcaatcggcccgcttgagccttcacgcactggctcggccattttgccggcaaaccattccagagatttgcgtcccgaaccaactttgatgcatgagccgaccaaggagcgcaccatattgcgggcaaaggcgtccgccacaatcgtgaacaccgccagtccggactccagcgacggagtccgatatgcttcatgcgatgccatcgcatccggcaccaggggagtgatcggcacccgccgccaataggcggtcttgacttcgcggatcgtagtgcctcccggattcggagtggcgaaggaaccaaaatcgtgcaggccgatggtcaatgaggctgcgcggttcataagctccagatccagcgattcatccacggtaagcacgcatccacgcaggcgcgggtcgatctcggacgaacgatcggcgacccgatacacataagtgcgctccaatgcggagaacctggcatcgaaaccggccggtgccacggcaatgccatgaatgacgatgtccgaaggcagcacagccttgagtctgcgagtcagcgcctcggtgaccggaatggtcatgtgacctacgcagcgattcagtacctcatcggatacatccaaatgcgccacttggtgggaggcgtgcacaccggtgtcggtgcgcccagccaccgtcagacgcaacggttcggccgcatcatcggccggcacccgcagcaccttgtgcagcgcatcttcaatggtgccttgcaccgtacgcagattgggctgtttggcccagccatagaatccgccgccgtcgtaggccaagtcaatgcgcagtcgtgtcatagccattcattgtaacgagtgcggtcggcgagatgcgcgcggtcggcgagacgagtgcggtcggcgaagtgacctgcctgtaacattctcgcgcgtttgctgaaacggggccgccttaggttgtaaccatcaaacccggttacggcttgcggcgtcagcgtgcgctcgaaacgcctaaccgcttgaggccacagaagccgccacagcaaggagcaggcacgatgatcgaatccgcagcacgcagactggcccatgaactggtaaaccgtcgcgaggcgatcaaccgcgagctgtcccgcaacggcgtacgcttcggcatctacaagaacggcgaataccatgaccggctcttcccgtacgatcccgtgccgcgcattatcgaatccgacgaatacgacgaattggagaagggcctgaagcagcgcgtcaacgccctgaacgcctatctgaaggacatctactccgacaaggccatcatccatgacggcgtcgtgccggaggaatacgtatacacctcggccggctacttcccgcaggtcaacggcgtgacccctcccggcggcatcttcgcgcacatcgccggcgaagacctggtccagggtgaagatggccgctggtgggtgctggaagacaacctgcgcatcccctcgggcgccagctacccgctgttcgtgcgcgacatcgagcgccgcatctccccgcgcctgttccgcgacgtgcacatccgcgacaatcgcgaatacccgcgcctactgcgcaaggccatggactttgtgtccactgagggcatcgccgtggtactgacccccggccgctacaattccgcgttcttcgagcacgcctatctggcggagaaaaccggcgccgcactggccttccccgaagacctcgaagtggtggacaacaaggtctacttcctcgactacgccggcaaacgccaccgtgtgggcgtggtctaccgccgtctgtccgacgaattcctcgatccgtttgccttcaatcctgattcggtgatcggtgtgcccggtatcctgtccgcctaccgcgcgggcaacgtggccatcgtcaacgcgccgggcaacggcgcggccgatgacaaggccatctactacttcgtgccgcagatgatcaagtactatctcggcgaggaaccgattctcaacaacgcgcccacgtatatgccgatgttcgaggccgaccgtaaggaagtcctgaatcgtatgggcgagctggtcatcaaggatgtggccgaagccggtggttacggcgtggtgttcggttcgtcgctggatgctgccgcacgtgaggagcttgccaaccggatcaaggaggagcctcgtcgattcatcgcccaagaggtgattcagttccgcgatatcgatgtggtggacccgaagaccggtgagatgtcgccgcgcaaatgcgatttgcgtgcctttgtggtcaccggcaaaaacacgcacgtgtggtattcgggcttgactcgatactcgtcggtgcccggccagatgatcgtcaactcgtcgcagggtggcggattcaaggatacgtgggtgttggcacccgaatccggcgtggagcatgaatacggtgctgaagtgcaggtggcgaacctgctgagccagtcccgccgccactcgttgtctctggtcaccgcctccaaggcagacaacctgtattggctgggtcggtacaccgagcgcgccttcaccacgctgaaccagttcttcccgttctacgatcgtgtgatggacaccgatgtggacgccttccgtccgttcgctcacgcactcgacctgcccgaagatttcgaggacttcgacgggttcgtgaacagcttcctgtacgacgggtccaaccctgattcggtgcggtcggccgtaacctccgcattcaacaacgccgtgattctgcgcccggaattgagctcgcgtctgttgcagtacgtggagttggcgatgaccaatatcaccgatgccgccaaatacgcggccgacgccgaggacatctacaagcagcgcgatattaccgatgacatgctcgccttctggggcggcatcgagaattcgccggtcgaccccacgctgaaggcgttcatcttcatcggcaagtatcttgagcgcatcgacctgtacacgcgcttcggcctgacgatggaggagatggaagccccgcttaggaagctcgcctcctactcgatgatcctcgacggcatgccgttgcctagttgcttcgccgatgggctgagctggctggtcggtcagctgccgtctcgcgggtatcaggaagtcgccgacctgctgaagaagtaccttgacgattattccggccgtgtcagcgccctggccatcaaagacatgggctcactgagctccatgaacatggatgccaagcgcccctaacccgacgttcgccctgacgggttcaaatgctatggtggtatggcgaaaaaccgtgcgcccgagtgccggccgatgcgtatcggcgaattgccggaatatatgcgtggactgtgagcgcgcggaccatacctcagccatggctgtagtgtcgttatcccgagaatgtgccggttgccggctcgtgtgtaagtgcaggagacgttgtgaaaaaactcgtgttcgactatgagatgaagctgtccttcagcgcaccggtcaccgatcacaggttccagcttcgctgtattcccgccactggccctcgccaacaggtgattgacgtggaagtgaagattcagcccgaaaccgaactcgaaaccaccatcgactcctttggctccgtggtgatgaccggattcatccccgagccgcacgacatattcagctattcggtgaccggcatcgccttcgtggacaatgcgcatatccataaggaagcctataaaccgctgtaccgattcaattcagcgctcaccattcccggcccgaacgtggaggcgatgatcgacgtatgccgcgaacgcttggctgcgttgcctgccgacgccactccggtgcagcaggccgccgaagtgatggatgaggtctacaaggcgtttgtgtatacgcccggttccaccacgattcgcaccaccgccgaacagaccttggcccagcgcaagggcgtatgccaggattatgcccatgtaatgctgtccgtgtgccggcatgtgggattgaccgcgcgctacattgccggtttgcttgggggagagggcgcgacccacgcttgggtcgaggtgtatcaggatggccgatgggtcggactggatcccacgcataaccgattggtggacgacagctacatcaccatcgcccacggccgcgattaccgcgactgcatgctcgacatcggcatcttctccggctacaacgtccagcagacccaatgggtcaatgcctccgtccacgaacaggtggcgtaaacaaaatttcaagccccctctgatgagctgagccgtgaagaaaacgccggaggcgtttttaggcgaaggcgaatgacagtgagcaaataaaatggcagctggaaagctgtccttaaattgcgttcgagctgtcgagcgtagcgagactgagagagaccgctcaatgcagagtggccccgtcaccgcttctaccaccaccaatattcggattttcgtcgttgcaacattcggattttggtagttgagaaattcggattattgtagttagaaagttcggattttcgtcgttgcaacattcggattttggtagttgagaaattcggattattgcgatggcggacgtgaaataacgggaggtgcgcggaatggccgattctctggcgagtgacatcaagccgaaagcctatcgccctcgtatcgtggatgcacagatcgaacgatatatgcgcatctttggcgcggtggagattaccggcaccaagtggtgcgggaaaacttggtctgcgcgggcccatgcagccagcattacctatgtggatcgcaataacaatttggctgcggctaaggcggatccgtcattgatgctgctgggagataggcctcatatcgtggatgagtggcaactcgctccagctatatgggatgaagtccgtcatcgcgtcgacgatgattccgcgaataaaggtcagtggattctgaccggttcatccactcctctcaatgagaatcggccgaaccatagtggtgcgggacgaatcggacgtatccgtatgaatcctctgactttatatgagtccggactctcgacaggtgcggtaagtctcagtggactgtttgaacataagttcgccgctgcaaaatcagagataagtacacaaatgttgttggatgccgtatgccgaggtggatggccggaggcggtggctctgcctgtatctgacgcacagattctgattcgggaatacatgcgactcacgctgactgagagtgtgcccaggcaaggcaaggatcctgatgtggctcgtcgtctgctggattcgcttgcgcgcaatatcagtcaagctgtgacattcaaaaccttacgtaaggatatgtacggtactgaagaaaaccttgacgatttcatttcggagagaacggtatccgggtatacggccatgttcgagaacatgttcgtcatcgatccgataaagggctgggtcccgccggcacgggatccaaagcgactccagaccaaggcgcgtcggtattttgccgatccttccattgcggccgcaatgttgggcatgagtcctgctgctcttatcggcgattggcagacttttgggtttctgtttgagaatctatgcatccgtgatctgttggtgtatgcgagatctctcctcgatattgggatagaaccggttcggtattatcgtgacgattccggtctggagtgtgatgccattattgaattgtccgatggacggtggggcggcatcgaaattaagtccagtgaggataaagtccctgaggcatcggcaaatctatgcagactgaaagataagctgctgagaaatccgagtgcgcgaacccgtgaaccggagttcttggcggtgttggtgggggtcggcgagttcgcgtatcaacgcgatgatggagtgtatgtaattcctgtcggagtgcttggcgcgtaaacgcaatgccagcgcttcgggcgaattccgggattgtgatctgacatgtctcaagcggcatacactcgagacttgctcagcgaaactccgatttgccaggtcggcagaatgtggcataatgaacaagttgccattttggcagcatggataagtgtccgagcggtctaaggagcacgcctcgaaagcgtgtgaggtgaaagcctccgcgagttcgaatctcgccttatccgcctttagggttccggggtttgtcccggaaccctttttgtttttgatgcgaacgtccgtattcggggttataggccaaaatgtgtgtccggcggtctagtcgttcgactgccattcgaccctggtgtggaactcgttccagtcgatgccggtgccgtatctcatgggaatgccgaacgtctcgtgcatgctctgcgggcttctctcccatgcctgccggtagaggcgctcgagtcgttcgtcggtcatcgcgttggccgcgagccacgcgtcgctttcgggccgttccgtgtgctggtggcaccaccagcagatcgccttcagccgtctgaccagccgcagtccgcggtggcggcgcggcatgtcgcgcaggcgtgcgttccatgattcgacgaggttgttggtggacggcaccgggccgacggacgcgagcccctcgtcgaggaacgtgaacaggtggccctcgcggatgcgtctgcggatcatgcgccgtgccttgacgagcctttggtgcatgtcgttcacgctgccgcaatcaacgacatggtttgcgtgtacctgacgatgtacaagtggtcggcttcgataacgtgccggaagccgagtactcggcgccggcgctgaccaccattgatccacatatcgacgattatgccaagcatgccgttgacatgcttatcgaccgcatcgaaggatactcaggcccggcccgtacgtacaccaccgatttcacattggtggaacgtgcctcaactcgacttgcccactagcatccaacaagttcgcatcggcttcgtgaggagtgtgtgtctactcgaacaatgcggcgtcagtcgctgggtagccaagttggaacgcggtgtaggcgtgcttggcggccagtgcggcgaggatgagcagcgtatcgctctcggtggaagatttcgattcggtcacggccttgatctgcgcgcgggcgcagtccatttcgatggcggcggcggtcggtacggtctggccgcttgccttgtcggcgatggtggtggggttggccagtagttggtcgatggcatagaccttttggcgggggtcgctctggccggaagaactggactgtgcgccggaatcatcaaaattgccgttcgccagcgacaccagctgctgcccggcggtcttatgcatatcgctcaacgccaacgtagccccagcggtctgtcctcgtgcggccaagacctcgatagcgaatccggcgcgatcctcggccacggccatcgcatccaataccggtcggtcaacgttggcggacgtgacgccatcaagacgcgccggcgtcacctcaggcgcggactgcccgaatttatcggccagaaaagccagccattgcttggtctgcgcgtcacgtaacgttccctcggcaaaacgacccgaacaatacccggcaacgtcaatccaagtcaggggagcggccaggccggtggcatactgctctaataacggcgtgccttcagccggatgggtggcgtagtccgccaacgtcatcgctttctcgcaagggctcatttgagcttccgcctcggcccgtccggccagtcgcggcatcgaacacgccgaaagcgaacacagcatcgcgctcgcgcatagtgcggatgccaagcgccgggtaaaccgtcctgaagagaagcgtgtctgcatggaaacctacactaatagctaactgtgaccactcataggccatgcgccacataacttcataggaggtacggatcgatggaactggacctgacaggaatacacaagctcgccgccgagcaaggaatcgaccccggaaccctggatgatgcgctggcagaggccctgcgcctcgcctacctcaagaccccgcacgccgccaggcacgcgcgtgtggagcttgacgaacgttccggcaacttcaccgtctgggccgccgacgaaatcccggtcgagcccaccgaggacgacccgcaccccgctcccaagctgggcgaggaatacgacgacaccccgcgtgacttcggccgtctcgccgccgccactgcacgccaggtcatcacccagctgttccgccgcgccgaagatgagaaggtattcggcgcgttctccggtcagaagggcaagctcatcaccggcatcatccaacaggatgcttccgacccctccaacgtgcatgtcgcgatgggcgatgtcgaagccattctgcctcgccgtgagcaggtgcccggcgaacgttaccgccacggcgaacgcatccgcgtgtacgtggtgaacgtggcccgtggcatcaagggcccggaaatcgtggtgtcccgctcccacccggagctggtccgcaagctgttcgagcgtgaagtgccggaactggtctccggtgccgtgtccatcatggccatcgctcgtgaggccggcgcccgcaccaagatcgcggtcaaggccaacaccgatggcgtgaacccgaagggtgcgctgatcggccccggcggcgctcgcgtgcgtgccgttatggagaaccttggcccggagaagatcgacatcgtcgactactccgacgatccggccaagttcgtggcagccgcgctgtccccggctgtggccaccggcgtacaggtgatcagcgagaagaacaagaccgccatcgccttcatccacgacgaccagctatccctggccatcggcaaggaaggccagaacgcacgactggcagccaagctgaccggctggaagatcggcatcgaatccgccgaggcccatgccaagaaggtcgccgctgaaaaggccgcccaggctgcggccgaggctgctgctccggaagccgaataggccgccgggctcgaaggcgaatgatcttcagggcgcattgtttcctgatacgagccgcgtcagcaatggcgcggctcgctgcgtctacgctatccagcgctatgagtatgcttgattggcgtatgtgggctggtgcagtgtgcgcgaaatcgcccacaccagagacgaggtaacacgatcatggtcgcacgatgagacagggtaggcttgccgtcatcaccaactgaccacgcccatgcacgcgcgtggtcacagaataggagtaattagtggcgaaaccacgcgtatacgaactggctaaggttttgaatgtcgatagcaaaaccgtgcttgagaagcttaaggacatgggagaattcgtcaagtccgcttcttctacgattgaaccgccggtagcccggcgtctgaaggcagagttcgccaaggacaacgccaagggcgattccaagcccgcatcttccgtacaaaagcctgctgccaagcccgtgcagcagcgccgcccggccgcaccttcggccccggcttccacttcatcttccgcaccgactccggccgctcccgcacgtcaggcatcgcccgcctcggcacatcagcaggctccgactccgggcgcaccgacaccgcgtccgcagggcggcgcacgccccggcatgccgacccccggccgccacggtcagcacgacaaccgtgagaatggtcgcgataatcgcgaaggccgcgagaacggtcgtcagagtcgcccgaacgatcgccgtaacaacgatcgtcgtaacaaccagggccgtccgaacaatggccagccggggcagcatcagaacaaccgcgacaatgcttcggctccgcgcccgcacgctcagggcggcgccggtgccaatggcggcaatgccgcttcaaacgcgattccgcgcccgcacgctcagggcccgcgcccgggcaacaacccgttctcccgcaagcagggtatgcacaccccgacgccgggtgatattccgcgtccgcatccgatggctcgtccgactgctgatagcggtcgtggcggtcgtccgggccgtcccggccaaggccaggggcagggccgcggcttccgtggcggtcgtccgggccaaggtggtcagggcggtcctcgtcccggccagtggggccacaaccgtccgggtcagggcggcggctcccagggtgccggtcagggcggcgcacgcggcggcttccgtgggggccaaggcggcggcaataacttccagggcggcggcgcaccgagcaacggtcccgcacgtggcggcggtcgcggcggtcgcggcggtgccgcaggtgcattcggacgtcagggcggtaagtcctcgaaggcccgtaagaaccgcctggcaaagcgccatgagtatgaggagctgaaggcgccgaccatcggcggcgttcgcatccccaacggcaacggtcagaccatccgtctgcgtcagggcgcttccctggccgatctggcggagaagatcaacgtcaaccaggccgcgctggtcaccgtgctcttccacctgggtcagatggctaccgccacccagtccttggatgaggagaccttccagattctgggcgaagagatcggctggaacatccagctcgtctccgcagaagaggaagacaaggaactgctccagcagttcgacatcaaccttgacgaggaagaactgcaggatgacgaggatctcaagcctcgcccgccggtcgtcaccgtcatgggccacgtcgaccacggtaagacacgactgctggataccatccgcaagaccaacgtcatcgcacgtgaggccggcggcattacccagcgcatcggtgcctaccaggtcaccgtgaaccttgaaggcgaaccgcgcaagatcaccttcctcgatacccctggccacgaggcgttcaccgccatgcgtgcccgtggtgccgagctcaccgacgtcgcgatcctcgtggtcgccgccgacgatggtgtgatgccccagaccgttgaggccatcaaccacgctcaggccgccaaggtgccgatcgtcgtggccgtcaacaagatcgatgtgcccggtgccaacccggagaaggtccgcggccagctcaccgagttcggcctggtccctgaagagtatggtggcgacaccatgttcgtcgacatctccgccaagcagaacctgcacgtcgacaagctgctcgaagccgtgctgctcacggctgacgctgagctggacctccgcgccaaccccgacatggacgcccgtggtgccaccgtcgaagcccgactcgacaagggtcgtggtgccgtggccaccgtgctggttcagcagggtacgctccacgtgggcgatgccatcgtggccggcacttcgtacggccgcgtgcgtgccatgctcgacgagaacggtcagccgatggaagcggccggtccgtccacacctgttcaggtgctgggcttgacctccgtgccgaccgccggtgacctcttcctggtcgcctccgatgatcgtgccgctcgccagatcgccgagaagcgtcaggccaccgagcgtgccgcccagctggccaagcgtcgcaaggtcgtctccctcgaggacttcaagaagaagttcgccgagtccgagatcgacatgctcaatattgtcatcaagggcgattcgtccggttcggtcgaggcgctcgaggattccttgatgaagatcgaggtatccgacgaggtcggcatccaggtcatccaccgcggcgtcggtgcaatcacccagaatgatgtcaacctggccacggtcgacaaggccgttatcatcggcttcaacgtgcgcccgaaccgtcaggtggcggacctcgccgagcgcgagggcgtggagatcaagtactactcggtcatctaccgtgcgatcgaagacatcgaggcgtccctcaagggcatgctcaagccggaatacgaagaggtcgtcacctctcactccgagatccgcgagatcttccgctcctccaagttcggcaacatcgccggcgtcatggtgcaggacggcgaggtcaagcgtggtacgaagtgccgtatcctgcgcaacggcgtggccacggtcaacgacctcgagatctcctcgctgcgtcgcttcaaggacgacgttcagtccgtcaaggaaggctacgaggctggtatcaacctcggcaccttcaacgacattgaactcggcgacatcatcgagaccttcgagatgcaggaagtcgagcgcaagtagtcattgttaagccctctctgacgagtgggctgtcagccgcaggctgactgggggagagacatggtagttccatgattttctctcccccagcctcactgcgttcggcagcccctcgtcagagggggctcaagtctagaaaaggaaattcctatggcaggaaccaacccgcgcgccgcacgtattgcggccttgattcagcgtgtcgtcgcctcctccattgagcgcgaactgcatgacaagcgactcgccagcatcaccgtcaccgaagttcgtgtgaccaacgatctgcagatcgccaaggtctactggacccagctcggccacgaaggccacgaggaaggcgaacgcaagcgcgcccagcaggcgctcgatcaggccaagggtcacctgcgttctctggtgggccacaaggctggcctgcgcctgactccgcagctccaattcgtgttcgatgaagtgcccggcgaggctcacgagatcgaagacattctcgccgtggccaagaagcgtgacgaagaactcgcccgcgcccgcgccaccgcccagtacgccggcgacgccgatccgtacaagcacgacgacgaggccgaagccgagggcgatgagttcgagtccgacgaggagtagtgtgcttcatacaacacccagcggcctactcatcatcgacaagccgcaaggcgtgaccagtttcgacgccgtcgccgccgtgcgcggcgcgttgcacatcaagaaggtcggtcacgccggcacccttgaccccatggccactggcacgctggtcatcgccttcggccacgccacgcgactgctcaacgccatcgtggcgcatgacaaaacctacgaggccaccatacgcctcggcctgcgcaccactaccgacgatgccgaaggcgaggcgcttgtcgatgatgaagcccgctcccgctggcaaacgctgtcagcgcagctgactgagggcggccagagcggcgaaccaacggcgtcaccaactgcctcatggcaaaacctgctcactcgcaccatcgccaccaatttcaccggcgatatcgaacaagtacccaatacgttctccgccatcaaaatcaacggccagcgtgcctacgacttggctcgcgaaggcaaggatgtggaactcaaaccccgcctggtgaccatcagcgaattcaccgtgctggatatccgcagcggattcgtagcaggggagcaggccgctgaaccattgcgggaagacgcgaacacgggaacgattcccgcacttgatattgacgtgcgggtcagctgttcatcgggcacctatatccgcgcgctcgcccgcgacctcggcaatgaacttggcgtcggcggatacctgacccgtttgcgccgtacgcgagtcggccgattcgcgttgccggacgataccagcggacttatcgcctctgaggcgatgcttgacacgcgaacccataccgtcaccgcacataccgatcagaagacgttcactaatcgggaagggcaaaccgtcacgcgcaacaagtgcgtattgaacactcctgaaggtcttgccggtgacgagcgccgcaattggctgcttgaccatgccctcaccatggaacaggccgctcgaggcgcgatgccggcgcttgacatcacacctgaggaagccagcgaattgcgcttcggccgccgtatcgagcgtacaatcagcgagcccactgccgccattgtgccgcaaacgcatgatgtggcggcgattatcgagcgtgccaacgctcatcaggccaagccggtcaccgtattccccctcgcgtaaagtagacgcggtgaaaagtgcagcttgatacaggccgcgcacaacaacgcctatattgcatgaataacatcgcacggataaaaggaacagcacactgatggatatcacgcacctgacccctgacgccgaaggttcgattgaatggccctcgttcagtaacgacaagaaggccgtggtgacattgggcgcatttgatggcatgcacttgggacatcaggcggtgatcaagcgtgtggtggaactcgcgcaccagcatgatgctttttccgtggtgattctgtttgacccgcgccccgcattcgtgcacggctgggccgcctcgcaccatggcgaggaacccgcggtgcagaacgtggatgccgaagccttgaccagtgtggatgatcgactgcaccgcatggaacagttcggcgtggaccatgtgttggtggtgcactacacgctggccttcgcagccatgtcatacattttcttccttggcagactcaccggcaagctgggcatgcgtacgctggtcctcgggcaggatgccgccatgggcaaggggcgagaaggtgatgtgaagcatatcgccaatcttgccgccgccaccggtgtattcgaacttgatgtggtcgatgaccgtggcccgggtgaagtgcgcattccgcgcgatttcaagccggaagccccgagcgaatggggagagcccgtcgacccgctggccaatgccaccaaggccgagcgccgcgcatggagcaagaagaaccaggccaaggcaatgcgcgcctggagctccaccaatgtgcgctacctgctggctcatggccgaatccaggatgccaacgccattctgggtgctccgcacgccatcgaaggcgaagtggtacacggtgaggagcgcggccgcaccatcggattccccaccgccaatcttggctccgacattgcaggctacattccggtcgacggcgtctatgccggttggctggtagatggtgagaaccgctggcctgccgccatctccattggcaccaaacccaccttcagcgagaaaacaggactcaacgaacgcgtggtggaggcctattgcatcaccgatgagtggattgatctgtacgaccataaggttcgcgttgaattcgtcggtttcctgcgcccgcaggtcaagtttgatggtcccgaccaactcgttgacgaactcaagcgcaacgtcgaagagaccaagtgtcttaccgcctgaggcatatctcagggctatttacgcactcccaaggcatctaaggcgtcggacaatgtgttggactccaccagccgaagtccctcgacatgcaccggcttgcgcagcggaggaatgactgccgtcgtaaagccaaggcgcgcggcctcgcgaaggcgatattccatacgcggtaccgggcgcacctgaccggtcagggaaatctcgccaatggcgcacgtggctcgcgcaatgggttttgacgtggcggcgctcgccagtgccgccactatcgccaaatcggaaccgggctccttggcctggcccccggcaatagtggagatatacaggtcgttggacagcaggttgagcttgctgtgacggtagagcaccgcgaccagcatggcgatacggctggggtccacgccattgaccgcacgtcgaggtgtgggcagcaccgacgtggtgaccagagcctgtacttcgataggcagactgcgatgcccatccaatgtgaacgtcacacaggtgccttccatgggtgccgcgttggccgcatcagggccgtctccagacaggaacaatccggcgggatcggtgacctcttcgatgccctcaccgctcatgtcgaaacagccgacttcatcggtcggaccaaaacgattcttcaccgctcgcaacattctcagcgcggtctcgctgtcgccttcgaattggcagaccacatcgaccagatgctccaatgtgcgcgggcctgcaatcgaaccgtccttggtcacatgaccaaccagaaataccggaatgtcaagcgtcttagcggtatctatcagcgcgcttgccacttcgcgcacctgagtcgaaccgccggaaatgccatcgacctcctgcgagacgatggtctgcgccgaatccacaatggccaaggccggcttgttctgttcgatcagccccaatactgtggacagatcggtggtggaggccagtaacaagttcggctccaccgcgttgatgcgggaagcgcgcaaacgaacctgcgcctgtgattcctcgccggaaatgtacagcacggtattggcatgtaccgacggtgcgttgccctgtaccgacaccgtgtttgatgtgccgccctgcgcccggcccgactgttgggcagaccgctgaccggctcctcggaatgtactgtctcccgccacaacgcgcgcgatattgccggccgtctgcaacagcaatgtcgacttgccgatacccggttcgcccgctatcagcgtcactgaacccggcaccacgccaccgccgagcacacggtcgaattcggaaaacccggtaccgagccgctcgacgctttccgtgcccacttcggtaatcggacgggctgcagatctggcgttgtcggcaaccgtaaccgactgcgtgcgtgatgttcggccgggagcggccgtgcgagagcctgccgccggccgagcctcgtgaaattcctcgaccgtgccccactgaccacactcggggcaacggccgtaccacttcggcccgttccaaccgcattcggaacatacatactgcacacttgatttcgccatggtctcaccctaacccaaacaccagcggacggtaaatttttaccgttcacaagagtttcacgcggcttgcgcacaacgactaagattacggccgtctagcgtcacgcggctgtgagagaatcggggtatgactaatagtgagaactcctcgaccacacaatcccatggcaagttgattgcagtggtggttgccgcagctgttgtgattatcctggcagtgctttcggcctttgtgtggccgggttgggccatccagaagaatgatggcacctccactaccacccaaaacagccagcagaaaaccgaatcatccgagccgatcaagccgaccatcgacgccacagctttgccggatgatgccagtgagctgttgaaggccatgccggacagcgtgctgaattacgcgcgtaccaaggcggatgcctccacgacgtggaattccgcatcgccgctcgaggagtacactctgacctactccactggtgatgccgccaaggatgtcacgctggtcgccgcgcagtggtcgtcggcggacaatgccaagacccagtacgatgcgttggtcgctgcgcagaccggcgatgagtcggcatccggcaacgtcaaggtttccggcaacgtcacgggcgcgtacgtggtgaaggccgatgcctccaacagcaagaacgccgctgccatctggcagaacgataccgtggtcttccaagctaccggcaccaaggaagcggtcgatcgcttctaccagaagttcccgatgtagtatctagtatcggctgtcagctgctgcacaaacttatgaacgttggggcatccacattgctgatgtggatgccccaactgcgttcagggcatatgcggactatcgacaacatactggtttcctctgtctggcaacacgtgtattatggtgcaagttgcaacttttacgattaatcgaaatggaggcttcagatgggttctgtcatcaagaagcgccgcaagcggatgagcaagaagaagcaccgcaaactgctgcgtaagacccgccaccagcgtaagtagtcttacctgcaatcaaggcatcagaaaccccgtgatcgttatggtcgcggggtttctctttttggctcctttgccttgttcgggcaacagtaaagcccgcacctgcgatgtacagatgcgggcttggaaaagttcagtgatgtgagacgatcacttgttggcgttggtcaacacgcgcgggccgttcgggtcgccgacgatgaccttgtcgaccatgttgaggaacaggccgtgctccaccacgccgaccgtgttgatgaggtcttcggccagctcctgcgggtgatcgatgcgctccaggtgcaggtccaccacgaagttgttctcgtcggtgcgcacttccttgccatcggcgtcaagacgaagcaccggcttgtagccgcggtcctcgaacttcttgatgacgtggccagcgccgaacggaatgacctcgaccggcagcgggaacttgccgatggtgtccacaaccttggactcgtccacaatccacacgatctggttggagttggtggccacgatcttctcccacagcagagcagcgccaccgcccttgataccgttgaagttcttgtcgacttcgtcggcgccgtcaatggtcacgtcgatgtggtccacgtcgtcgatgtccacgatcttgatgccgtagctttcagcctggacctgcgtgcggcgagacgtggttacgccagtgaactcaagaccttcctcctgatgacggcggccgagctcgtccaccaggaacttcacggtcgaaccagtgccgaggcctgcgatcatgccgttttcaacgagcttggcggcttcgatgccggccgccttcttcagcgcatcctgctgtgccttatccatggtttctcctttgccatccttgcctccgccgcatggatcaacggcgtgaagccttatctcctatcctaacgcgaatgagcgattttgtgtcatcgtgtccgattgcggtacatattcgtgtgtttgggtgttagtgtcgtacgaatggtgcgttggcgatggtcaggttgccgtcgccgtccacatagccttcgatttcgatgctgcctttgatcggcatcggctgcccgttgaaatacgggctcgttttcggcgcgggggagaaggtcagcgtaccggataccgtcagtccgcttggctttgcggggtgtacggggtgcgctgattgtacagattgcgctgattgtgtcgctaagggtgacgaagacttggtctctggccttgtggcatccgtcgaatccgtcgccgcagccggcttgcgcaaacttgccgcatccgccttgccatccagcaccaactgcacgtctggaggcacatcggtgccatgtgcgtattcggagcccagtagcgactgccagccttcaatcggcagatagccgtcgcgcgcacccgaacggcaatcgcccgcataggtgcgtgccagttcatcgaccaactcattgccctcgttgccggcgtgacctttgacccatcggaaatccaccgggccagggcgttgtgagatctcacggtcgatcgcctgaataagctctttgttcttcacaggctttttctgcgaatttttccagccgttcttcttccagcctttgacccacttggtcgagcaattgatggcgtactgcgaatccgattcgatgagcaatggctcagggcccgggtgcgctcgcaaagcttccagcactgcgcacagctcaccaatctgattggtgccgttggtcgcgccgcccgcatcataaccatggtcgtcgtgcttatggccgggcttgccgccggcgttctgctcatgatcggcccaggcccagcccattggcccgtttggattccctaatgcggacccatctgtggatactgtgatagtcatgttctccaccctatcgcaagctgtgcaatctcttgctgaagtggggttgcccagtgcgaggcaaaacaacgtagtgaagagtgtgaataacatcacacctattgactttgcttgaaaaacatgccatcgcgcgtgaataggtgagcgctcacaagaaaaacaagacatttcctctctgcgggtgaggccggcaacaatggcgcatccggtatctggaatgagaataagggactgtacaaaaccagtgacggcaacatcgaaatcctcaaaccagaggcggacagcgatggttcgacctccacggccgcatccaagggcaccatgcttatcgcaggcaactccaaaaccgtggcactcggtccaggcggcatggccttggctcccggcctgccgctcggtcttggctggttcatccgacgccgcttgggattggatgcctccgacattctggaccgtaagctcggcttgaagtaacggctggttcggacgtgattgctgtcacgtacggatcatgacgacagcgcgaaggtcctcatcggtttacgtcgatgaggaccttcgcgcgcattaggggagtctgttgcgggctgcgctacgcgggtcatgctgcgcgggcgtgctatgcgaacaaactacgcgaacaagtcgttcagtgcctcggcaatcgtcggatgcgtgaacaccatatcgcgcaacgtgctggccggcgcgtcaagatccatcgccaacttgacgatattgatcacctcgtgcgactcgacggaaagcagcatcgcacccagaatgcggccagtattgcgttccacaatcgccttcatcagaccatccggtcgccgcattacctgggccttcggcacagcggccaccggcaatcgcttgaccacataatccaatccagccgccttcgcctcgcgctcattcaatcccacgcgcgagtaaggcgtggcgaggaatgtgctcgacggcacatgcttgcggtccttcaccgtgtacggacggtcggaaccattgagctgcgaccacaccacgcgatagtcatccagcgaaatgtacgtgtgctgcgggccgccgttcacatcgcccagagcccaaatgtcggctgctgtggtgcgcagaagctcgtcgactttcacggcaccgcgttcggtgagctccacgccagctgcctcaagatgcagtccctcgacgttcggcgtacgtccggtggccaccagtaccgcgtcggtggtcaggcagaatcgggcttcagccggctcggcgaaccgcggctcgccatcgtctgatggtttcgtttgaacgtgtgacatcgtggcgtgatcggtcgggttgctagtggggctggtggttgttgtagtgtcggtggcgccggtggcgtcggtggcaccggtgatatcggtatgagcgttcccggtgccggcgggggtggaatcgcaagcttgcgatgcgccgcgagtcatacccttcaccgcaacggacaacctgacgccgccgtcagcagcaggcgcgatggccttggtatccgcgttgaacaggaacttgacgccctgcgcttccaactgtgcgcgaatcgcggccgccacatccgcatcctcgcgcggcaggaactcggcattgtgctgcagcacggtaaccgccgtgccgaaatcggcaaacatcgaggcaaactcaagtccaatgaatcctgaaccgataatcaccagtcgctgcggcatatcgtcgagatccatcagtccagtgctggtgtagacgccgggcgtagtgtggataccgggaatatccggaatgcgcggcgtggcaccggtattgatgaagatcttgctggcggtcacggcgaccgggccctcagcggtggcgatttccacgctatgagggccggtgaagtgagcgcggccggtgattacggtgatgttgtcttggtcggcgagcttgtgatagttcttgtcgcgcagcatcgaagtgacgcggcgcttctccttgatagcagcctcgaacgctgcttcgcgggtttcgggagtactgttcgcgccatcccgccgcgcctgttcggcggacaaaatcagtgacttggacggcaagcatccgatattgatgcaggtgccgccgtacatgtcggcgcttgcctcggcgacgacgaccttgcggccggctgcactgagcttggcagccaaggttttgccgcccttgccgaatccaatgatcagggcgtcggtggtgatagtgggggaggtgctgggtgtgctgatggcattgggtgtgctgatggacatggttacttccttacgtattcgagtgataagagtgcgttgtgctgatgtgttgtgtgccgtgcggcgtctgttttcttctttgactgccgaagcgttatcgactgatgctggctaggggagatgcgcgggattattggcctttgcgctcgctgaatatctgttcggtgatgtcgtggatggtggtgtgttcgagttgttcgaggcaagtgcggttgagcccggcatagatgtcgttcatcactgcgcccattgaagatgacaccagacagtcctcgtgtacgtcgcccggtgtccagttcactttcacaaaagtggtgccggtggcttccgctaccgcacgcaaagtgatttcggcggcgggccgggccagagcgtacccgccttcagcaccctctttagtggcgatgagtccggctgaggcgagcggtcgcattactttgcgcacgcgcgccgcattggtacatatgttctcggccaggatctgactgggcaggtgtgtggcgcgatggtcaaggtagaccaatgcgtgcactgccagtgaatggtcgccgttcatgaaacgacctccttaccgagtcgatactgtaactatgatgtgtacagttatgatactgtaatcatatcagatacagttagtgtgtcaaatcggggttgaagaggtggatgactatgtgtataagtgaggtgtccacatggttatccacaatgaatgtgcgtaagtgaagctaggaccacatacctcggatcggcttccgtttccgcacccactacccatatggtggtgtcatgaacaggatgaccgacggcatcaccaactatggagctctgccaggctctatatacgatcagcctccggaagaatcggaggcagtttttgttccgcccgaatttgcggggtcattttctactgactcgaaatacccgacttctcgcgactcgtcatcgccgaacagtggtgcacatgattctgcagcgacaccgaccatgagcgaaagcctcgcccagcgcagacgcgacatggtcgcacgctgcactgaggaagcgaaacgggcgggcaagaagctgcttttcggcatgaccacttccctcgctctgcaatccgtaccgattcccgccgattgcgacctcgactcggccaagctgcacactgtatccagcgttaagagcaagcggttccgtacacgccatgcaccactgcaaacgcatatttggaaacatgcggctaaagccgccaatgtggaaatgaaccaacacgtgtttgcgctggacctgtttcacgtatgggcccaacttgccccgtatgtttcttttgagtccctgattgtgctcggggatgccgtcatcgctgctacgagcaaacagccagtattggccaaggatcgtgatgctgctgcaatctatcaggatctggtgaagttcgtggagcagtttacccgattcagagggcgcccgtcctgcgttcgagcattgctcctgatatcacctggtgctgattcgcccaaagaatcagaagaacgactctctctggtagcgcatgggattccacggccggttgcgaactatgtggtgccggacgcggcttttgcatctggagctcccataacgttggacttagcgtggccggagttcaaggtcgctgttgaatatgatggcgatcatcatcgtacgagtaaggctcaatggcgccgtgaccaagagaaaaggggtgtgctggtcgggcggagatggctggtcttcgtcgccacggcggcaagtatcgctaacgaggacgctcgtgctgaattcgctttcaacgtggcgagggcgcttgcttcgcgcggtgccgtattcgagtttcatgtagttgccatgtctcttgaagagttggcgcagagcctgctgtgaccatgatgtccgaaatggactgatgtaaaggcaatatttgtacgacctgttgttgtggtgtgtgcttgatattgcatgccgttcgattgcgatgcctcgtagtgatggatttcgtgaatgactagtgttcgattgtggagggaaatgtgtcatagtggtcgattggggggggcggtgcattgggcgtggatttgcgccaatgggtgtgggacgctacgcatgttttgccgatttttgcgtggcgtcccacggcccctcgggtaatggctgtgacgggtgtggcaggaatggcgtctttccggggtttccagtttgagtgtgtgggatgggggaaatgtaaaacgattgacttagctgttgtcccacgcttttgtgggatggcagctctggaatgggcaaattcgtcgcggtgtcccacaacgatgttaaaactcgaccatgatgcaagccgaccgaacgcttcggcggtcatctggccgctgtgaccccacaatgatgatggtaggcaggcgaacgtttcgcggtcatctggccgtcctgccctgcagtgatgttgagaaaatgcagtcacggtgcatgaggagaaccgttgacctgcgtgtttcagtggtcgcgaactgcatatgcgctaaaaaaagctctgcagtggattgtatgaatccaatgcagagccttattggttgctgtgaacgcgactaacgcagcgatttcactcgctcagggccttgtcgaccacgacggtggcctcgtcgagcaccttgtccagagcctcgggggagacgaaggactcggcgtacaccttgtagatgttctcggtgccggaggggcgggcggcgaaccagttgtccttggtggtgaccttcagaccgccgatcttggcgtggttgcccggtgcctcggtcagcttggcggtgatgtcttcgccagccagggtggaggcggtcacgtcgtcgccggacagtgccgcgaacttggccttctgctccagtgtggtcggggtgtcgacgcgcttgtaccaagactcgccgaagcgctcgacctgctcctggtgaagctgggccgggttcttgccggtcttggcagtgatctcggcggccagcaggtcggggatcagaccatccttatcggtggtccacacgcggccatccttgcgcaggaagctcatgccggagctctcctcgccgccgaaggcgacttcgccgctgaacagcgggtccacgaaccacttgaagcccaccggcacttcgatgaccttcgcgttgatcgatgcggccacgcggtcgatcagggaagaggagaccagcgtcttgcccacggctgcgccctcaggccagcccggacggttgccgccgaacaggtactccacgcacacggcgatgtagtggttcgggttcatcacgccccagttcgggcagacgatgccgtgacggtcggcgtccgggtcggtgccgccgaccagatcgtacttgtcccaagcgccggcgttgagctcgtcgaccaggcccttcatggcgtacggggaagacgggtccatgcgaatcttgccgtcgtggtcgatggtcatgaagcgccaggtcgggtcgacctcaggacgcaccacgccgatgttcaggccgtacttctcgttgatgagcggccagtagttcacggaagcgccgccgagcggatcgatgcccagacgcacgccggagttgcggatcacgtcgaagtcgatgacgttctccaggtcgtccacgtagtgctcgcggaagtcgaagccctcgacgtactcggacttgatggcctcctcgtagggcacacgcttgatggacttgaagtcgccgagcagctcgttggcgcgagcggcgatggcgttggtggtctcggccggggccgggccgccggtgacggggtcgtacttaaagccaccgtcggtgggcgggttgtgggacggcgtgacgacgatgccgtcggcgaggccctcgccctcgaagcgctgggtgccgtcgaccgcacggttgtgggtcaggatggcctgggagaccaccggggtgggcacgaagtcgtcacgggagtcgacgcgcacgtgcacgccgttggcgacgagcacctcgatggcggtcttcttggccgggccggacagcgcgtgggtgtcggagccgaggtacagcgggccggtgacgccggccttcttgcggtattcggcgatggcctgggagatggcgatgatgtgggcctcgttgaacgaggtcttcagggacgatccgcggtgaccggaggtgccgaagatgacacgctgttcggggacttcgggatcggggacgaggtcatagtacttgccgataacctcatcgacattaatcagatctgctggggtggcgggctgacccgcattgtttgctaccatgctccctattctgccacgtttttcgccactttgggtactcttatgttaagagttgtcaacttttgtgcgaatcgtgtgccggttgtctagcgcttggtcatttcctcctcgatttcctccagcgacttgcccttggtctcgggcaccaagcgcagcacgaacgggatggacagggccgagaacacgccgaaaatcgcgaacgggccacccacattgttgccgaacgcatcgagtagcacaaggaagaactgggagacgatgaagttgcccagccagttcgccgccgagccgaaggatgagccgatgccgcgcacgctcagcgggaagatctcgccgataagcacccaggcgatcgggccccacgagaccgcaaagccgaggatatagaaagcgatgagaatcatcgtcggcactgccagcacggccacgtcgcccacgaagttcatcacggcgagcaccgcgagcgaaacggtcatcacgatggaaccgaagatcagcatgcccttgcgcgggaaacgatccatgataagcgtggccacgatggtgctcacgaagttcaccacgccgatgcccaccgacacccagatcgcgtcgccttcagggaagccgaagcccttgatgaacacctgcggcaggaagtagatcaccgagttgatgcccacgagctgctggaacagcatgataccgatggcggccaccagcgccggacgagcgatacggaacagttcgcgcacaccacccttggtgtcctgtgcggccacggccttgatttcgtccagctcaatctgcacctgggtctgatccacgtccttgcgaatcagcgtaagcactttgaaggcgttgcgggtgtcgcccttgttcaccagataacgcggggattcgggcagcaacaggccgccgagcagcaacaaggcggccggcaccagcgccgaaccgagcatccagcgccagtcgcggatgccgaagaggttgtggttcaggaatccgaggttggaggcgtaggccagcagaatgccgaaggtgaccatgagctggaacagcgtggacagtgagccgcgacgctccttcggcgccagttcggccaagtacgccggggtcagggcggaggccgcgccgacggcgagacccaggatgatgcgggcgcacaccatcatcgcgaatccggtggaggaggcgcacaggcctgagccgagcaggaacagcagcgcggagacgatgagcagcttcttgcggccgaaccggtcagacagtgcgccgatcgacagcgcgcctgcgcacgagccgatcagcaccgaggaggtgatgaagccggtctgagagacgctcaggccgaagtccgattcgataagcggggaggcgccggagatgatgccggtgtcgaaaccgaacagcatgccgccgagcgcgccgaaggtgaagatgaatgcgctgttgagcgggaagcgcgtggagaagccgtgcgattcggcggcttcgaggtcctcgattgcgttggctgccgcgtttgtggccgcgcccgccactccggccacgccggtttcgatggtttcgattgcggtggccgctgcaccggttgcgctggtttcctgcaccgcggatgccgtctgtttcgatacgggtgatgccgttgtcgtcgtcattgccttgtcctttcgccgttgacggaccgcgcctgttgcgtggcccctctgccgcgtgcaaggtcaggcttcgattgtctgcagtcgcccgaaaacaaaaaaagacctggaacaacgtggaattcgcatattacgatacgcaaattccacgtcgctccaggtcttgcctcgttttgagtaacaaccctgctacgcaacgtgtgtgaaagatagaatacgacttccgcagtcgcgacactccgaataggcagcaaaaaacgatgatttttgacaacgattgcaggattctgcatggtggaatgatgtcggaatgggcgctgcggcaaatacggagaacgggtgtggcgaagcatcatcgcggaacattatggcgggacaccatcgcggagcaccgtagcgcatagttgccgtttcgcgatgctttgccggcattgccgtgcttttggggcacccagcgccgataatggaacacagtggcatacggcagcaaggaggaaccgtggcgaacgcatcgaacgcaacgcctgcagtgattgcggcgcgcatcgtcgatgccgtcggcggccccgcgaacattaccagcctgacccattgcgccacgcgactgcacttcgaactggccgatgccggccatgtcaaccagcacggtcttgaatccatccccggagtcctcggtgcattcccgcgagccggcaatcgttatcaggtcatcatcggcggagcggtcgcctcggtgtacgagcagatcgttcggctgcggacggcgcgattgatgccggcagcgcaattgccatcggcagtgatgcagtcagcgtcgcagtcaacgcaacccactcagtcaacgcaacccactcagccaatgcagcccactcagccagcgcaacccgcgcagtcagcgcaatccacacagcccacgcaacccgcgcagtccgcgccgtacctttccgacgatgccgcaccatcgcgcgatactgccaccgacgccgaacaaagttgcggcccatccaatacatcccgtcacttcacgcctcgtaccgtccgcgagtggggcagtgccgtccgcgcttgggctgccgcgtttttcgactacctgtctgactcgttccgcccgattctgggtgtactgctcggtgcctcgctggtcatcgccatcgtcaacgtgatcgttgcactcggcatcgtgcctgacggcgagacctccgccggctggatactactcaaggcgatttgggagggtgtgttcaccgttctgccgattatgatcgcctacaatgcggccaagaaactggacgtcgacccctggctcggcggcgcgattatggccgcgctgatgaccccgcagtttactggcgtgatgtccggaatgtccggaatgtccgggacgtccgtatccagcgccctctccggggcgattcaatgctcggccaacgccgtattcggcgccgaaacctgcaccgtgtcggcgttcggcataccgattcaactcaacgactacggcggcaacgtcttcgtgccgttgctcatggctgccgtgctcgccgtggtctaccacgggttgaagcgcgtcattcccgacagcgtacagctggtgttcgtgccattcctctcactggtcgtcgtttttgcgctcaccatactggtcatcgggcctctgggaatatggctcggcggtgggctgggagcggccacagcatggcttaacgcgcacgtaccgttcctattcgcgctcatcatcccgatgctctacccgtttctcgtgccgctcggtctgcactggccgttgaatgccctgatgctgatgaacattcaggcgctcggctacgatttcgtccaaggtccgatgggtgtatggaactttgcctgcttcggtgccaccgctggcgtgctcgtgctggccgtacgcggcaaggattcggccatgcggcagaccgcggtgggggcgttgctcgcgggattgctgggtggcgtttcggaactgagcctgtacggcatccatctgcatcaccgccgcgtctaccgctggctgctcgccggctgcgcggccggcggcgtgaccagcgcggtgcttggctggctgttcccatccgtgctgccatccggtcagatggtccggggcgtcacgactacggcgttcgccttctcctcgttgctgacgatttcggtgtttgacagaatgtgggtgtacgcgctgtccatcgccgttgcgtttgtaatggcgatggtgctgacggtgctgttcgggtaccgtacgccgccgcgcgccacggaggcgcagatggtctcggcgggcgagaacgtacgctcgcaggatgcggtgagagggattggcgcgacatcgtcggatgcggagtctgcggaagattccccatcgcggcctgcctccgatcggactcctgactccaacgccatcctgtcgccggtcgccggccggttgatgaatctggaagcgactggcgatccggtgttcgcctcccgcgcgctgggggagggtgtaggcgtcgtgccggagacggccggcgagacggccgtgctagcaccggtcagtggcacgctgaaaaccgtggcccggaccggccatgccttcggcattaaaaccgatgacggcatcgaagtgctggttcatgtcggcattgacaccgtcaatatggatggcgagggattcgtcgtggccgtgggcaaaggcgagcggatcgcggcgggagagccactggccaccgtggatttcggcaaagtcgcggcggccgggcacagcgttgtggtggtggtgacggtggtcaacgccgctgaactgaccgtggtcacgccgttgatcggcgacggtagcagcgacgacaacggcggcgactgcaaaaccgtatcagccggcagcccgatcatcgatgtggaacaatgacgttgcgaaaggatgccatggaaatactgcgagtgttcaacaacaacgtcgtgctcgccaaaggcggcgacggcggtgaggtgattctcaccggccgcggactggggttccaggccaagccggggcagacggtcgacgagtcgaaagttgtgcgcaccttcgtgccatcggacgggcgcgaccctgaccatctggcgcagatgctggcggacattccgcccgaaatcatccgcgtggtcgtcgaatccatgcaggagaccggactgggggagcgcgagaccggcagcaccacgctggtcatggccctgtcggaccacgtggcgaatgcggtggagcgggtgcggcgcggcatcgacatcaactacccgctgctcggcgaggtgagcaacctgtacccgcaggaatacgcgcaggggcgtgcgatgctcgcatcgctcaatgcacggctcgacgtcacgctgccggacggcgaggccaccgcgcttgccatgcatctggtcaacgccggcttcgccaccggcgacctgtcctatacgtacacgatgacgggcgtgatccagcaactgcttgacatcatcgaccacagctacggcatcacgttggaccgcagttccgtgaacgtgagccggttcatcacccacctgcgctatctgttcgtacgcatccaccagcaccagcaactgacggacgagccggcaccggtgatgaaggtgattcgtgagtcctaccccgctgcgctgcgatgcgcgcgaaccatcgcctccctgctcgaactgcgcctcgacacggatatcagcgacgacgaaatcgcttatttggcgatgcatgtcgcccgagtcaccggccacgcatcgtagtaacggattagcggattggcgaatcagcgaatcggctcgagtgtaccggtcatttcggcgaaattcgaggtggcatttgaagcagcggcctgcgcggtcttttccagcgcggaggcgtcgggcacgcgcacgatcagcgcgcggtgatccaccgagaaacggatgtggcgggtttccggcagcatgtcaccgtccacctgcgctttggccggcttttccaatgtgatttcggcactgacaccctggacctgttcgatggtcgagttcgtggacagcgggttctgttcgggcttgccgatgatcgtctggtgcaccacgtcgccgaacaggttggcccagccgaggatgccgccggtggtgtcgatgatttcgaagtccagcagaccatcgtcataggatgccgccggcatcagcgagaacatgggaatctggccgcagttgccggccatcaccgtgcggaaatcgagattcttgatggtgtgggtcgagccgtcggcgctggtgactgtcagcgtgccgcggaacttcggcgcgaacaggttcttcacgccgcccacgaagtaggcgagccagctgatgttcgccttgagctcggggttggtgtcgtcgatcatggccgcatcgaagccgatgccggcgatgatgaggaaggcgtggccgtggtcgtcctccgggtggtcgagcagggtgagacggcccatgtccaccaggcgggagccgtgggaggtggccacggtcagcgcggcgtcgatatcgtccacgggaacgcccatattgcgggcaaacaggttgccggtgccgatggggatgatgcccagcgcatggccggtgccggagacggcgctcgccaccgtgcgcaccgtgccgtcgccgccgaccgcgatcaccacgtcggcgccgtcctccagcgcctcaagcgcgcagaccctgccgtccttgtcaagctgggtgtcgtagaagcggatgcgattgagccccttggcctcgcagaacctctggatatgcagccggcgggcttcggcctgcggtttggacggattcacgatgaaggcgtactgcacctcgtcgtcccggcgcttctccagcgtctgagccagcttgcggcggcgctgcgcgcgcagggcgatgacgatgacggcgatgagcaccaccacaatggcgattgcggcgatgatcagaaacacggtgagggcaggctgaggcatggctcctattgttatcggtggggaggtcgttcgcggccatggtgcgccgtacgtgaacatttcctgcacgcaacagccccgtggggcgcgattatggttcaatcgcgtctcatctgacgaaattggccgggtggacccgtccgcggactttcccgggcttccctgtgatttccgcgtgactcccgcgcattcggccattgtcggtgtctgcttacgcggctagtctggtgcccatgcttgatattcaattcatccgtgaacacaccgatatcgtcaaggaatcccagcgcaagcgcggcgagtccgtggaactcgtcgacgaagtgctctcctccgacaccgcacgtcgtgaggcgctgaaggccttcgaagaggctcgtgcccagcagaaggaaatcggcaagaaggtcgcctccgccccggcggacgagaaggccaagctcatcgccgagaccaaggaactgtcccagaaggtctccgaatacaagtccaaggccgattccgccgccgaggaatacaccaccgccatgtggaagctctccaacatcgtggagcccgaagctcccgaaggcggcgaggacgactacgtggtcgtcaagaaggttggccagattcgcgacttcgcggccgaaggcttcgagcccaaggaccacctgaccctcggcaccggcgtggccggcatcgacatgcgccgcggcgtcaaggtcggcggctcccgcttctacttcctgcgtggccaggtggcccgtatgcagatcgccatgctcaccatggccgtggaccaggccgaggagcacggcttcacgctggccatcaccccgacgctggtgcgccccgaggtcatgcgcggcaccggcttcctgaactcccacgccgacgagatctaccgtctgcgcgagcccgacgaccagtacctggtcggcacttccgaagtggcgctcgccggcatgcacgagaacgagatcctcgacctcggcaacggcccgctgcgctactgcggttggtcctcctgctaccgccgcgaggccggcgccgcaggcaaggacacttccggcatcatccgcgtccaccagttcgacaaggtggagatgttcgtctacgccaagcaggaggactcctacaaggagcacgagcacctgctggccatggagcaggagatgctcgccaaggtcgaagtgccctaccgcatcatcgacaccgcagccggcgacctcggctcctccgccgcccgcaagttcgactgcgaggcctgggtcccgacccagggccgctaccgcgagctcacctccacctcgaactgcaccgagtaccaggctcgccgtctgaacatccgcgagcgtatggaagatggcggcacccgtccggtctccacgctcaacggcacgctggccaccacccgttggctggtcgccatcatggagaaccaccagcagaaggacggctccatcgagattccgcaggccatgcgcgcctacatgggcggcaaggaagtcatcgagcccactaagtgggaggcctgagtctcatcgtgctttagctccctttaatgggggagctgtcagcgtagctgactgagggagagatcgctaatagccagcaggcgaatccaagaccgaccgcactgccgaatatcaacatccctcccttctgtataatgaatacttgcgcgtgtgaacgcgcatcaggacaggtgtctgagcggcctaaagagacggtcttgaaaaccgttgaggggcaaccctccgcgagttcgaatctcgccctgtccgcgaaccgaggcctgggcaacatgcccaggccctttttctttttctggaacctgtcttcttgatcgccaccggggtgctgatatattggtttgtaatgccgtaacatgcggtgtccccgttgatatgacgggccaatcggcgtgagccgataagaaaaggcccgacgtttgcggcatcgggcctttgcgttgattaccggcttgcgcctttaatcaacaaggttgcaagatgaatcatatcacgatgcacggtagtctgaccgtgaacgggcgcaccgtgatcgtccatgtgggcgatggcgaggcgaacgccacggttgacggcacgcacttcaacgtgcgtagcctgtggcagctctaccagttgctgagactgctcgtgtagcgtctcattaaggcgcggtgcccccctagtcgggtatcgcgccggcaacctgaaaaccgataatgttggcaagtgcttgcaatttgtggtggacgattgcaagctgacgtcttggattgttgccgctatccaatatctcattaggtctaccggtggaccaaaagtacgttgctttgtaaggggagttaatgaaatgaacaaacccgcacaatcgagcatcgaatcggtttaatgccactcacctcaacgggacgcgcggtaattgttagctaagttgacaataaaagagcaaaggcctaaattagcaatcagtcatcacgctgaggtgatgatttcactaggaaggagtagagatatggtatcgcacaacaagcgcatcgtggctgctcttgccgcggtagcagcaatgggtattggtttggccggttgcggcggcagcgacactgccggcgacacgaagtccggcagcgatggcggtgtggtcaacatcacctatatgcatcgtctgcccgattccgaaggcatgaccttggtcaacgacattgtggccaagtggaacaaggagcacccgaacattcaggtcaaggccaccaagttcgatggcaatgccgccgacatgatcaagaagctcgagaccgacgtcaaggctggcaatgcgccggatctggctcaggtcggttactccgaggttcctgaggtcttcaccaagggccttctgcaggatgtcaccgatgaggccgccaagtacaaggacgatttcgcttccggcccgttcgcactgatgcaggtggacggcaagacctacggtctgccgcaggacaccggcccgctgacttacttctacaacgccgctgaatttgagaagctcggcatcaccgtgccgaagaccgctgacgagctcattgagaccgccaagaagaccgctgcccaaggcaagtacatcatgaccttccaacctgatgaggccatgatgatgatgtccggccaggccggcgcttccggtccgtggtacaaggtcgacggcaactcctgggttgtcaacacccagactaagggctccaaggccgtggccgatgtctaccagcagctgatcgacaacaaggccgccctcaccaacccgcgttgggatgcatcgtttgataactccatccagtccggtcagctgatcggcaccgtggccgccgcttgggaagccccactgttcatcgattccgccggtggcactggtgctggtgagtggaaggtcacccagctcggtgactggttcggcaatggcaccaagaccggcgccgatggtggttccggtgtggccgtgctcaagggttccaagcacccggccgaagccatggagttccttgactggttcaacacccaggttgatgaccttgtctcccagggccttgtcgtggccgccaccaccgcggatgccaagaccccgcagaagtggtccgactacttcagcggacaggatgtcatggctgagttcaagaccgcgaacgacaacatgggtgacttcacctacatgcctggcttctccgcagtcggcgctgcaatgaaacagaccgccgccaaggctgccgaaggttctgccaaggtttcggatgtgttcgacaccgctcagaagacctcggtggatacgctgaagaacctcggtctgtccgtcaaggagtgacctcactaggtcttgtcaacgggccggcttgaaatagccggccgtccaagacctccgatgcctcgcatcaccatagcgaaaggccggggcacatactccggccttccgtattgtttgggggtattgctgcaggggcgctgtggcccttgtcatttgttttactgttctttgcgaagacaggttttgtattatgactgcatccactactcaggcgaagggcaaagcacctaggcgtgccgccgccaagccgaagcggtccggcgctcagaagcgcgagaaccgcaccggctgggcgttcatggcaccgttcgccgtcctgttcactttcgtgttcatcttgcccatcatctgggccatctattccagcttcttccgtcaggtcaccgagggcggtggcgcatacggcggtggcgagctggtcaataaattcgtaggattccagaacttccagtatgctattacttccggcaacttctggtccggcgtcggcagggtgctgctctacaccctgattcaggtgccgatcatgatcatcgccgcactggcgttggccatcgtcatcgactcgttcgtggtcaagcatgtcaccggtttccgtctgggctacttcctgccctacgccatccccggcgtcgtggcctcgattatctgggtctacctgtacaacggccaaatctcgccgatcgtcaagggacttgccgccatcggcgtcaatgtggacttcttcaacaagaacatcgtgctcggctcgatggccaacatcaccacatggaccttcaccggctacaacatgctgattttccttgccgcactgcaggccatcccgcatgacctctatgaggccgcccgtatcgacggcgccaatggttggcagattgccacgaagatcaagctgccgaacgtgcgtggcgcggccctgctggccatgctgctttccatcgtcggcaccattcagctgttcaacgaaccgcagatcatgtctacggctgatccgggtatttccaagtcgtatacaccgatgatgatggccatgaacacttctcagggcaccattaccccgtctggtgacggtccggcctcggccatcgccattgtcatggctctgatcgcaggtgtgcttgccgtgctgtacaccttggccgaaaggaaggtgaacgagtaatgagctccgcaaccgttgaagaacgcgcccgcaaaaaggccgagcgcaagctcgaaaagcagcgtcaggctgcgcaacacgatttgcctcgctccatgcgaccgtccgcggccgtgaagaccctcaccgtggtgctgctggtactggtgttgatctacttcctgttcccgatttactgggccatcatcgcgtccaccaagacgccggcccagatgaccggtagcaacggcatgtggtttgctgtgccgcttgaccagctgcccaatgccatcgccactaactattccaagctgcttggctggactcgtggcaacttctggcgctgggtgctgaactccctgatctactcgggcgtctcggcattgatcggcaccatcgtgtctgtgatggctggctacgccaccgcaaaattcaacttccgcggcaagaacgtggccatcggcatcattatggcctgcatgctcatgccgtccgccctgctgaccatcccgatgtactcgatcttccacacgttgcacctgaccaacactatgctctcgatcatcatcccgtgctgcgtttcgccgttcggcttcttcctgggccgcacgtacgcacagagttcggtgccggacgaactgcttgaagccgcccgcatcgacggcgcgagcgaggcgaggatcttcttcaccatcgtgctgaggctcctggccccggccatggtgacgattttcctgttcctgttcgtggccacgtggaacaacttcctgctgccgttgatgatggtgtcttccgacaccttgaagcccgtgaccctcggtctgtacggcatggtctcgctggccacgttcaccgatcgcggcgccctgatgatgggtgcgttgctcggcgtgctgcccgtgatcgtgctgttcctcggcctccagcgctactggcagtccggcctcgccgccggtgccgtcaagggctaaccaatccgctgcccggcatgtcgtgtcactccttccggtgccgggcaacgtccctcccatattcagtgacacgattccaatcgtccggcgtcaccgtaagcgtcaaggatctacgcagtcagggtcccagggcccgcgatgacgccggtcattttgtatgcgacgaattcgtcgctttgtagttttttgatgaccaaccccacaaaggagcactcatgaccagcaccggccgcttcacgctgcccagtgaagagaattttgccgaaaagaccaaggaactcgccgaattgtggggtgcggacgccatccgcaactccgacggcacgcatctggacgaggcagtgctcgctcttggcaagaaaatctacagcgcctacttcccgacccgcgcccacaacgagtggatcaccctgcacatggacgagaccccgcaggtctacctgctgaccgcccgtatcctggccgagtccaacgcggtggatgtgccgctgatggacggtttcttcgaggaacagctcaagcctaaccgtgacgccgaccctcataagtactgggaagtcgtggaccgcaccacgggcgaggtcgtggacccgtccggctggacgctcgacccgggcgaggacaccgtgcacgtgaccgtcgccgtgccgatgcacgaatacacggtgagtttcctggcctacatcatctgggacccggtcgagatgtacaaccacctgaccaatgattggggagacaaggaacacgagattccgttcgacatctaccatccggccacccgcaagttcgtgttcgatacgttcgagcagtggctgaaggacagcccgcaggtggatgtggtgcgtttcaccacgttcttctaccagttcacgctcctgttcgatgccaagcgtcgcgaaaaggtggtcgactggttcggttgcgcctgcaccgtgagcccgcgcgcattggacgatttcgagaaggagtacggttaccgtctgcgtccggaggatttcgtggatggcggtgcctacaactccgcgtggcgcgtgccccgcaaggcgcaacgcgactggattgacttcctctccggattcgtgcgcgagaacgtcaagcggcttgccgacatgtcgcacgcggcaggcaaggaagccatgatgttccttggcgaccagtggatcggtaccgaaccgtataaggacgggttcgaaaagctgggtttggatgcggtcgtcggctccatcggagacggcaccaccacccgcatgatcgcggacattccgggcgtcaaatacacggaaggacgcttcctgccgtacttcttccccgacacgttctacgagggcaacgacccgagcatcgaaggcctcgacaactggcgtaaggcccgccgcgcgatcctgcgttcgccgatcggccgtatgggctacggtggctacctctccttggccgccaagttcccgaagttcgtggacacggtgacccatatcgccgacgaattccgcgacatccacgaccgcaccggtggggtggccgccgaaggcgagctcaacgtggcgattctgaattcctggggcaagatgcgttcctggatggcgttcaccgtggcacacgccctgcccaacaagcagacctactcctactacggcattctggaatccctgtccggcatgcgcgtgaacgtgcggttcatcagcttcgacgacgtactcgcgcatggcatcgatagtgatatcgacgtaatcatcaacggcggcccggtcgacaccgcattcaccggcggcgacgtgtggaccaacccgaagctcgtggaaaccgtgcgcgcctgggtgcgtggtggcggcgcgttcgtgggcgtgggcgagccgagctcggcaccgcgcttccaagcgggccggttcttccagctggccgacgtgattggcgtggacgaggagcgctatcagaccctctccgtggacaagtacttcccaccggtggtgccggaccacttcatcaccgccgatgtgccggtcgacccggcggcccgcgaggcttgggaacaggccggctaccgcatcccgctgagcggttgcggcggtggccagtccatcaagccgttgggcggcatcgacttcggcgaacccgtgctcaacacgtatccggtcaatgaaaacgtgaccctgctgcgcgcggacggcgggcaggtgcagctcgcgaccaatgattatggcgaaggccgcggtgtgtacatctccggtctgccctattcggcggccaacgcccgactgctggaacgcgtgctgttctacgcctcccacaacgaagacaagtatgcggcttggagctcgtccaacccggagtgcgaggtggcgcacttccccgagcaagggttgtactgcgtaatcaacaacaccgatcagccgcagcggaccacggtgactctggccgatggcaccaccgaggacttcgacctgcccgacagcggcatcgcatggcgtgaagcctgattcccgcgttttggagaacggacccatcatgaccgaaagcaatgaagttttattcggcatcgcctcgcattttgcgctggaaggtgccgtgaccggcatcgaaccttacggagacggccatatcaacaccacctatctggtgaccacggacggcccccgctacatcctccaacagatgaacaccagcatcttccccgatacggtgaatctgatgcgcaatgtcgaactggtcacctccactctcaaggctcagggcaaagagacgctggacattgtgcccaccacctccggcgccatctgggccgagatcgatggcggcgcatggcgcgtctacaagttcatcgaacacaccgtgtcgtacaacctcgtgccgaacccggacgtgttccgcgaggccggcagcgcattcggcgacttccagaacttcctgtccgaattcgacgccagccagctgaccgaaaccatcgcccgcttccacgacaccccgcatcgtttcgaggacttcaaggccgccctcgccgcggacaagctcggccgcgccgccgcatgccagccggaaatcgacttctatctgagccacgccgaccagtatgccgtcgtgatggatgggctcagggacggttcgattccgttgcgcgtgacccacaacgacaccaagctcaacaacatcctcatggacgccaccaccggcaaggcgcgtgcgatcatcgatctcgacaccatcatgcccggctccatgctgttcgacttcggcgattccatacgctttggtgcgtccactgctctggaagacgaaaaggacctcagcaaggtgcatttcagcaccgagctgttccgtgcctacacggaaggattcgtgggcgaactacgtggcagcatcaccgcgcgcgaggccgaactgctgccgttcagcggcaacctgctcaccatggaatgcggcatgcgctttctcgccgactacttggaaggcgatatctactttgccaccaagtaccccgagcacaatctggtgcgcacccgcacccagatcaaactcgtgcaggagatggagcagaaggccagtgaaacccacgccatcgtagccgacatcatggaggctgccaagtgagccgtcagtcgaaccatacccgaaccagcatgatgggggccgagcaatgagcgatcagctgaccgaggtatacgccagcatcgacgccctagtcgattacgccttggatcatctcgacctcgatccacgcaacgcagactggacccgcaaccaaatcttcgccctcttccacctggattcctaccccggacccaaaaccacaacgtcggcggcgtcagtgtcagacgcagtccaagacattgtcggcagccgaagccaggccccctctgacgaaaagacccccgaccccctactcgccgccttccgcgccgccgccacaaccgccggcctcttcgatccggaggaaggcccggcctacgccgacaccatcatgggcatcctctccgccaaccccgccgatctcgacgaccggttcctgctcatcgagcacagggacggcggcatggccgccatgcaatggttctacgactactgtgtggccaacaattatgtcaagcgtgcccagctcgaccggaacccgcgcttcgactcgcacgggctgacggtgaccatcaacctcgccaaacccgaattcaagaacatgaagaaggcggcggccggcaacgccgtgtccggcggctacccgaagtgcacgatctgccatgagaacgagggcttcgccggacgtgacaagcgcacgctgcgcaccctgccggtcacgctcggcggtgagtcatggttctggcagttctcgccctacggctacttcgaccagcacggcatctgcgtgaacaccgaccacacgccgatgcatgtggaccgcgacaccttcggccatctgctcgacttcgtggaccgcttccccggatacttcctcggatgcaacgccgcgctgcctcgcatcggcggctcggtgctcgcccacgaccactaccagggcggcggcgaactgctgccgatgcacaaggccgccacttgggccgccttcacgctcgccgactatccggacgccgtggtcgaaatcctcgactggcccggtaccgccgtgcgtgtggtgtcgaaaaaccgccagagcatcatcgacgtatccgacatcatccgcgaggcatgggtcggttatgacgacgcggcgaacggcatcgccagccatgacgcggacggcaaccgccaatccgccctctcgcccagcgcgatcatcaccgaacgtggctatgagatgagtctcatcttccgcaacaatgcgatcagcgacgagtacccggaaggtattttccatgcacaccccgaatactggccggtcaagcaggagccgattggactgatcgaagcccaaggcctgttcatcctgcccggacggctcgtcgaccagctcggcatcgtcgaggaggcgctcgccgaaggccgcgatttgcccgatgaagtcagcgaattcagtctcgaatggggcgaactcgctgaaacattggccggaaaccgcgaccgcgaggccatccaccaagccgtacgtgacgagctcggcagcgtctgctaccgcatcctcggcaacacggccgtcttcaagcagaaagccaccacgcaaacattcctcgaaagtcttggttttgccgctaggtgaaacaggtcaagtgaagtaagctcaatactgaaggaaaaccgaaggcaagtccttccaaaggaggagatatgactactgttctggttacgggcggtgctggattcatcgccacccacaccgacatcgaactgctcgacaagggctacgacgttatttccgtagataactacggcaactcgtctcccgtggcgcttgagcgcgtcgagcagatcaccggcaagccggtcaagcgttacgacggtgacgtgcgcgatgaggcgcttatggaacgcgtcttcaccgagaacaacatcgattgggtcattcacttcgccggtctcaaggccgtgggcgagtccgtggccaagccgatcgaatactacgacaacaacctgtactccacgcttgtgctgctcaaggtgatgaagaagcacaacgtcaagaagatcatcttctcctcctccgccaccgtgtacggcacgccgaaggaactgccgattaccgaggagacgccgaccggcggcaccaccaacccgtacggcacctccaagctgttccaggagcagattctgcgcgacgtacatgtggccgatccgtcctggaccatcgtgctgctgcgctacttcaacccggtcggcgcacacgagtccggcctgctgggcgaagatccgaagggtattccggcgaacctcaccccgtacgtggccaaggtcgcggtcggcgagctcaaggaagtccaggtctacggcgacgactacgacacgcccgacggcactggtgtgcgtgactacatccacgtggtcgacctggccaagggtcacgtggccgtcattgaccacatcgacaaggaaggcgtgttcgtctacaacctgggtaccggccacggctactccgtgcttgaggtcatcaaggcttacgagaaggccgccggtcatccgattccgtacacgatcaagccgcgtcgccccggtgacatcgccgcctgctacgccgacgcttccaaggcggagaaggagcttggctggaaggccgagctgaccatcgacgacatggccgcctcctccctcaactggcagaccaagaaccccaacggtttccgcgacgccgagtgatatgagcagatgagctccctctgatgggggagctcatctgtcgtttatcacacaatgcgcctatcggcggcccagcgggtgagctcggtgcgattcgaaagctgaagctttcgcagcaccgagctcacgtgcgtttcgaccgtcttgatcgaaatgaacagttcggccgccacctctttatacgtgtaaccacgcgcgatcagccgcatgacctcctgctcgcgggcggacagccggtccagctcctcatcatgagcccgtgccgcaccatcagcgccgccatcagaccccgccgccggcacaccctgaaaggccgaaagcacaaaaccggccagttttggcgagaacacggcatagccctcatgcacctgcttgatggatgaaatcaaatcagcgccggtaatcgtcttggtcacatagccctgggcgccggcgcgaatcaccgcccccacatcctgcggcgcatccgaaaccgacaacgccagaaacacggtagtgggggagtagggccgcgatttggcgaggatctcggcaccgccgccaccttcaccgccgggcacgtgcacatccagcaacaccacctgcggcttggtctgtgcgatcatcgccaccgaaccgggcacgtccgccgcttggccgacgatatcgaaggaatcacgcaacgtggcgattacgcccgcacggaacatctcatggtcatcgaccacggccacacgaatcttggctgtctcattctcgctcatcgatgttctccctgcgccgctttcagcgcgattggcatatgcattctgacctcggtgccccagccggccctggacactatctccactgtaccgccgcgccgtttgacgcggccgataatcgattcgcggatgcccagccggtcgggcggaatggcgtccatatcgaagccttcgccatggtcgcgcacgaacacttcaaccatcgtgtcgctggcctcgcaatacaaagacaccggctcgccgccatgcgtgaccgcattgaccaacgcctgacgggtggcgtccagcagcgcatcggtctgggcactcggccgcgcgtcgcccacggtgaccacctcaatcggtttgccgtgctcgtcctccacctcggcggcgatctgcttcaatccggctcccaccgaacgatccgatgtggaacgttcctgatacagccattcgcgcagctcgcgctcttggctacgcgccagggcgaatacggtggtcggttcctcggagtgcagctgaatcagcgccaacgtttgcagcacgccatcatgcagatgggcggtcatgtccgcgcgctcctcttcgcgttccttcaatgcctgctcgtgggtgagtcgttgcagcatcgcgttcgcccacggcatcaccgccaccacgataccgacgatcatcatgaatccgctggcaacaatgcgtcgaggagaggtgccccacccgggaatgctgacattatgcacatacaatgcccatcccatgaaaatcagtgcgatgccgcccaacatagacaacagctgcgtgcctcgcggactaagattcatccatgccagtgcgatgccgcccaaccctaccagcagcggaagcacaatctgggcatccgcaccggtgctggtgagcagcagtccggtggccatcaacgcgaaaccggccaatgccacgacggccggtttcggagcacgttggatggcttcggacaatgattccggtgcggcagccgattcgtcgtcatgagcggcaagtggctgattgcctcgcgcaagcggcgcctgatcaacgggcactgtgcgagccgcagccgccaccgggtctccggcgggcatgaacacccacaggaatacataagcgatgatgcctgcgccgtagaggaaggtcagagcgatgaacgcaatccgaacccatgtcacgccgatgcccaagtgcagggtgatgcccttgcacacgccggtgagccagcggccctgccgggggcgcatcagcggcatgcgcgcgggcagcaatggttcgggagatgacgtcatactcctattgtgccgcgctcagggcgttgcggccggggttttacccggtgttcagggaacaatcagggtgttccccgagcgttgtggcagtggtcgggcggtgtaatggaatcatgagcaatccaaacgcgaatccgtatcagccacagccgcagcctggtccgcaaaaaaacaagacatcgcgacgcttcttcacttgggtgcgatccagtggactggttcgcggcgacgaccggtggatcggtggcgtatgcagcggcatcgctttacggcttggctggagccccacattagtacgtgcgttggtgattgtatgtacattgttcttcggttttggcgcagctctgtacgcactcggctggtttctgatgccggatgtacgcgatgggcacatcttggccgaggacctcattgccggccaatgggactggaattgccttggatgcttcctgttcctagccgtggcaatcgtgattccaggtgcggggtgggtttgtattgcgctcgccgccttagcgctatggttgttggccaaaagcggcattcgccagcaggaagggtacggattcggggcatctgcgccgcgaccggtttcacagcctgtgtcgtatccagctccacagcctgcctcatatccagccgcgcaaccggtccctctatctcctttgtattcagctccgcaacctgtttcacaatctgtttcacgaaccgcgcctagtgtttcacaacctgtttcacagcctgtctatcactcgatgcccagcgtgatgccgggcacagtgcccggcgtgatgcccggcacagtacccaacgggccgtttgcccccgaccgtatgaacgcgacggcttatgcccccaccgagtccaagcgccgcaagccggcgggcccaatcgtggtcttgagcatactgggccttaccttcctctcctttgccggtctgatgggactgatttgggtaaacgacatgggcattatcggcattatgcgtctgagcaccatctggattgccgcagtatgcatagtgatggggctggtggtcatcattctcggattcagagggcggcgtaccggtggtctgattcctctcggactggttgccggtggatgcgcgctctgcatgaccatcgtttcaggcacgtatggcgtgtactaccgtgatcttggtgccagcggcatcaatactgttgtttcactgagccaatctgtcagtgcgagaaacagcgacggcatgaacgatgtgcaaaaggatggcatcttcgttgccgatgccagcgatgccacgttcgaaacattgcagcaaggtgtggcgttcaacggtgaaaactacaacaccgatcaggcaatcattgattggtccgattgggacaagacacatggaccgcacacggtgaagatgctggatggcaaaacctccatcagtaattgtccggtcggtaccatcaccatagccgcaacacaggcgcaagtgcatatcgttctgccggattcctgcacttacgccttcggcaccgccgactcctacttcacttcgagtgacgtcggcggcaaatacgagatggtatacaacaactacatgggtctaagctttgttttcttcggagctgaaagcgccaccaatcccatgaatgggcctgattacgaatggttggataagggatccgccatgccggacaacggcccagaattaaaaatcaatattccctatgcagtggaagcacgtgtcaacgtggtgtacgcctccgattggaaaggctccacgttccagccgcttgccgatatatacgacggcaacagcacaagcaagaacacaaccgggcaatcggaatgatcaagccgttacaaccaggagatggaatcatgactgatgaaaccaaggaattcgcctccatcgaggatgcgacaccgaccacggccataccttccgaaaccgacgagaccaccgagaccacaaccatggtgaccgtcgatgaccgaaccgataccacggtgctgccatccgcagcggatgatgacaaaacggctgtgctacccgtccccgacgatcatgcggatgcgccggtctcggatgtggatacgcaggtgacaactgcctctccatcgcccatcgaaccaaccacagatcggattgccctggaaacagttgccgatgccgtggagggggatggcgggccgattccatctgccgatgatgtaccgatgtacgcagcatcttcagcgcaaccttcctatgagcagtctcagaccgccggcaaaccatgccagcctggggggagcgccaagagcgtccagaatgctaaggatgtcaagagtgccaagaacatccagaaacagagcatcagcgcgcctactgtggtattcggactattaggcgtgattatcggcgtgatcgcgctggttttcgggtgcatatctccggatcggatgatttcgctgttctcgccgaatccgcaattgctgacggctattatctgcgccgtagtgggacttattctggtaatagtggccgttgtatgggccatagtcggtgccgtcaagaagagaaaatagcgttacaaccattgcattacggtcccagtagaagcacattatgacgggagccgaccgataagagccgaccgttctatgctgatgggggaggcatagtaactatgaaacggatttcggcgcggcgggtagcgagcgtcatcgccaccgcgatggcgatgacgctggtattcgccacacttggctgggcgatgatgccgcaatggaacacacggccctacaccaagcacatcgctatcgcttctgccgacaccaccatcacccctgcccatgcgaacattccccacgaggggcgatatcgtacgcgtgaaacccgactatccatcaagaccggcgacggcgtcacgctacccgccgtactacgtgaaccggtcgacgctcccgggccacgcccggcttgtctgttcattcacgggtccggtaccagcggtgccgaggatttcggcgatatcgccaacgccatggcctctgccggcatcgtgaccttggtgccggccaagcgcaacgacaactacaccgtgctgcatcgcgactacccgcgttttgctcgcgaatacgggcgttcgctcgacgtgctgcgtggcataagcggcgtggaccccgccaaaaccggcatctacgccgaatccgaaggcacctggatcgccacgattctaacctcgaaacggcaagacattgcctttgccatacttacatccgcaccggtgttcaatggacgtgagcaaatggccatggctgtcagcgcctatacgcatgaggccggcgcgcccaagcccgtggtcaaagacatggccaaattgatgtcgctggactacgcgccattcgatctggcctatgccgactttgatgccgaccggtatctgaaatccctcaccatgccggtgctggtgaactacggcacctacgatacggccatgcccatcgaacagggggcgcagcggatcatcgccacggccaacaagtccggcaacgagaacgtcaccgtacgctattttgccggcaaccatcagatgcgggctggtgagggcttattcaccccgaacctgccattggccgaaggctatacgcaagcgctggaaaattgggtgaacggtgtgactgccggaaccaaagccgatggatgggcaacgccccaagtcgccggtgcgacacctcaccagcgcttcgccgcgccgcaacgtaccagatccggtatcgtcggctcgctcggcgtgctggccggtctgatggtggcagggcccgtgctgatcgtgatggcggcgatattgggtattggcttgactgtgttttcttggctacggacgttgctggccgggcgacgtagtgtggcgactgtgcgtgccatgcatgcgacgccgagtgggctgggagccgcccaacagcgtacgttgcacggcattgccggcttatctgccggtatcggcacagcggtgatggtgattaccgtgctgttgtacggctatatgagcgccgtaggcgtatcggctgtattggttatgcctcaaccgcagttgttttcccttgggtggagggcattgcaggtgctgaccgtgctgttggtcgtgctgttcgcgtgggaactggaacgtatgtggcggtatcgcgccagcattatcggcgtgcgtcgtgtcatttgcgtgatgatgacactggctgcacttgtcacattgacgatattgtctttctgggggttgttcagtctgtgatattcacggtcgttaccggctccttcccgaatatgtgccactgagtcgccgtgagcgtcacaaattcgggaaggtggatggggcgtgacggcgtggaggcactgtcgtcagcgctgagcggcttcagcctcatccaaagtgtcgaaaccgccgagctggactgtgtgcaacaaggtttcctcagtgatattgcgttgcgggctggctgcggcgcgctcgctaatcatcacctcgtagagctggaaggtccgttcggaatacgtaccaagctcaccgcgcagataggtttcgaatgaggtggcagatggtgtgtcttcggtggtggtgagtacgcgcatcgcctcgccgagcttggggtagcgctcgcggaaatccttggcccaggcgacttgctgggcgatgacctgttcctgacgggccacgcgctcttcagagggacgcggaatatacggctctatgttcttcgtgaaatcttccggcgcggtggaggccatcatgcggccgtatttttcggtcacgaggttgcggcccacgtggtcggccgcgtcaagatcagcggcatagctggtgagtaatggccgttcccatgtgaggaactgggccaaccgcatctggtggaacaccggccagttgccttggcatgccgcgcgtccaccctcattgttggtgcgctggaactgatcccattcatggcgcacaatagcctcgcgcagttcatcatcagtcagttcgttggtcatcgacgttcctttcactaatatctccctctgatgagggagatggcacggcgaagccgtgacagagggagcttgaatctacaaacttttaagcaccggatcatcagaggcgatgtggtcctcgacatacgggcgctgccattcgaggaaggtctcgccggacgtggtcaggtgttcgcgtttgagttccctgacgatatccgccgcaatctgctccacaacatcgttgattttctcgattgctggagccgcgcccttgccgccttcgccgaatccggccccgccatagcaggctgccgaactcaatcgcatcacggtttccaactgttcgcccacgttcggcaacagcgcgaacatcgagccagacagcttgcgcaatgctgcgaactgccacttgtaatacggcatatagcccaccaccatcggcacgttaaccaggaacaccaacgaggcggtggcctgcacgaactcgtggatggacagccatgcggccgcgccgtcgccgcgcttcaacgaacgcggcagattatattgaccggcctgggcgatcatgccgagtcgcttggagatcagcgcgagccgcacatcgtctggcatgtttttgaacccttggcgcgtcttggaaaacagaccggtgggatcggcgaacacctcgccattggtggcggcggccaaggtcgattcctgaagcatcagccactcatgcggcgcggtctgcgccggcgcagtgcgatacccggtgatcgactcaaagaagtcaccgatgcggaacacgccgtcacggcgattcgcgccctgtgcgcgcggcgtgacgggggagagcggtgcatcaatcggagtcgtcatcgcttccgccacatcagaggacgccgcgcctgactcggcagtggcggtatcgtccgtagcggtgccgggggtgggtgcgtttgccgcatcgggtatgacggtggagcctgcacctgcggaggggaatgccccggaagcatcggatctggcatgtgcctcgaacgtcacgcggccttgcgcatccacgctgaacttgcgcggcagtgcctcgtaatcggcctcaagttgctcgccgatggccgcgtaatcctcatccgtaagccacaggcagaagcgcgggccgaaatcgtggtcctgcgaatacgtatcatcgaatccgtagcattccgagccatggcccaccagaccggcggcgatacgcccggcatactgcggatacttcgccgcaatcatcggcttgcccatctgcgtccagaacgcgcgggccagcttcagtccggacaccgggcatgcggaaacggcctcggccgcgcccgcagaaccggtcgacaccgaaacggtggatggggaagatgtcgcgtccgcaccggtcttgtcctgtgccgggctgtccggcagccgcgatccggactggggtggcgtgcctgcatcgccggcaacacccgcattgtcaaccgtcaccccggccttcgccgcctcttcctcggcctgccgcagattgtcggcggtgatacgccagtagtcggtgtccttgccgtaacattcctcgatcacggccagcgcatgccggtatccagtaactgcatccgcatgccgtctctcggcaaagcacacctgcgcgaagcccgccagtgcggaggcataatgcgcggaatgttccagatggccggtgcgatagatttccagtgccttggctgcatgccaatgcgcgccctccaacttgtgttcggtcagcagggtcaacgccagattcgtgtgcgagctggccacgtcgatatccgcgtccgggttcacgctcgaggcttcgataatgcgcagcgcttcacgcaactccagttccgccttgtcgggccgattcgtctcgctgtagagcatcgacagattgttgtgcagtgctgcgagcctacggtcggtgggtgccagcgaatgccggcagacactctgcgcctgatgatacaaatcctcggcctgatcgtattgttgggccgcgcgcatcgcggtcgcgcaattgattagcgtggtggcccacgcctcggatgtgccggtggtcaagcccatacgagcggccagttccagcgcccgctgcacaatccactgattctccttgtgccggccctgcgagcgatagaagcccatcgtttcgttgagtacggtgagcagtccggcctcgtcgccggcgttttccgcgtccaccatcgcctgttccaagtacggaccggcttcggtggctgccgcgtggcgatcgaaaatcgcgtccagtccgttcaggaattgttgggtatcaaaggttgcgggcgattgatcggcatcgtccgtggcctggttcgcagtagaatcggcaccttgcgctgcggccgccgcatcggtgtcgtcggcatcgtctggaccatgcgcgaattgtgcggcgaattgtttgagcagtgcttcctcgtccataccgccagacctccctgaatcgtgtctgatttcagtctattaatactgtgaacaaacgcgtcagggagtttgctgtgagcttggtctcagtccaccttgatttcgcgcatgcggtgaatggcgtcggtatcggtttcgcagcgccacgagtagaaggccagcagccctacggcaagcagggccagcggcataccgcccagaccggtatagcgatagttcatcgagaaggtggtgagcatcgcgccgccgacaatcgagccgatggcattgccgaagttgaaggccacctgcacggctgcgccggcgatgagctcgccgccgccttggccggcttcggtcatcagcaattgctgtggagcggaagtaaagaacaatccgacggcgatccagaacgtcagtacagcggtcatcggctgattgcccggagtgatcagcaccagcagcaagccgaggcaggagatggactgacctattgcggccgcgccggcgtgcctccaatggtcggtcagacgacctccaagcagaccgccgatgaccataccaaagccggcaagcatcatcagcatcggcaccagggaagacgaccatccgccggttttctgcagccagggggagacgtagctccaccagcagaacacgcctgcgttgccggtgaatacggcggccagaatcacccacggtccacgacgagtaaggaatttgaactgaccggcgatgccggcgtccttaatcggcgcaacgaaggggatccatgccagaactagcacgatggtcattgccgcccatgcagccagaataccgaatgcgaggcgccaggataggaactcagccatcaaggtgcccgccggtacgccgagcatattggctacggtttggccggtgaccattaccgatacggcttgtgcttctttgcccttgtcggccaaggttttggcgatgagtgtggcggtgccgaaaaatgcgccgtgcggcaggccggcaatgaagcgcgcgacaatcagcgtggcggcattgaccgagaacgcggaggccagattaccgataagcgcaatcaccataaacaatatgatgaggttcttcggcggcaccttgcggccgaacgccagaatcagtgtgccgaagcacacgccgatcgcatacgcggaaatgtaatggcctgcggtggggatgcccacgccggtggcggccgcggcctgcggcagaatacccatcatcacgaactcggcggcaccgagaatgaacgcgcccgaagccagtgcaagcagactcttcttcatggttcctctaattacttcagtattacttacaaaaacagtgcggcaatcgattgattcgagcgatatattacggtggtccgccaacaaatacgggccttgccgcgacgcggtttgtcgctgtgcgcggcgggttgtttaccgctgtccgatcgcttggtctgattgttgggttaggaaacgaaaaaccggattgctgatttctcaacaatccggtccagttgtcgggctggcgggatttgaacccgcggcctcttcgtcccgaacgaagcgcgctaccaagctgcgctacagcccgtttggcaacagacgtagatattacattgtggtggtggacaatgcaaatcggcatgtcgcgagtgttgcgtgatggtggattcgccgtgtgtacaggtctctcaagccttgtgcagagccggttttgcgtcatgtgagcgggtgttcagatggccgtacggtctgccgggctcataatcgccggccttgcgtacactgatgaatcatggctgaagttgtcgaaaataccgaaaacactgagaatgaaaccccggccgtcccgcagatgagcaccgtcgaacgtgcggaaatgctgctcgagcaggacgccaccatccgcgagaagatcaagtccggtgccacgctggacgaagccgtggacccctccaacaaggagttcggcccgctggctcaccccgagcaggtgcagatgcgcgtggccaagcgcgcgatgatgcttgaggccggcatcgccccctacccggtgcacttggacgtcaccgacaccatcgaggcggtccgcgccaagtatgacggcaagctcgaggctggcgaagagaccgaagacatggtcggcattgctggccgcgtgctgttcctgcgcaacgcgggcggcctgtgcttcgtgcagctgtccgccggtgacggtaccaagattcagggcatgatctccaagaaggagattggcgccgactcgctcaagcagttcaagcagctcgtcgaccttggcgatcacctgtacctcaagggccgcgtcatcgcctccaagaccggcgagctgtccgtattcgccactgagtgggctatcgcctccaaggccctgcagccgctgccggccctgcacaaggacctgaacgaagacacccgcacccgcaagccgtacatcggcatgatcgcggacgagaacatccgcaacatggtgcgcaaccgctccaaggccgtggcctccctgcgccgcacctttgacgaccacgacttcctcgaggtcgaaaccccgatgctgcagaccctgcacggtggcgcggccgcccgcccgttcaccacgcacatgaacgccttcgaccttgacctgtaccttcgcatcgccccggaactgttcctcaagcgctgcctggtcggcggcatcgatcgcgtgttcgaaatcaaccgcgacttccgcaatgagggcgtcgacgccacgcacgcccccgaattcaccatggtcgaggcctaccaggcctatggcacctatgattccatcggccagctggtcaaggagctcgtgcagaagaccgccatggacgtctacggctcgcacaaggtcaccctgctcgacggcaccgaatacgacttcggcggcgaatggaagaccatcagcatgtacgattcgctgtccgaggcattgggcgaggaaatcgtgccgaacggcggccctgagcatcccggcacctccgttgagcatttgggcgccatcgccgacaagctcggcgtggagcgcgacgacgtggagaaccacggcaagctcgtcgaacacctgtgggagcacttctacgaggacaagctttacgagcccaccttcgtgcgtgacttcccggtcgaaacctccccgctggtcaagggccaccgcaccaagcccggcgtggtggagaagtgggatctctacgtgcgcggcttcgagctggctaccggctactccgagctcaacgacccgatcgtgcagcgtgagcgtttcgtggcccaggccaaggacgcactcgccggcgacgaagaggcctgcgacatcgatgaggacttccttgaggctctcggcgtgggcatgcctccggccggcggtatgggtatgggcattgatcgactgcttatcgccttgaccggtgccacgattcgcgagaccatcaccttcccgctggtcaagccgctcgttggctgattaggcatactctggctcccctcagagaggggagccagagttatatatgaaagggattgcttatgtctatcggcttgtgggttcggggcgcgcgtcccaagaccttggccacttccatcgcgtcggtgatggttggggcggtgatggcgtacgtgcatatcgagcggtcgggcacctgcatcgcaatatatccagaaccggcctcctgcgccacggcccgtgaacagcagaccctgctgatggaccgattctggccggtgaccatcctgtgcctgctagtcgcgctgttcctgcaaatcgccgtcaactatgcgaacgactattccgacggcatccgcggcattgacgccgggcgtgacacggacgaatcgaaatcaggcaaaccccagcgactgaccgcatccggactggtaccggccaagcatgtactgttcgcggcgatgatttgcgccgccatcgcctgcatatgcggtgttgtggcggtcgtgctcgcccaagcatggtggttgctggccgtgggcgcggcctccttgctggccggctggttctacaccggtggcaagcatccgtatggatacgtcgggctgggagaagtcggcgtgttcctgttcttcggcttggctgcggtattgggcaccgaatacgcgctgtgcggcacggtggacgtcggcggactattgggtgctgtggcggctggcctgttctcctgcctgatcatgatggtgaacaatatccgtgacatcgacgaggatcgtgagcatggcaaacacacgctggccgtacggctgggggagtccggcgcgcgtacgttgctgattgtgtgctgcgtcatcgcatggatcatcgccctgctgatgtgtggtacattatggtggccgtggggtgcggtgctgttgctctcgggtgccggaatacctgtgcgcatggtctccagcgtgaataaacgtcaattccgcccggctctgcccgccgccagcttccagaccttgctgtttgcggtggtgctggcggttgccgtggcgctatgagagcgaaataataagacgaatactcgtgtttgggcgcatgcggctgtagactgaaccgtatgacttataaactagtactgctccgtcatggacagagcgcatggaataaaaccaaccagttcaccggctgggtcgacgtaccgctgaccgagcagggtgaagccgaagccaagcgtggcggcgagctgctcaaggagaagaacgtccttccggacattgtgttcacctccctgctgcgtcgcgccatcaacaccgccaacatcgctctggatgccgcagatcgtctgtggattccggttcagcgtgactggcgtctcaacgagcgtcactacggcgctctgcagggcaagaacaagaccgagatccgcgaagagtacggcgacgagaagttcatgctgtggcgccgttcttacgccaccccgccgcccgagattgacccgaacgaccagtacgcccagaacaacgacccgcgctacgccggcgatccggttccggaagccgagtgcctggccaacgttgttgagcgtgtgaagccgtacttcgagtccgccatcgagccggagctcaaggccggcaaaaccgtgctgattgccgctcacggcaactccctccgcgccatcgtcaagatgctggacaacctgtctgaggaagagatcgccaaggtcaacatcccgaccgccatcccgctgctttatgagctggacgagaacttcaagccgatcaagccgcgtggcgagtacctggacccggaggctgctgctgccggtgccgccgctgtcgccgctcaaggccagaagtgagcctaagccgctaacacggtacaagctgtaaggggagtcgcacataatgtgtggctcccctttgctatgcctgccaaatccccatggggcggtgattacctcatggggcggtaaaaccctcatggggcggtaaaactctcatggggcggtatgccagaatggcttaattccgcggtttcacatatctttcaaaccgccccatgggcaagttaccgccctatgggtgttttgccgccccatggatacgccggtgtaccgcccagaagcaacaaaaaaacggcgtccagccgtagccggatcgccgctttcgggcatcctcctcaaaccataggaggacaagtgttcagttattcgcccaatgtgaggacaagccccaatcagtcgatgtcggtgccctcgtcgcgggtcggctccttggtggggtcgaagccggagacgatgtacaccacacggcgggcggcggacacggcatgatcgccgagacgctccaggaagcggcccagcagcacgatatccacggtctgctgacgggtgatgtcatcggacagcgccagatcgaaggtctggtggtgcaggttgtccagcttgtcgtcggccaggatgatggcctcggcggtcttggcatcgcgatcggagagcatggccaccagctggtcagcggtgttgtccaggaagtcgatcatctcggcgaacaccggctgagcggattcgggaatcgcggcggccgggtaggtgcggcgagcggcctcggccacgtggcgggcaagatcgcccatacgctcgaacgtggaagccagacgcatggtggaaacgaccacacgcagatcggtggccaccgggttctgcttggcgagcagcttgacgcactggtcgatcacagaggactccagggcatcaatctcgatgtcgccgtcaatcacagtctgtgcggcttcaacgtcctgattcagcagggcttccccagcgcctttgatcgccttgcgcacgttctgcgccatacggtcgaggtcgtcagcaacctgcttcagctcctcgttgaaaataacgcgcatttctctagcctttcatgcttgcttattgcaacctgtaccagtgtattattccagtacttgttccccacttcaacgtaggtaatggcaacctcaagttgttctactgttcattgggttgttcacctgaaattcatgttaccggcgtgccgggaaaccgcaatcccggcgtgtggtgtgaaagaatgggggcatgacacagatgccgctcgtcgccgcgattgctcttattgtcgcggctgttttatttgtggtgggaatcatcacgctcatcgtgggatttgcgacacatcgagtgcacgtggaatcgccgctggccgatgatgacgataatgacgatctgtccgacgacaccgccacgctgctgtccatgctgccgggtgcgtccgtggtggtcgacgagcacgacgaggtggtccgctgcaatcccgccgcctaccgcctgggtgtggtgtcagatgacgccatcgcccagcagcaggtgctggatgccattcacgaggcgcgcaagtctggtggcaagcgccagttcgacttgaccaccgatactccggagcggtacgtcgcagaccagaacaagggcgatcacgtcgccacgcagtccgtccaccgccccaactggctgaaggtgactgtagggcgtatcaacgagcagttcgtcatcgtgttgattaccgatgtcagtgacgtgattcgtttcgctcaagtgcgtgactcgtttattaccaatgtatccgagcaattgttgggccccactgaagctctggccaaactcgccgattcgctggagtccggcaatctggacgaacagcaggtggctgccgatgctcgccaggtgcgttccagctgcagcaagctcaaccatatggtgtccgatttgctgctgctcatacgcgcacaggagccgattacgccgtcttccgccaaccgactgaacgttatggaacagctcgaggccacggtggcgcgactggagccgcaggcggccgcggctggcgtgcagctgaacatcaagggcgacgatgatctagtcatcaatggtgaggcggatcagatcgacagcgccgtgaccaagctcatcgaaaacgccatcggctattccaaggaaaatggtgtggtcagtgtgtcggcatccaaagacaaggatggcgaccgtgcggtgattcgcgtgatcgaccagggcgcgggcatcgcgaagaaggaccaggcgcgcatcttcgagcggttctaccggggtgcggaacagagcaatcgcacggcggatggcgtgggccttggcttggccatcgtcaagcatgtggcgctaacccatcatggcgatgtgaccgtatggagcgcgcccgggcaaggcagtacgttcagcctgacgttgccgttggcgcagtgaactttattactgtccgaggcggcggtagtcccagcggtcgaagtattcccaaatcagcagtagcaagccaataatgacaccggccacgcacataatcaccaacggcattacgctgtagcccacggccagcagaatcagcacgacaatcaacgccacaatccatagaccggtaccgatggcaaacaccttacgcaggtccacccgtacgggcttgggcgcgggtttgcggacggcagggtcaatgagaggcgcgaacttcatactcatgcactgtagtaagagtagggaggggcgtcaaacacctctccctacgatttattcaatcggtatcagttgagaccgatcaatgtgcatggcatatatggtcggccatgcgaggcatagaccgccatcacaggtgctcgaccacatagtcgacgcacttggtgaaggccatgacatcagccggttccaccgaggggaacacgccaacgcgcagctggttgcggcccagctcgcggtagccggcggcgtccacgatgccgttctctcgcaggatagacagtatctgggaggcctggacgcgctcgtccagatcaatggtgaccacggcgttcgagcgggcgtccgcatcgacgacgaacggagcggcgtattcggagcgctcggcccacgagtacaggatggatgcggacttggcgcaacgcgtggtggcccaggcgaggccgccgttgctgttgagccagcgaatctggttttccatcatgatcagggtggctacggcgggcgtattcagggtctgatccttgcgggagttgttcagtgccgtggtcagcgagaggaacggcggcacccagcgatgtgcgccttccagatgagcgcttgattcgacgcatgccgcacgatcgatggcttcgggggagaggatagcgacccacagaccgccatcggcaccgaaggccttctgcggtgagaagtagtagacgtcggtctggctgatgtccacgggcaaagcgccggctgcgctggtgccgtcgatgacggtcagggcaccggtttcacgactgccgggcacgcggcgaatcggggcggccacgccagtggaggtctcgttgtgagcccagcaatatgtgtccacgcccttggtgagctcaggcagacggtaagtgcccggctcgccggggaacagcaccgggtcttcaaggaagggtgcgttcgcggcggacgcggcgaacttggcactgaatgagccatacgtgccgaatgcggcgcgacgggtgattagcgaagcgcaggcaatctcccagaacgcgctggcgccaccgttgccaagcgccacctcatacccttcaggcaggtggaagaactcgcgcagaccttcacgaatcgaagcgaccagttgcttgactggtgcctggcgatgtgatgtgccaagcagggtggtggcgccggcatcgagcgcggcgatctgttcggggcggattttgctgggaccggagccgaagcgaccatcttcgggcttcagcgactcgggaatactcagtgtgatagtcatggtttcaagggtagaccagtgttggggaatatcgcggataatgctcggtgtgcgggattgctgcggggctactgcggaattccggggtgccggtcggcagtggtggcaatgcggaatgcagtgcagaatgtacgcagcacatcatggctacggtgtgtcggaatgacatgagttagtgattcttccgataaccggatagtgaggttcgtgaacgggcggaaacaaggcagtctttcaccctgccgcacggttacgtaaatcgtttgacatgcccggatggtgggggatcgcattgaggattgacctctgttcgttgtacagtactcaattgtgccggtcatacggggtcgttgaaagggccccgccgaacccatccaaggagttaacgtagtatgaagcatgcttcgcataaagcgaccacggtctcgcgccagaagttcagcttagcgaaggcattgtttgcctccggcaagggttctcattccgttcgtgccgtgcgcgcggtgcaatccgctggcagcgacgccgttgttttggggcttgatccggccattgccgagaagatcaatgaaatcgctccccagactcgtcgttccattcgtgaggccgctcgtgccgctgaacgccgtagccatattcttgcctcggcctcactggccgctctggtcggcacggccgcaggtgctctcgcgttttccaacaataaagacgccacgaactcgttcgtggctgatccggccacgacgaccacgcagattaagcgcatcagcgatgtgactgcggcttctcgttccgaagcacgtactgatctgagttcgtcctccgttaccgcacagtccaccaatgaaggcggttgggggctgagcaattcagacagcaccttggacgccaagctgatgaatcgcaataatgcgaacaatcctgtggtgtcggctctcatggatgccgatggcgatgctgtgccggctggcttcaacccgaaccatgccgttggcaccaactccaacaactatccgtggggtcagtgcacgtggtacgcgtaccagcgtcgtgccgaactgggactgccttccagcggcaacttcggcaatggtggcgagtgggcggcgtcagcttccgctctgggctattgggtggacaacactcctcgccatgtcggtgatgctgtggtgttcgctcctggccaggccaatgccgatggcacatacggccatgttgccgttctggaaaagatcaatgccgacggctccattgagatctccgaatccaatgccaagggattgggtgtgatttcgacccgtacgttcagcgccgccgaagccggtaagttccagtacgtccactactgattcatttcattggcttacattcggtgattactgttcggatgtgacgtcgccctatcggcaatcgttcgcgcgaaatgacatttcaagtgttgcgaccgcgtattagtccgaactgacctgcgccgacacgccgatatatcccaatagctccggggtgttttatttcttccatcctgtacgagttaatgcgcaccgtgtaaggtgatggttctatgaagaccaaaactgtagcttcttccattgttgccgcgattgtctcctgtgcttgctcgtttatgtttgttcctacagcgactgcagctgagggtgttactgtgacttccaccaagtccttcccctcgtacacccaggtgcgcaaagatctgacgactgaagccactgccacgaatgttgaggacaatgctgattggggcggcattgagaacctcgacgtgccgcagacggaatctcaggcggaaaaggatgccgcagcggccaagaaggctgccgaagaggaggccaagaagcagacggaggccgaggctcaggcgacccagaagcaggccaacgccgcgagccgtaatgagtctcgctcttctgttacttattccgatgccagtggttcggtttccgctggtgccggtgcctctatcgaccgtgcgtattctttgatcggacagagcatggactgcaccgcattggtcagtcaagcgttggcggcccgtggtattaacttccacggttggcctgaagagtacgtcaatgttcccggtggccacgtagttacagacgggtccctgcagccgggcgatattctgatttatgccaacaccggtggatggaatggcggcgcgcactacgatcatgtggcgctgtatgtcggcaacggtcaggcggtccatggtggctggaacggctacagcgtggctctcgctagcgccatgaccgaaaaactcaccatcgtggtacgtatcccgtgatgcagtcttattgattgatatattgcaggcctcggatgccaatcggtatccgaggcccgttgcgttctcctgccgagtgatacacccgcgacatcatcttcgaaaagacattcctgttatgaaatcgacccatgtgtgctaaggtaaggcgctgatgacgaacgttaagaatattatttccacatcagtggcggttatcgccacgggtgccatgtttgcatgcgtagccccgtttgcctctgccgattccgcgcagacgagtgctatggtgtcctcacgttctttcccgaaggcgagttcggtgaagaagaatttgttcgccgaatccacctccacttcggttgacgagaactctaaatggggtggcatcgagactcttgatgtgccacagaccgagtctcaggccgagaaggaggctgctgctgcggcggcggctcagaaagccgctgatgaagctgcggcagcccagtccgctgctgctgcagccagccgctctgaacagcgtgcgtcgattccacaggttgacttgggtaaaatgactggcactggcgctgagcttgccagcttctcactgaagttccaaggctatccgtatgttgccggcggcaacactccggcaggatgggattgctccggttttgtacagtacgtcttctcccagtttggcatttccctgccgcgaacctctggtgctcaagccactgtgggtactccggtcgcaagcttggcggatgccaagccgggtgacattcttgcgaatggtactcatgcggccatttacatcggtaacggacaggtgatgaatgctatgaacccggtgcagggaacggcaataagcaacgtttccgtgttcggtggagctggatattccattcgccgcgtgatgtaacaagaattatgcggtaagcgaattcgtattaaggcacgtcctttgggatgtgccttttttcgtatacgcgaatttctttttgagcggaggataccggccaaaccgagtgtcgcggggtattgttggaggtacgcggtattcgtgccacaataacttcaaggaggtcgtcatgattaacgacaaggccattctcgtcggcgttgacgggtcgcatgccagttacaaggcaacatggtgggccgcgaattatgcaaagcacgcggggctgacgctgcagattgtctgcgcatattccctgccgagctatgccgccgtttcgttcgatgcaacttacacggcgatgggggacgataacgccgcgcattccgatgctcaggagattctggccaaggccaaggccatcgcagacgagcagggcgtcgaagccgccacactgattgttaccggagacccggcatcggtgttcgtcgaattgtcgcgtaactacaatctgatcgtcatcggcaaccgtggcaagggcggtctggccgagcgtctgctgggcaccacgtcctcgtcgctgccggcatacgcctactgcccgattgtagtggtgccgtacaccgatgatgacggcaacctgatgcacctgaacaacacgattaccaaggtggccgtaggctccgacgaatccaagtggggtctgaaggcgctggacattgccgccgacttcgccacgtgctggggtgcggaactggacgtgatttccgctgtgccgaacctgaagggcgtggatggcgaggatgccatcatggagtcctacaaggacgatcttgaggtgcgtatcaagccgttgcaggaatcgcatcctgatctgaaaatcaacaagcagatcgtttccggcccggccgtcagcgcactgaccaaggccagctacgatcacgatgttgttgttgtcggctcccgtggtcgcggcggcttcaccggtctgctgctgggctccaccagccagggactgctgcagcatgcggccggcccggtgtacgtggtgccacgcaagtatgttgaggctgcggaatcgcgtctcgacaccgtgccgagctcgcccgccgaagtgcctaccaagtcgctggaggagattgccggcgtcgaggagattccggtgtccgcagccgagcctgaagtcgcccagcagatcgaaaagaccatcgatcccgacaggcagtaaagtccgggtatacaatgagctccctcatcagagggagctcaatttattagtacgtcggtttattagtacgtcagtgcttgacggtgacgttcatgcgcaccggggtctcctgtacgtaggtgtgcttgaccgtgcagcccttgtcgatatggcgggtgacgcgttccttgagcttgttggcatcctcctcggacaggctggcgtcagaagcatcaatcaccacctgctcctcgaaaccggtgtaggcgtcgttctcggggtcgtacgtgccatccaccacgatcttggcacccttgccctcacccagcgtatgttcgatggcgaactggctggacagcgcggcgcaaccggccagcgcgaccttcatcagatcgcccggcgtgaactggccacgatccttgccgaacttaatgtgcgcgccatcgtcgctgaacgcatcccacgaaccgtccttgttgcgttcaacccacagtcgcttacccatagctgctcctttattttcagccgccggcgatctggcccatcgccatgccagcgggggagcgcggcacccggccgctctcccgcatcatcggacttctctattatgcccctaagctacactggtgcacatggctttgaccgaagaacaactcgcagatattcgctcccgtatccccgcacgtcccgaaacggacattccgatgccctatgaggacctggtgcgcaagatcctgaccgaaggcacgctgaagtccgatcgcaccggcaccggcacgatttccctgttcggccagcagatgcgcttcgacctgtcgaagtacttcccgctgctgaccaccaagaccgtgttcttcaagggcctggcctacgagctgctgtggtttttgaagggttcctccaacatcaactggctgctggagcacaacgtgcatatttgggatgagtgggcggacgagaacggcgacctaggcccggtctatggcgtgcagtggcgttcctggcccgcaccgacccccgaggacccgaatcgcaccatcgaccagatctccaatgtgctcgacctcatcaagcatcatccggattcgcgccgcatgatcgtctccgcgtggaatccggccgaggtggagaagatggcgttgccgccctgccacgcgctcttccagttctacgtggccgacggcaagctaagctgccagctgtaccagcgttcctgcgacatgttcctcggcgtgccgttcaacatcgcttcctactcgctgctcaccatgatgatggcgcagcagaccgggctcaagccgggcgaattcgtctggaccggcggcgactgccacgtctacgacaaccacgtcgaccagttccttgagcagctgggccgcaagccctacccgtacccgaccatcgagattcgtaaggccgattccctgttcgactaccagtatgaggacttcaaggtcgtcggctaccagcatcaccccactattaaggcacctgttgcggtctgatgctgattaccatttcgtggacagcgaagactgtggaggtgacggaccccgagtcttcgctgtccactacactaaggcccagttccgcaatccaggaggagtaagcgaaatggagcatgacagtagccgtagcggctatcacgaacccgagcccggatctgccgggctgtctgccactgaagaagactggggtgacgattatcccaagaccttctcggtgaatcttatctgggccgaagcccgcgacaaggaaggtcgcgccggtgccatcggcctcaatggcggcatgccttggcactgtgccgaggatatgaagcatttcaaggagctgaccgtctcccatccggtgattatgggtcgtaagacttgggaatcgctgggggtcaagtaccggccgctgcccaaccgcgataacatcgtcgtttcccacgatccgatgtaccgtgcgccgggggccactgtggtcaccagtcttgacgacgcgctcgatatggcccgtcaggaggcgattccggacgacggtctggaccgttcggagatttggatcctcggcggcgcccagctgttcgccgaggcgttgccgttcgcggacaaagcctatgtgactgatctggccgtcactgtggatgccgacagctatgcgcccgatatggcgtcgctggtcgaggccgggatgtggcgggaagccgaagtgggtgagtggcgtacgcccgccaaggaggagtccggcatcgattcctatcgtttccgtatcttggtcaaaaccaagtaagcatgcgaatccggcttgtgtcctttatggcggcatgagccggattcatattcattcgaccccaaaaacacattcgggccgtgtgcggcccggtgaagcccgattgaggattgattcaaagctatgagcaatacccagccctacaccgtaatgaccgtctgcaccggcaatatctgccgttcgcctatgggcgagatcattctgcgtcacttctttaatgagcgcggtctcggcgaccaggtgaacgtggaatccagcggtgtgtccgacgaggagtggagccatccgatcgacccgcgtgccgtgcgcgtgttacgcgaacgtggctatggtgatgagattccgcgtgaccacttcgcacaccgcatctcacgtgaggaaatcgaccgtaccgacctgttcctgccgatgaccgcctcccacatgcgcgccctgctgcgcatgctgccggccggcaagcgcgccgaagtgcacatgtaccgcagcttcgacccgaatctgcccaagccgaagcccggccgcgaggatcagattgatttggtggatccgtggtacggcggcaagcacgagttcgaggtcgccatcgaccagattgaggaagtcgctccgtacatcgtcgattgggtggcgaagcagctgtaggaatcggcctgtggccgatgctgtgtgtttcgcagtcttacgaccgcgggtctctacctccgcttcgctgcgttcagcacctccctcacagagggaggtggtcgccgaaggcgaccggagggagagatcaacgaaggagaagccgagcccaacctcagaacaccagctgcaccagtagcatgtatacgatcatgccgccggcgattgaaagcagcatactgcgtttccagacgtgcagcagcacgatgacggtgcaggcgatgagttccggaaggccgtgtgaaccggtcagaatcggggtgttgcgcagtgcgtataccaccagcagaccggtcatcgcatagggcaggactcggccgaaatattcgatgacgcgcggcggctgcttggattcgggaaataccaggaacggcagaaaacgggtgcacatcgtccccagcgccaccgtcacgatggtgagcgcgccttgccagatggtcatcgtcatcgcgtctgtccttccttctgctggtccgctgcgtggctcatggcacggtctgccgtggcttccggggcgtcggcggccggccgcaacacatccagatgcgggcgcaacgcgacgaacagtatcagcatggcgatcattgagggaatcatgaaatcattggccccgaatatcagcaggcaggccagcgacgtcagcacaccgatgacggcggacagtcgctcgcgatgcttgccggcgagccactgatcgaggaagatcaccagaaacagcgcggtcagtacgaaatcaagaccgtcggtattgaacggcagatgcgcgccaatcagcccgcccagtgtggcgccggtcacccaatacagctggttgcacagcgtgacccagaagtagaaccagcttcggtcgataccggcggggattttcgcggtggagttgatggcaaaggtctcgtcgcacatgccgaaaatcaggtacggacgcttccagccgagccccttgaatttgccgagcatggatagtccataaaacaggtgacgggcgttgaccatcagggccagcagaaagccggcgagtgggttgaacgcggagagcagcagattcaccgtgacgaattccatcgaaccggcgaagatgaacgcgctcatgcacatcggccatacaaacgagaagcccttggtgcccatgagaatgccgtatgaggcgccgagaaacaggaatcccaggcaaatcggtatggtcagcggaaacgccgctttgagcgccggcaaccaggcgttggtgttggcggtgtctgccatgtggatgatgttctccttgtgcaactggtctgccggccgatattcgccgataatgccatatgtggttatacacgcatggtgccgataaacgaggtgaggacggtgtcgggactctgtgcgcgaagtcacagtgtggatgatgtcacatcgtctacggtgggacagtccttgtggcgggcgtgaacacgtgctgagatgaaagcatgagcacatatcaaggtaacgaaccatcgcaaatcgtctacaccgctacggcgcaggttacgggcggccgcaacggccacgccgtgagccatgagccggaactggagttcgacctggacacgccggtcgccatgggcggcaagggtcagggcacgaaccccgagcagctgttcgccatcggctggggcgcctgcttccaaggagcgttggcgcttgccgccaaggagcagcgcgtggcggccaccaagctggccaagagtcaggtgcgcgccagcatctcgctcggtcctgaaggcgagtccttcggcctgaagggcaagattgaggtagttctgcccgatcttgacgatgaggctgccgccaagctcgtcgagcgtacgcaggagctgtgcccctactccaaggccaccgcgggcaacgtgcccaccgaggtcgttgtggtgaaatcgctggactgaagccttccgggttgaaacccgagtccaagcattcggcccgtttccttcagggaagtgggccgaatgctttcaggcctggtcccgcgaatacgaaaagacctcggtcgctatgaccgaggtcttcaatgaagtacccccagagagggggcaacaacatcaccgctcatgcgccctacctcctctccggaagtggtgcatgattcaacttcaattctggatgccactatagcatagggttgcaccgtcgcaaacaccctagcttgggcggtatttcaaggttcctaggcttggctttatcgtagccgaagtaa

SEQ ID NO: 35 - DNA, 64684 bp, Unknown
  R30_18m  MAG No. k141_11275
acatgcggcgggtattcgcgggttagaatatcaactttcatcggactgcctctccttcgtgcgtcagaaagaaactcaagcacttcttactttagggcaccgcatacaagaaaacgcacaacttccgtcgtgcgttttgcttttcaagccggatttaccgggcaaaagatcagactgccgtgccgttctgatccaaattcggattgtgcttggaatcgccagccgtaaagaacaggctcagtacacccacaatgaacaccgaggagacggtgatgatcagccacatcggatggcttggcagccacataaccacgaagaacgcgataatcgcgatggcgatcagcgtccagctgcccacacggaaccactgacgcagcgaatgcggtgccttgaacatcttcggattcgtgtagttcgggttagtggtcagcagggtttcggtgtccgcaatcgtaccgccgctgggcttccattcggtgccgtcggtgccgtcctgcagacgctgggacttctgctgcagctggtattcgtcaatcattcccgaacggccacggccacgggtctggtcatactgcgacggcactcccctgcggcctgctttggcttgggcacggcgttctgcacgattcggcatttcactactcctgtttcgacggtgacactgttggctatattacccgcttatcggcggcaatttgccaccagtccatcggaacccactgtgtgtcattgttttttcagtcagtgatgcggtcaatcggtgatgcgataggtttgcgtatggaagtcgcaagtgaccgcagtgccgtccgcgaataccgaacgctgcaccagcggatcatcatccacgaactcgtgacgaaccagttcctgcatgccgacccgctcatggaatgcagcgaccgcatggcagcgttcgatgtcgttttccgtgcgagcgcgctgttcgtcgtccatgtcgccgtcaacgccgatgtatgcggcatcgcgaatcaggtatggagctccgccgttgagcaaggcgtacagcatgtaatcgtcgccgtccaccacacgctccatcatccacggctcgataacgcaatcatggtagacgaggttatacagcggcaccggtacaccttggcgcggctcgttgggtgagcgcatctggaagtcgtatggcgcgtaatggcagaatatcaggcttggcactgcccagtccgatacctcttcggacgaggagaggatgccgtgcgagagcagatattcgaagcattcggcgcggcggtcaaagcattcgcggcgggtcatgcggtgttcggggttcgagcattcgtcgccttcgttgcaggtgaaaacatccaagtatgcacagtcgagcttgatgccgtgtgcggcgatttcggcgaaattgcggcgcacgtagtccggtgcgagctcggcgcacaggtaggtctggtggccgcccgcccagcgtgcgtgttcgggcatcgtaccgtctgccagccgaatcgcattgttggcatcaaaggtttgcgcggtgaagtagtaatcgcggtactggtcatgcgtgccgaaaatatcgccttgctcatggcaggcgtcgaccagcgacttcatgccttcccagccgcctgcctcctgacaagccggcagatagtcggggtgtgcgttgtcgtatccgggctgtgcccaaccatccaagtgcatgtacagtcggcctgcacccatgctgtgcaatgttcgcatttgcttttcgcgctgcgcaaaggtgaccaatgaatcgtttttctcggggtggtccttatcgtagtagtacgagtcgggctgtactttggttttgatgccgatgtgcacccatgaacgaccaatcaggtcacgcacggagggattgcgcgccgccttttcggcgagcgtacgcaggcgacctcgttcgttgacgtacgaacgataggccttgcacaccgccgtgtgatcggcgtggtcgaggaactggtagcgtaccacgcggcgataattcattgtgccgaggcttggctcaaaccaagtattgatatgggtgtacgggccatcgctgggatggtcgatgccgtaaccggcattccatggagtttcgcagatggcgatatacccgtgtccgtctgcgcggagctgcgcgaaccacggcatgtaaccgccagccgtttcgaagcgaccgtcgaaggcgatgtctttggtgctcacggcggtaggccatgtgttggggatcatcacaccttgctcatgggtgatgagcgtcgtgtcatggtcgtcggcgcaatcgaagtccatggctgcgggccacgtcacattggtgatgttcaggccttgctcattgagcggaatccattcgaagagcacatcgcctgaggcacgctccacccatacataggtttcaaaggagtatgcgctgtgcccaaagccggtgaagatgctgcgaatgccggttcccgtgccggtttcacgctgctcatgggtgatggaagtggcatccgcgaacgcgaaggtgccttgcgcgcattgcagggtcggcttgaaatcagcgcaggtattccattcggcaccgtcgcgcgtaaaagcgaactgcattgttcgttcatcgaatcgcacggtagtgccggatacggtgaattccatagttaatgtgctcctgtatgttctcgattgctcccgcttacgggagctcgctcatataacaagattaggggtggtctgctgtttgagaccacccccagtcggctttgccgacagcccccgccagcggggggggctagcgctgtctgtttattacttactgcttactgcttcttggtcagtgcggtgaacactgggccgccgccgtagtcgaatgcgacgccggagactgcggaggtgctggctgcggtggcattctggttccacaacgggatagccggaaggtcctgcagcagaatctcctcaccttgctgataatacttgtcggcttcctcggtggacggggcggaaagagccttgtccatcatggcatcgaactcggggttcttgtagttgccgctgttgccgcccttgccgtcggccgaactggaatcgtacagctgtaccagatagttgtccgcggatggataatcagggccccaaccgctgcggtatgcggaggtcatcttgcctgaatccacattggacaggaattcgtcggaagtggacatcgggatgctcttggcatcgatatccagcgtgttcttgatgtagttgcagattgcctcaacccagttcttcgcagtgccatcagcattgtatgcaatgccgaactcaccgctccacggggagatggcgttggccttggcccacagttccttggccttggacgggttgtacttcagtacttcatttcccttgagttccttggagtaggcgctgattggggctgcaaggaagtcgacggcgggcgtggcagcgccgtggaagatcttctcggcgacggtcttgcggtcgatggacatggaaatggcctgacgacgcaggttgccttcctcgttctggccgaagtgttccagccattcaggaatggtgaaggtgagcgtattgccaccgggctcgttgtatgccttcagcgacttgtcggattggaaggaggtaagtgcggtgtcaggaatcgtgttcgtgaagtccaggttgccaccgcgtaggtcggcgtatgccgaatcaggcgaggtatagatcttgaagttcaggccatcgttcttggcgacacgattgcccttgtagtcagggttcttcaccatttcgatgctgtggttgtgctgccaggacacgaacttgtatgggccgttgctcactgggtgctgaccgaacttcttcgggtccttgaacgcggattcgggcaacggcatgtaggcgtggctgccggccttgaccgggaatgccgagtcgggctggctgagcttgacatcgatggtattgtcgtcaacaacggtcaggccgctcagcgtggccttggggtccacgtccggcttttgcagatcatcatagccttcgattgtgctgaagaagctggcgctggcctgcttgttggcactgttggcggtgtaattccatgcgtttacgaaggagtgcgcggtcaccggagtgccgtcggtgaacttccatccgctcttgagcttgatgacgtaatgcgtggcgttgtcgctggaggtgatgctgtctgctacctcgttgtggatgccgcccttcgcatcgtaggtcaccagacctgcgaacagctggtctacaaccttgccgccaccggcctcagtggtgttgccggggaatagtgggtgtgccggctcactgccgtacacggaaatgatattggaatctgaagcattgctggaattggaggtaccggtcgatccgcagccgctgagcagcatgacgattgccgcaccggccgcgaccagtgaagtgacatgacgtgtgttcatgaatctctcccaaatattctggcgtcgtctttttggcgacgaaagacaccataggagcttcatgttaaccatgtatgcaatattctcgaaatataaacattactgaagactcaaggcagtaattaatcccagaaacgcaaaaatcccctcatgaagaagggattttcatgtttctgtttggaacagtattcagcgaggcagcatcatcggacgctggctggccttgatcggggccggcagctcgctcttttccttggagaggtactcgtccacggctgcggcgcaggagcggccttcggcgatggcccagaccacgaggctctggccacggccggcatcgccgcacacgaacacgccatcctgggaggtggcgaacttgtcattgcgagcgatgttgccacgcttgtcgagttcgacgggcagctggtcgaggatggtctcggtgtccggatgcaggaagcccacggagatgaggaccagatcggcgggcagcacgcgctcggtgccaggctggcgagtgaacggaccattttcgccgggagccacggagacgaccttcaagccggtgacatgaccacgctcatcggccacgaagccttcggcggtggtcgagttgtcgatggtgaccttggccttctcctcttcggtgccctcgaagttcacggagtcggtggagtagatgtactcgccgccctcttccatggaggaggtcttctggtaggtgcgggcgaaggtcggccacgggctgttgtccggacggcttgacggctctttcggcatgatctgtagcacggtgacgtccttcgcaccctgacggatcgaggtgccgaggcagtcggaaccggtgtcgccaccgccgatgacgatgacgtgcttgtccttggcggtgatgtcgtgcaccggcttgacgccgaagatacggcgcgtggcgtcgggcaggaagtcgagggcgaagtggatgccgtcgagctcgcggcccggaatcttcatatcgcgcggcacgcgggagccgatggccactacgacggcgtcgtaacggtcacgcaggtcatcccacgtgatgtccttgccgatttccacgttggtgcggaagcgggtgccttcggcctccatctgcttgacacggcggtcaagcagacccttctcaagcttgaagttcgggatgccgtaacgcatcagaccaccgatggcgtcgtccttctcgtagacgacgacggtgtggccggcgcgggtgagctgctgtgcggcggcgaggccggcagggccggagccgacgacggcgaccgtctggtcggtcagacgctgcggcggcagcggcttgacgtagtccaaatcccatgcctggtcaatgatggtctgctcgtcaagcttgatcatggtcggcggctggtggatgccgagcacgcaggcctgctcgcacagggccgggcagatgcggccggtgacttcggggaagttgttggtcatggacagacggttgtaggcgtcttcccacttgccctgacggaccaagtcgttccactcgggaatcaggttacccagcgggcatccggtcatgcagaacggggtgccacaatccatgcagcgggccgcctgcgtttgggtccacggttgcaggccggtttcggcgtgaacgtcgaaccagtccttgatacgctcctcaacggggcgttcagccaactctcggcgggtacggaccttcaggaatcctctcgggtcgcccatgtcagcgcgctccttccataacctgctcgtacaccttttcccaggcgccgggcgcattgaaatctacattgttggccttggcttcttccatggccttcgtcatggccacgaactgcttcggcactacgtgcgtgaaccgcttgacggtttcgttccagtcctccagcagggccgcggcgaactgagaaccggtctcttcggcatgctgcttgaccagtgcgtacaccagcttggaggtttcggcatcaagcgacttgaagagcagtgcaccggacttgatggcacccgggttgaccttcttcatatcaaggtcaagcacataagtgttaccgccggagaagcctgcaccgaagttgcgtccggtggggccgagcaccacaacagtgccgccggtcatgtactcgcagccgtggtcgcccacgccttcgaccacgaacgtggcaccgccgttacgaacgccgaaacgttcgccggcgcgaccggctacgaacatctggccggaagtggcgccgaaaccggtgacattgccggcgatgacgttgctgtgcttgtcgaaggtgacggtgtcttccgggcgcacgatcatgcgaccgccggacaggcccttgccggcgtagtcgttgacttcaccgtagatgcgcatggtctcgccgcgcgggatgaacgcaccgatggactggcctccggaaccgtgcagggtcatgtcgatggtgtcgtccggcagaccttcctcgccgtaacggcgggtgatctcgtagccgaccatggtgccgaccgtacggttgacgttgcgaatcggcatttcgatgcgcacgggttccttgtgttcgagggccggctgggcaagttcgatgagcttgttgtccagtgccttctccagctcgtggttctgctcgatggtctggtgcaggatcgtgccgggtaccgggccggcctgcttgagcacgttggtcaggtcgatgccgccggacttccagcgcttgatggcctcgtcctgatccaaacactcaacgtggccgatggcctcctcaagagtcctgaagccgagctgggcgaggatctcgcgcacctcctcagcgatgaacatgaagaagttgaccacgtactcgggcttgcccttaaagcgggcgcgcagctcaggatcctgggtggcaatgccctgcgggcaggtgttcttctggcaggcgcgcatcatgacgcagccttccacgatcagggccgcagtagcgaagccgaattcctcggcaccaagcagggcggcgatgaccacgtcacgaccggtcttgagctcgccatcgcactgtacgacgatgcgggagcgcaggccgttcaggatcagcgtctgctgggtttcggacaggccgatctcccacggggtgccggcgtgcttgatggcgttgagcggggctgcacccgtaccgccgtcatagccggagataagcaccacgtcggcatggcacttggccacaccggccgcgatggtgccgacgccgaactcggaaacgagcttgacgtggatacgtgccttcgggttggccatcttcgcatcgttgatcagctgcttcagatcctcgatggagtagatgtcgtggtgcggcggcggggagataagctccacgcccggggtggcgtgacggaccttggcgatccacggcgggaccttggcaccgggcaggtggccaccctcaccgggcttggcgccctgggcgagcttgatctgcaggtcggtggcgtgcacgaggtaatcggaggtcacgccgaagcgagcggacgcgatctgcttgatgcggctgtagcgctgcgggtcgttgatacgatcgtcggattcgccgccctcaccggagttggagcgtgcgccaatcgaattcatggcgatggcaagcgtctcgtgcgcttcctgtgagatggaaccgtagctcatggcaccggtggagaagcgcttgacaatctcggaggccggctcgacttcggagatgtcgattggcttgcggttgttgttgaacttcatcaggccacgcagggtcatgagtcggttcgacgtgtcgttgatgtggtgcgaatacttcttgaacatctggtagtcgccacggtgggtcgactgctggagcaggaagatggcctcgggatcgttgaggtggtcctcgccggtacgacgccacttgtagtcgccgcccgtgcgcaggttgcggtgcggggatgcgctccactggttcgggtaggccacgcggtgacggatggccacttcttcggcgatctcgtcaaggcccacgccacccacacgggaggtggtgccggtgaagtattcgtcgatgacttcctggctcaggcccacagcctcgaacagctgtgcgccacggtagctcatgatggtggagacgcccatcttggacatgatcttgagcacgccggtggacagggccttggtgaggttcttcacggcggtgtccgcgtcgaccttgaggtagccgttacgggccaaatcctcaacggattcgaaggccaggtacgggttcacgcaggcggcaccataagcgatcagcagtgcgacgtggtgaatctcgcgcacgtcgccggcctcgacggccatggagatctgcgtacgggtgtggcggcgcagcaggtggtgctgcacggcggaggtcagcagcagggacggaatcgggccccacgtgtggttggattcacggtcggagagcacgatgaagttcttgccgtcggcgatggcctcgtcgatttcggcaaagatctcgtcgagtcgctcttcgagggccttgccgccgccggcgacctggtagaggcccttgaccacgtacgggcgatagtagccgccgaggatgcgggccttgtcaaggcgcttgagctgggccatctcatcagagttgaccacgggcagcgggatgaggatcttcttggcgtgcagctcggaatcggccagtaagttaggctcggggccgatggcggattcgagcgaggtgacgatctcctcacgctcccagtccagcggcgggttggtgacctgcgcgaacttctgggtgaagtagtcgaacagcatgcggctgcggctggagagtgcgggcataggcgcatcgttacccatggatcccagcggttccttaccggtgttggccatcggagtgagcaacagcttcagatcctcttcggtgtagccgaaggcgcgctgacggcgctggacggactgtccggagtggctcacgtgctcgcggcggggcagatcgctcatctcgaccgagttgccttccacccacttgcggtacgggtgctgggaggcgagggtcttcttgatctcttcatcggggatgatgcggccttcggcggtgtcgacaaggaacatcttgccgggctcaagacggcccttggacacgatgtgctcctgcgcgatctccggcagaacgccggcctcggaggccagcacgatgtagccgtcgtcggtgagctgccagcggccggggcggaagccgttgcggtcgagcagggcgccgacctgggtgccgtcggtgaagacgatgtcggccgggccatcccacggctcgataagcgtgttgttgtactcgtagaaggcgcgcacgtccggatcgagatccgggttcttctcccaagccggcggcagcatcatgcagatggcgtgcggcagggaacggccggcgaggtgcagcagttcgaggcactcgtcgaaggtgccagaatcggagtagcccggagtggtgatgggcagcagcggctcgaactcgccgagcagttcgctgctcagacgaccttcacgggcggagagccagttgcggttgccctgaatggtgttgatctcgccattgtgggccagcagacggaacggctgggccagcggccagctcgggaaggtgttggtggagaagcgggagtggacgatggcgatggtggccttcatgcgctcgtcgttcagatcctcgaagaagtgggtgagctgcatggtggtgagcatgcccttgtacgtgatggtacgggcggacagggaagcgaagtagacgcctacctcatgctcgacgcgcttgcggatgcggaaggtcttgcgatccaagtccacgccggccagagcaccgtccggagaggcgaccacgagagtcttgaatcccggcatggcggcaagggcctgcaggccgaggccgtccgggttggtgggcaccacgcgccatgcgagaacttcaaggccctcctcgcgcacgatcttggcaatggcctgttcctgctgaccggaggtttcgatgtcgcggtcgaggaaggcgatgcctgcggcgtagtggccggcttcgggcagttcggcgggcacggtggcacgcatgaactcatccggcatgctcatcagaatgccggcgccgtcacctgtgttctcctcggcacccacggcaccgcggtggtcgagattgaccagtacctcaatggcgtcagtgacgattttgcgttcaggacgcttgttcaaagtggtgaccatacccacaccacaggcgtcatgctcgttggcgggatcatacataccgtccggagcgtggaccgtgagatcgagcggggctttgaatgtcaccggaatcacctcaattgcttgtgggcacgtaagggaatcgtgcctcttcgttcattgctgttgacacagtaccgttgctccatgtcattttcgtttcacgtgtccatataccgagtcgccataaaagtcaatagtgattctcaagcaattgtttttatggccagttatgggggtatttcgaactttttcgcccaaaatgtctatttgaccacacgaaaatacgatacggaaacgtccgtatcgtgaaatgctgcgttgggtgatgttacggattggcggctgtggaccaccctcagtcatgcttcgcatgacagctctcgccagcgggagcgataaatgcgaactgccagtcaacggtaaggttgactggcagttcgcatttatacaaggcgcaatagtctataagcgtttgttgccccgcctggagggtttctcgcctcttgatgctggtgccggactggccggtgaccggagcgatgccggcgtgggcggccaggtgggccgcgcttttgaagttggcgatgtcgccgccgatgccgagcaggatgctgcttgcggtcctgacgcctgtcccgggcgattgtggcatcctgtgcatgtctgacaccatagcgatcggcgcgctccgcgaactcaccgaacatggcatccgcgtgcccgacgacgtacggctcatgggattcgacggcatccccttctccgactgcgccaacccacccattagcactgtggcgatagacgtccccgcaatggctcgtacggttatcgatcgcatggtgacgctgatcgagtcgaacctacggcatgaacggcccgatgacatcacccatgaccatatccagttccaggtgatgccacgcacgtcgactctggccgcctgataccggccggcacccttatgagtgccggccttcatccctgaaaatatgggtctatgccacgtacagcgcggcgggatacgtgagatatgaaatttcatcgagctgatcgaccgtcacatatccggctggcgcgttgagcacgtccggaatgcggttgacgattgtggcgcacgtatgttcgacggtcgccggcttgaccacgtggaactccacgtccggttcaccctcgatcttccaatcgcacatatcgccattatccggcccgtacaccttgccgatacaggcagtttccaacgtgatgccctgattcgtttcggtggttaccacggcggacatgccgatgcatttgccgaccggaatcgtctcgtccatcgtctcggaatacacgtcgacatcgctgaaatacggcacactggcctgggtctgcgatgcgatggtaagcccaagcttctgggccagcgcttcattggaattccatacatacgagggcaccacggtttcgggatgcgcaagctcggcctcgaactcctcggcggtcagaccgcagccgtgcgctttggccaaagccaggccgtaatcctcgacgttgtagctcaccgcaccggtgatcttcttgatgctgtggcatccggcggcgacggtggagaccatgttcacccagtagatgtcctgcatgccggagccgaccatggtggcaccggcttccttggcgatgatgtcgagacggttcgtggtggccggatcggtggtccacgggtagatgcattcctcgcaggtggtgatcacgctgatgccgcgggccaagcactgctcgcacatggtggcgatttcgttctcgaagctgaatagcgtgactaccgcgatatccgcgtcgcactcgttgagtacagcctcggcatcggcgcgaatcggcacattgatggggccgatgcctgcaaacacaccggcatccatgcccacgacttccggattcacgtcgatggcaccgacgatttgaatgcctttctcgtgcatatagcgaatcgtgtacttcgccattttgccgcagccgtattgaatggctttgattggttgcataccgcatactcctttgcaacagtgcatattggccattggagaagtctcaccgtcgaggccaagccaatagccttaactctaccaacatcaggctgggcattcactgatatcggcggcactggagcgtcgggaagagtcggcgtagcggtaccgctaccgagcagaaggactgggccagtacaggtcctcccgccgaatcacggcatctcggcatccgtcagttcctgttccgccgtatgggagaggccgatgactatcgtaaaaaacacggcatatcagcaacttataactacccttcctgtatccttaatgtacaagccccgtgttgaccgccgtttttcatgtcaccggggcattgcaatacgaggtaagggggcctcgtgattcatgcgttacaatcatccgttattaccaatccgcagtggattgaggagtggctttccgccccgcgattccgtacataccttgacgcttgccaccaagatgcgcttacagccttactttatacgagtggaatgttgaccttggtcaaatcctcgtgaaggatgtcgcctttttcgagatcgctctccgaaatgcttatgataggaacctcgctaaccattggcagaagggtcagcattggctgtttgaccaacaatcaccggtgaatcggcccattccacgccgaacgagctccggcaaacctttcgacgcgaatgctctcagcggccgcgccaacgcctgtcgaacgattcctagccaaaactccatgcccagccattgcgcggtagcatggtgccactcgacttaccatctacttccggttacgcagggcgtggagcatggcgacgaacacgataacgataacgataacgatgaccacagccatgatcgcgtagtcaatctatgcgccggtcacggtggcggcggcatagccggcggaacccaccttgcccgagccggactggaacacggagatcacggtagcccaccacagtggtgccggccgcacccgtgaactgctgcagcgtggagaacatcgcgttgccgccaggaagatgctgcgctggcggaagcgacggcgcagccatgcgctgagcggcacagtaatcgacacgaccagcagatagccggtggtgagccattggatggtggcctcgctgatgtggagcacgcccatcagctgcgggaacagcacattcatcacggtttcggtcaggatgccgaagaatgcgagtgagccgacggccacgatcgcgcagatgagtttgccggggatgcgttcgtcgcgggccgattgcatcgcggcgtctgccgctgagatagtgcccgaggtctggggctgagtcttcagagttaccgattgttcaaaagtcacactgtaacaataacactacggaaagcgattaccataaagcgtgctcacagtcgcccatcatacggacttttcgaaaactgttgataaatagccattttccgcaaggaatccttgcagaacactatgattcagaacatctattagtatgatgtaaatcacattatgaactatttaaggtaagcgcttacagttcggcatgggagactcctcgtcacgatatgaatgcgctacagtcactatcgattgatacgcacgccccatcgactacgcgatttcgccgtcgccgtacgcgcgttcggaggcacgcagacacggcttgccttgcaccacttcgacctgcgagggcggcgcgtcatcgccggcacgcttggcctgaatctgttcgaacagcatccggaaggaccgctcccccatgtccaggaagttctgggtgtaactggtcagcgccggattccacatggcaccgaagttgcggtcgtcaaagcctacgacgctcacgtcagcaggcacgcggcgaccaacctcccttagacctcggatcacagcgatggcggtctcgtcgttgccggcgaaaatcgcagtcacatcaccacgacggcccaaggtgcgcccagccttgaccgactcctccaaatcatcgtcgggcacgatgattgggtcaggtaccgtgacgccgcgctccttgagcgcgtcacgccacccattggtgcgggtgttatcggtcggtccttccgggcgccccacatggaacacggtgcgatggccgagatccagcagatgcatggtcatccaacggccaccatccctttcggcgttgatgatctggtattcgccgtcgccgaagctgccacccaccacgaccatcggcatatctttgggaatgtattccagtgcggcgatgccggcccggtcgtactcgtagacgatcacgcccgccggcctgatcgacaaacccatgcgcacacgagccttgacggagtccatgtcggactcatccaaagaaacgatattgagcaggaaccgacgtttacgggcggcggcctcgaccccatggttcgtttcggacgtggagaaggcggaaggattggccgcgaacaccaccacggagtccatctcccggttcgacagggcgcgcgccacaatgctcggctcatagcccagctccttgatggccttggcgatgcgttcacgcttgtcttcggtgacattgacggtgccgttgagataccgggagacggtcggtgccgagactccggccagtctggccacgtccttgatcaccggtcgggtgcggcccgcacttctcgccatccttgtctcccctgttgttgtcagttgttgttattgcgtacgtcaaggagaaccggcatcaccatggcagtcatccagtcacacccatatccgttcagccgcgctccgacttcggttccccgtttttcgccgcgattcattgtagttcatgacggggaacctatatccaaatcaataacttcgcgaaaaccgtacgctgagttgcggtgagtgtacggtttccgcgaaatcatccctaatttcgtgaagaacgtacactgaatcgtcgtcaacgtacggttttcacgaaatggggcctcatctcgtgaagaacgtacactgagtcattctgagcgtacggttttcacgaaatggcagctgatttcgtgaagaacatacgctgaagatgccctcggtgtcactgatgactgttctcggtatggaaggcggcgcagcaaggtgtcctaggctaatatcgcctccgacaagaccgtcggcaaagccgtcgacgtcgattcaagttatccacaccaacaattcgcgtgacatagtattcacatttgccggttgagcttgtgcaacaatcaaaatcacccttagcgtcgagatatgaaagaacacaaggaagtttctgcactgctgcagcaggcgaagcaggagcgtcgctgctgctatggcaccagtgatgcgcaacggcgcgccctgaaacgtcgcctgcatgccggggagctggtgtcaccgtataagaacctgtacgccgaccgaatactttggaacaccatgaccagagagcaacagtcattgcaggtcatacgtgcgctgtccgcaatccaccctcagtgggtatttgcggggttgagtgcggcgtgcgtatacggactgcagcacaactattccctgcacgacggcacagtgcacatcgcctcgaagtccggcatcggcggcggagacgaggcgcgtctcaaccgcatctatatcaatcggattccgacgcggaagcataatggcattctcttgacgactccggcgcgaacgctgctcgactgcgcggcattcccattcccacaggcgctgcccatatacgattcggctctgagaaagtccctgacgaccatcgaagaggtgcagtcgctgatgattcaaagcgtctgcgacgaggtctccgtgaccaagctgctgaagtacgcggatcccctgagcgaaaacggcggcgaatcattgatgcgtggccagatcaccgaattgtctttcggcattcccctgctgcaggtgcagttcatgaatcccgacaatcccgcaatgccatatcgcgtcgatttctgttggaagctcgcagacggccgcatcatcgtggcagaatacgacggcatggccaaatacgccgacaccagcaacaagaatcgcgcaagcctccaggcgaaaatggagtacgaccgcagacgtgatcggcatctccgggaacagggcgtcaccgaaatcgtccatgtgttctatgaggatctgctacgccccatcaatcttgagaccaagctgctcaaggccggtgtgcccaaaatccggtgaagataggccccatttcgtgaaaaccgtacgcccagaacgactcagtgtacgttcttcacgagatgagaccccatttcgtgaagaccgtacgcttacgacgactcagcgtacgatttccgcgacatgaggccatttcgtgaaaaccatgcgcccagaacaagaccgtcagaaagtcgactagacagcctcttaactaccgaacggtatctatagaacggcgatattccgccagaaacgccgagagcggaatagtccccttgcgtttgtcatcggactgcgttattctgaaaccggtttcagaaagaaaccgataaacaaaactcaaagccacaaggttttgaccaacgaaaggaaacatgatgtctctcaaggattccatgattcgcggtctggctatgtacggtgccacttccctggcccagtccggtcacgccaactcccagatgattctcgacatcatcaacgacaccgataagaacgctcgctgagcctcttccctgactcgccgctcacacacggcccgtctcataacgtaaacaacaacacatcgcaaagcccacggctttgtaagtcaagacaaggaacacattatgtcattcatggattctatgattcgcggtttcaccctctccggtatggacgccatcgcccgcgccggctacgccgactccaagatgttcgccgacatcatcaacgccgccaacaaggacgctcgctgaatctagcgaacgatcccattcatgagattgcacgacacatacgaaggcaatcccccgcaggccgcaatcggccggcacaccacaataattgaataacgcaataattcaacacagtaataactgaacaataaccgggacaacggggtccatatattctttcttttcccatcgtgtgtacgccgtgccagcacaggttcacatacgatgcacacggccaccaatacacgatgcgtcatcatcaacgccctcaccgcatcatgagatactcccccgcccgttgtccacactgttgcctctgcaatgcctgtgatgcacgccgaacggcatcccgcgcagtgactgaagaacgaaaacaccaagggacggaaatggataacgaacccttcgaaaaggcgccgattccgaaggcgtatttctcgctggcgatgcccgtggtgctcagcatgctggtcaccttggtgtacagcatggtgcgcatatcttcctttccgaattgtgtggctccctctgacgagggagctgtcagcgcagctgactgagggagagaagcagacgaatgactgtatcggctgaaagccgatgccattttttgcggctgcgccacaagtctccccttcagtcacggctttgccgcggcagctcgtcccgcaattatggagccttcggctgggttgactgtcgtcaagccctcgcctggaaacgcctccggcgtttccttcacggctcggcccatcagagggagcttgtgaagctgcttcagttgtagggttcgtacgacttgttcggtggtgcgggtcacgttggcggccgcgtcggccagcagttcgctgaggctggcggcaccgggggcgatgccgaataccgcgtcgatgccgacctcatgcagttcgtcgatgcccgtgccgatgtgtccggcgacggcgatcacgggcttgccgtggcgcttggcggtttcggccacgccggccggggttttgccgaacttggtctggaagtcgatggagccttcgccggtgaacaccacgtcagcccattgcgcggccgcatcaagtccggattgttcgatgacgatggcgatgcccggacggaatttggcgtcaaggaagcctttcagcgcggcgccgataccgccggcggcgcccgcgcccggcacgtcgttcacagcgacgccgagccggctttcgatgacctgcgcgaagtgcgccaacgcggcgtccagtgtggcgacgtcggcctgggaggcacctttctgcggtccgaacacggcgctggcgccggtgggaccggtcagcgggttggtcacgtcgcaggcggcggtgatggagacgttcttgagagccgggtccatcgtgctgatgtcgatggtggccagatcagcgagggccgctcccccgtgcttaaggtcgttgccgttcccgtccagaagacgaacgccgagggcctgcagaagtccggcaccggcgtcgttggtggcgctgccgccgagcccgacgatgatgcgcttggctccggaacggacggcggcgagtatgagttcgccggtgccgtaggaggaggcaatcaacgggttgcgttttttggcttcaagcagtgcgaggccgctggcttcggctgtctcgaccacggcggtcgtgccgtcggcgagcaggccgaagtggccttcgacaggtcggccgagcgggtcgtggaccggcacggcgtgcatcgatccgccagtggcgtcgacaagcgcacgtgcggtgccttcaccgccgtcggccatggggaggcaacggacctcggcatcgtggtcggcattctcaatcccctgagccatcgcccgggccgcctccatggcggtcaggctctctttgaaggagtcaggggcacataagtatcgcgtcatgcttcgagcataccgcacgatacgcggaacggtaatcgctttccgtaattcgcgtgattatttttgttcaaaattcaggctttccaatccacaatgctactattgcaagcaaaactgcggtatcattgcggtaagcgtttagacatgttttccgtttcagggaagaaaaggaccgattcgatcgtggccgtacagaacgataaggcgcaatcgccagcgacattgatggacgtcgccaaagaagcccaggtctccatcgccaccgcatcccgtgtgctcaacggcagcacccgcaaggtacgcaaccaatcgtatgtcaaggtgatggaagcagccaccaagctcaactatcgtcccaacgcctatgctcaggcagtggccaaaggcactgcaccgaacatcgtgctgctggtctccgatatctccgatccctacttcgcatccgtgtcgcaaggcgtggtcaaggcggcggccgaacgcggcatctccgtgaccatcggcgtggcagccaccccgcacgaggagttggaggcggtgcgtaagtccgtatccaccaggccgcgcggcatcatcatctccgaaagcgaatacaccgacgcgccggaacgccaggcgttgcagacggaactcatccagtacgaatcgtccggcggacatgccgtgttcgtactcaaccgcaacctgcccttcccggccgtggacgtggcgaacgacgtcggcgcgcgtgccatcgcaaagcttatcgtcgattccgggtatacgcgccctgcgattctcaagggcgatgacgcacaccgctcctccaaagaacgactggccggtgtgatggaagtgttggacgaggcaggcatcaccgtggacccgaaagccgtggcaaacggtaagttcagccgcaccgacggctatgcggccgtcatgcaaatggcccgatccggactgctgaagccgggcgaaggcgcactgtacgacggcaaaggcatcgattcaatcatcgcgctcaacgacgtgatggccatcggtgcgatgaccgcgttgcgcaccaacggcatcgagccgggtcaggaaatcggcgtcaccggtttcggcgacatcccctactccgccgacgtgttcccaccactgaccaccgtgcatctgccgctggccgaaatgggccaggcctccgtggacagcatcctgtccaaccgcgatgacgcggaggccaccggcggcactgccaaccgcctgatctacgtgcaaagcgccccggacgtagtcctacgcggttccctcccccgccggtaaaacaaaaaagctccctctgacggtgtaaccacaactagcgaacgggtaatggcgactgccgcgcaccataccaccgactcatacaccgacgtaatcgaagaactgttcgattaccgagtcattgagcaaccggccacgacgagtgggcaccactcgatgattatcggatacggtaatcaggccttcgctgatcatgggggcgagttggtcaaccgaaacggttcggagagtctggggcgtgctgctcatacctgcatcgttgatggcgcggttgatgcggtcgaggccaaggccctcgtgcaggcgcagcccgagcatgatgagctcttcgaggttttcctcgggagtgatcgtctcgctatcggcccacggcacacggttctcgttgatggccgtgccccacaaacgcgggtgcgcgatgtcccagctgcgcagaccgtgtgagacagaaaccacccccagtccggcatccgccggacagcccccgccagcgggggcatgaatttcttgggagttgttcccatgcgcgttgatcatacctagttcggcgttggtttctccaagttcggcgttggcctgtccatcagctgaggcagaggcaatggcttcggacttgcccccgctggcgggggctgtcagcgaagccgactgggggtggtcagcctcggtcaccgcgttgtagtgggagtgggcacctggccctagaccggcccaatcgacgttgcgccaatagccgaggttgtgctggctctcgtatccggggcgggcccagttggagacctcataccattcgaggccggcggcggcgaacaggtcgtcggcgatttcgtatttggctgcttcgtcatcgtcattgggtttgggcagagtgccggccgcgatttgacgacccattttcgtggtgggttccacggtcagtgcgtaggcggagatgtggttcacgccgaggtcgatggcggtcgtgaccgaggtgcgccaatcgtcaaggctctcccccggtgcgccgtaaatcagatccacgctggagcgcaggccggccttattggcggcattaacgcctgcggccacgttggccggcgtatgcgtgcggtcgagggttttgagcacgtgcggcacggcagattgcatgccgaaggaaacgcgggtgaagccgccggcagcgagctcattgatgtaatattcgttgaccgtgtccgggttggcttcggtggtgatttcggcgtcgggcgcgatgctccagatcttgcggatggcatcgagcatggcgaccagatcgcgggcggcgagaatcgtgggtgtaccacccccgaagaacacggtggagaccggtggctcctcgatgccgtggtcgagctgccactgcttggtcagggccatttcacgaatgaccatattggcatagttgccgcgcgaggcccccgcaccaagatccgtagccgtgtaggtgttgaagtcgcagtaaccgcagcgccgcaagcagaacgggacgtggatgtagacctcgaacactagccctcggtcttctgagcggcgcggatcttgtctttggtgtcgcggtcgttggagtcctcgccggtggacagggcggcgatgaacgcctcctgcggtacctccacatggccgagcatcttcatacgcttcttgccggccttctgcttttcgagcagcttacgcttacgggtgatgtcgccgccatagcacttggcgagcacgtccttgcgcaacgcacgaatgttctcacgcgcgatgatacgcgaaccgattgcggcctgaatcggaatctcaaactgttggcgaggaatcagaccacgcaatttcttggtcatcatcacaccgtacgaatacgccttatcgcggtgaacgatggcactgaacgcatcgaccttctcgccctgaataaggatgtccaccttgaccaaatcggcggactgctcgccatcctcatggtaatcgagggaagcgtagcccttggtgcgggacttgagctggtcgaagaagtcgaacacgatttcggccagtggaatgcggtagtgcatctcgacacgatcggtggagatgtactccatcgtgcccataatgccgcggtggtcctgacacagatccatcaccgcaccgataaattccttgggtgtgatgatgtcggcggcaaccatcggctcgacgatcttcttgatcttgccgtccgggaactcgctcgggttggtcacatgatgctgactgccatcctcggcggtcacgtcgtaggtgacgttcggagcggtctggataaggtcgaggccgaactcgcgggagagtcgctcgttgacgatctccatgtgcagcagacccaggaagccgcagcggaagccgaaacccaaggccacggaggtttccggcgtgtagatcagggcggcgtcgttgagcttgagcttgtcgagtgcatcacgcagttcggggaattgcgcgttgtcgatcgggaacaaaccggcgtagaccatcggcttggggtcgcggtagccgggcagcggctcggtggccggtcggacggccgaggtcagggtgtcacccaccttggactgactcacatctttcgcaccggtgatgatgtagccgacctcaccggcaccgagtgccttggtacgggtcatatcggggctgatcacaccgatctcgatgggatcgtgggtcatgccaatgcccatcatgtggaccttttcgcggtcgtgcagttcgccgtcctccatacggatgtaggtgacgatgccgcggtagggatcgtagacggagtcgaagatcagcgcgcgggcaggggcctcggggtcgccgtgcggggcgggcacgtccatgacaatctggtcgagcaggtcggccacgccttcgccggttttgccggagacgcgcagcacgtcgctcggctcgcagccgatcagacctgcgatctcctcggcatgcttgtccggctcggcggacggcaggtcgatcttgttgagcacgggaatgatggccagatcatggtcgatggccatgtacaggttagacagggtctgcgcctcgatgccctgggtagcgtcgacgagcagcaccgcgccttcgcaggcggccagtgcgcgggacacctcataggtgaagtccacgtggccgggggtgtcgatcataccgagcgtgtattcggtgccgtcaaaggtccatggcacgcgcacggcctgggatttgatggtgatgccgcgctcctgctcgatatccatacggtcgaggaagcgatcgcgcatctcgcgctcgggcacaatgccgcttaactgcaggatgcggtcggccacggtcgacttgccgtggtcgatgtgcgcgatgatacagaagttgcgaatcaccgactgatccgtggaacccggctgattgtgttggacgaccaacgcattcctcctcttggcatatactcaaacttcacctagtgtagccgagggactgtattcggcgtggcattgcgcgggtttttccggggctcatgctatcctctaccttttgtatgtccttataacacacatcgtttggagtaaacgtggcaaacattaagtcgcagaagaagcgcgtgctcaccaatgagaaggcgcaccttcgcaacgtggctgtgaagtccggcctgaagaccgccatccgcgccacccgcgaagccatcgccgccggtgacaaggctgccgccgaggccgcctacaaggttgccgcccagaagctcgacaaggctgctggcgctggcgtgatccacaagaaccaggccgccaaccgcaagtccggcctcgctgttgcgatcaacgctctgtgagcataagcctcttaaggttttagcaagtcccgcaagtcatctggcttgcgggactttttatatctccgttcaaagaggtacattggcggtcttgcgaaatgacatctccgttcagaaaggtaccgaatccgagaaagcccaagtataaacgccgtcattgcaacgcttatactcgacgtttcgtgcttcaggtacctctttgaaagcagttgtcattttgcagaaggccaaatgtacctctttgaaggcagttagccctgaggcggtcttgaatcatcctgaggcttgtcttcttcgtccttggtggtatcgccgggatcgacggtatcggcgtgcggatggatgaccgggcgcttgagatatcggctttcgctgggcaggtagacgcgatgacgctcgacggctccgggcaaggtgacgttgaagccgaccgagagcaggcgcagcgccaccacgatgatgacgatcagcacgtcgagcagcatttccgagcacatgtcgaaccaaccgtagtgcacaccacgccatacaagcacggtcagaatgcaaccgatgaacgagggcacggcatagaggtgtttgtctcgaataatcattggcacatcgccgatgaagatgtcacgaatgaggccgccggccagtgctgtgaacatgccaaggaatacggctgtcatgcctgaggaaccgtaggccagagcctttgcggtgccgctgactgcgaatagtccgaggcccagagcatcgatgacagtcatcgtccatttgagtttggtgatctccgggtgggccaccaccacgataatgccggaaaacagcgtggtgagcacatagcctttgtcggtgatgccgaccggcggcagggcaccgagcatcacgtcgcgcacaagaccgccgccgagtgcggtaagccatccgcacagcatgatggtgaagatgtcgtagcccttgcgaatggcggcaagtccgcccgacaatccccaacacaggattgctaaatactcgatgaccacaaaaacgatgttgttctccaacaccacctgcatgagccgctcccctctggtaccgcttcggttcgtctcagtccgtcttcgttttctgttcccgttcatccttattcggcgctacagcccgtcgtacccgagcctacaacaggccttgcctgacgcaattggactagagaacaaaccgaataaatgctattgccggttcgactccacactttttttcttacagcgtcgccagcgcgccaaactttgagcagccaccgacgttagtccttctcatttgtcggaggttggccaaagtttggcacggcaccgacgatcacgcgctccagtgtcgttgccgtgccaacttatgtacagctaacgacgctaagcccctttttaccgtcgtttgatcgccagaacctgacccgttaacgacgctaaggtgtctcagcgacgtcagcagtccaaaccttgaaccattactgacattgaacatcccccagcgtcgccagaagctcatgtcttgtctcaccaccgacgcaacgccgtcgctgcctctgccaccggcttcagtttcgagcaatgctcgaagcctgacggcaaacggtaggctgaaacatagtattccgtcatgtcactcatcttgctcataggtttgctcctgttctcatctggatgaaccataaccaacccccgcaacgtgcagaagacctaaatcatattatttgttgcgaaatgttgctaaatccatctgtacctctctagccaagaacatttccaatacgccaagaccccttggaattgttgctgttccaaggggtcctagtcagaaataaaatgcgttgtttcagcacaccttccacatccagttgtgcgggtcctcgacttcgccgagctggatgccgagcagctcgtcgcgaagttcgcaggtgagcttgccggagccgccgtcggcgacggtgacgtcgaacttctcggacttgaagcgaccgatcggggtgatgatggcggcggtaccgcaagcgaacacctcggtgacttcaccggacttgatgtcctcgagcagctggtcgagggcgatcatggtctcgaccacgtcgtggcccttgtcctgcagcagctgaatcagagagcgacgggtcacgcccggcagaatgttgccggtcagggacggggtctccacgtggccatccttgtgcacggccatcatgttcatgccaccgagctcttcaaggtaggtcttggtggcggcgtccacaaagcacacctgctcgcagccattctcaacacccttgtactcgccgagcagggaggcggcgtagttgccgccgcacttggcgaaaccagtgccgccagggccggtgcggaaccacttgtcttcaacccagatgctcaccggcttgacgccgcccgggaagtacgggccggacggagaggcgatcacgcagtagtcgacctcctgcggggcgcgcacgccgaggaacggctcggaagcgaacatgaacggacgcatgtacagcgtgtactcgcggcgggacggcacccagttggcgtcgcgcttgaccagcgcggccacggaaccgaggaagtcgtcaatcggcagctcaggcaggtacagacgcttggcggagttctggaaacgctcggcgttcgcatccgggcggaacagccaggtggagccgtcggcatgacggtaagccttgaggccctcgaagcactcctgtgcgtagtgcagcacggaagcacccgggtccatcttgagcggtgcgtacggttcgacgcggcggtcggaccagccttcgcccttggtccaagtcatgtgggtcatgttgtcggagaacacctggccgaaagccggcttgtcgatgagggactggcgcttctcatcggatgcggggttgtcgttcggcagtacggtgaacggttcggtgagcttgtcgagtgctgccggatcgtggtgcgtgttttcagtcatcactagctacttcttcttgactttggcggcccgaaagccaccatatggggtgtgtgctgtgcgcttgtggcgcgaactctgttgcatacttttgcacacccatgtgttactcgtgtggcagagttcacatggtgaaaaaacgaagaagcccacaccgttctcaacggctgcgggcttccacgtttcagttatgttctgaattgttcgctatcgaagcgaccgactcacttggcgtcggcagccggagcagcggcggcgtcagccggggcggcagcagcttccggagcggtggtggactcggtggcatcctccggcacctcgacggtgacgacggactcttccggatcctcgacgtccagctcgacgccctcaggcaggacgacatccttggcgaacaccttggtgccgtcggtcaggccttcgacgctgaccacgatcttctcgggcaggttggtgacgtcggcgcggaccttgagctcctgaatgtcgacgaacgccacggcagcacccttcggggtgccttccacgaacaccggcacctcgacgtcgatcttctcgccggccttgacctcgagaaagtcgatgtgctcgatgatgcgcttgaccgggttcttctgcacgtccttgacgacggccatcttggtgttgccgtcgaaggcgatggtgaacagggcgttggtgtgacgcagggccagggtggtctcgcgcatcggcaaggtcacgaaggcgggctcttcgccgccggcgtagatggtggccggaatcttgttggcaacgcgcagacgacgagcaacgcccttgccgaactcggaacgggcctcgccctcaagcttaatggtggtagccataatggatactccttgtatcttcgtttcgtactgtctcgctcagacgccacgacgcgccgaaagacaccctacaaggagtgaaatacgccgagtcgataacggaatctgtgtcatgtgtcagcatgcacacttccctcgccaaagcaacaattgtcaagtatacgccaaccccggactttgcgtaatgatgcttcgatgacactgcatataggccgtcccagctacgtcaacgtacggtttccgcgaaataatccctaactttgtgaagaacgtacgcttacccgttctcatcatacggttttcacgaaatcgttcgccatttcgtgaaaaacgtacgctcagcgacactcagtgtacggtctttcacgaaattggggatgatttcgataataacgtacgatggtgagtaccatatcgggaggttgatatgactcgttcggacgacgtcatcaatgaggatgaccatgacgtcatcgccgcacacactcgcgttgtcaggggtatggctgcggcacttgccgcgatagccgccacaggagccggcgtcacagccgcggccgccaacgtcatgttcatgttcgcgctggacaccaaggccaaacgttcgatgttcaacatgccgcacgaggagacgccgaaaggcatcgaattcgacatgtccgagcagcttgaggccggccggtggttcgaggaggccaagcaatcggtcacgctgcgcagccatgatggatggaaactccacggctggctgttggacccggattgttccgacccacagccgcatctatacgcgatctgctgccatggctataccggagagcccgcggaaatggccaaatgggcgcatcgctattcgcaactcggttttacggtcctgctacccgcgcagcgcgcccatgagttgagcgaagggcgttacgtgggtatgggattgctggaaagcgacgatctgttgggctgggtttcgctgatcaccgcagctgatccggatgcacgcattctgttgcatggcaattcgatgggcgccgccacggtgatgatggcggccggcgatgcgcgactcccccgcaacgtcgtcgccgcgatttccgattgcggatacagttccgtggtctcgcagtttacggataatgccgaggcgatgttccgtttgccgcactcgttggccgtgctgctggtcaaagtggccagtcatgtgtctaaacgcaaggctggataccggtttgaggacgcctcctgtgtgaaggcattacggcacgcgactattccgatgatgttcattcatggcggagcggatacttttgtcaacccgaagtatctggacatcaattacaacgcctgcgccagcatcgaccgcgagaagctgctgattcccggcgccgaccacacgatgagcgccagcaccgatccggaccactattggcgtcgcgttaacggctttgttaagcgggtgtttgggctgtagtagatatagaagcttggctcccctctgtgaggggagccaagaatggttacgcgagcagttccttgacggcggcgatgacggactgcagactcttcttcgcgtcaccgaacagcatctgggtgttgtcctcgaagtagagttcgttctggataccggcgtagcccatgccgcggccacgcttcatgaccacgacgttctgggacttgtcgacgtcgagaatcggcataccggaaaccggggtgccaggacggcgagcagccgggttggtcacatcgttggcgccgacgaccagagccacgttggcctgcgggaactgcgggttgatctcatcgagatccacgagctcctcgtagggcacgttggcctcggccagcagcacgttcatgtggccaggcatacggcctgcgaccgggtgaatggcgtaggagacttccacgccgtggcccttgagcagttcgccgaggtcggcgagctcgcgctgggcctgagcctgagccagaccgaagccgggcacgaagatgaccttctgcgcgtagacgagctgaacggccagatcgtccggcgtggtctccttcatggtgccttccggaccgtcgccagcagcggcggcgtcagcaccaccgccgaagccaccggccaagacggagagcagcggacggttcatggcctgagccatgaggatggacagggtcacacctgcggaaccgacgagtgcgccggccacgatcagggcaacgttgtcaatcgccagaccggacatagccacagccgtaccggtgcaggcgttgagcacggagatcaccacgggcatatcggcgccgccgattggaatcacgaagaccaagccgtagcacagggcgaacacggtggtcagaatcgaccacagcagacgctgttcgggctggacgcacagcatgaccagcgaggcgacggacagcacggcgaacagaatgttccatacgcccttgcccggcaggttcagcttcttgacccacttgatgccctgcagcttgccggcggcgatgagcgagccggtgaaggtcacagaaccaatgagaataccgagaccagcggtgatgagcaccacgatgtccggggtgccttccttggtcaggatgtcgttcagggccacgagtgcggcagcgccaccacccacggtgttgaacacggaaaccagctgcggcatgtcggtcatcttcaccttcttggcggagacgacaccggccacggcaccgatcaggatgccgacgaccagcaccaccacggcgacaatgttcacgaagcccttggcgaaaagcacgatgaacgccatgagcacggccacgaccatgccgaacgcggagatctggttacccttgcgggcggtcttcggagagttcatgaagtgcaggccgaccacgaacaggacggcagagaacaggtagacgaaccatgcgacgatgtcgatggcgccaacggttgcggaggtcattacttcgactcccccttcttctcgttcttgctggacttgaacatctcaagcatgcggtcggtgaccacgtagccaccaacgacgttcatggtgcccagcacggcggcaaggaagatgaacacgtaggccagtgggctattggcttcggctgccacgatcacaacgccgacgatgacgatgccgtggatggagttcgcgccggacataagcggcgtgtgcagggtggcgggcaccttgccgatgacctcgataccgatgagcagcgcgaggacgaacagggtaatggaaacgacgagagtaggcatggtattccttcttccttacttctcggacttctcggcatcggcagcagctgccggggcggcggcgcggccggcaaccaccagcgcgtcgtcaagttcttcggtgagatcctggccgagcttgccgtcacgcacgaagtgcacgaggatgtcggccacattgcgcgaaagcaggttggatgcggtggtggcgacgccggaggccaggtagggagcgccaatcagcttgacaccgccctcggtgacctgctcgccgacggcggaaccctcgacgttgccgccgaggtcggatgctgcgcagtccacgatcacggcaccacgcttgagacccttgacgccggctgcggtgagcagcaccgggggcttacggcccgggaccttggcggtggtgatgatgatgtcaaagccggcggccttctcatcgacggcagcctgctgctgagcctgctcttcggcgctcagcgcacgggcataaccgccctcgccctggcccttggagaagtcaagtcccagatcaaggaacttcgcgccgagggactcgacctcgccctgggaggcgggacgcacgtcgtacgcggtgacgaccgcgcctagacgcttcagcgtaccaatggcctgcaggccggcgatgccggcaccgagcaccagcgccttggccgggcgaatcgtgccggcggcggtggtcatcatcggcaggaaggagccgtaagcatcggcggcggtgatggctgccttgtagcccatcacggagttctgagaggtcatctcatccatggactgggcgctggaaagcttacggggcaacttttcgatggcgatgcccaccagaccggccttctcgagcgcggccacgtaatcggcatcggtgaaggaaccgagcatgccaatgacccactggccggccctgagcttggccacggtctcggcggacggtcggtccacaaaaccgagcgcgtcggcttcggcgagcacctcgtcacggctggtcaccttcgcaccggccttttcgtaatcctcatcggtgtattcggcggcaatgccggcaccggcttcaataatcgaggagactccgctcctcttcagccgggtgacgatatccggcgtcaacgcgacgcgggattccgtttcggacgtttcattcaaaacgccgaacaccacggtggcttctgggttttgcgccatgagagccctttcttgttctacttcaaaatggacatggttatccgcatagtaagtgtagtcggaaggtaaaggccatgacttgagattccgccaatcgaaacagaaacgaacccgaaattagtgagaaatacgaatgtgtccatgtgcattgcggatgaattgctcggaagtcgtccaacaatcacccggcatcgatcagcaaccaaccgctcagtaattatcgacaatcaccgtttcgtagctcacggttactcaacaatatcgggacctgtgcaatattttgccacgcactcccctaacccgccagaatcctacggttgcgtaaggtgacgagttcggtttgggcgattacaatttgaactttgagaagcgttcgcctcatggctggacgacactgaaaggtttacaggagcaagacttgtcggttatcaattccttcacgcagcacactatcaatctcacccgtaaggcgctcaggttgggatccgacttcgtccacccggtccacgacgacaccccggacgagcccgattacctgtctaacgccgacgtgccggtcgagaccaatatcgctttgcctcacagcgacgattgggacgacggccacctgaccgtcaccgacatcgaccccgccaccggcctactcaccacctccaccgaaggcaatccgccgctggacgaaggtacgtccatctacgacctgtatgcggaccgcgccgaacgtatgggcgatgagccgctgtacacctacaagtccggcaacgattgggtgaccgtcaccgccaacgagttcctggctgacgtgcgtgccgtggccaagggcctgattcattacggcctgaagaagggcgatgccgtggcattcatgtgccgaacttcctacgactgggacctgaccgacgcggcgatcatggcgtgcggcggcgtgctcgccaccatctacgacaccgattccgccgagcagattcgcaatatcgtcaacaactccgatgcccgactgctgatcgtgcaggacacggacatgcgtaagaaggcggatgggtccgtcgaagagtgcccgtccctggagcacatcatcaccatcgagaccggtggcttggacgaaatcaaggcctacggcaccacggtctcggacgaggagctggacgagcgcatcgattcggtcaagaagaccgacctgtgctccatcgtgtacacctccggttccacggccgcgccgaaaggcgtggaaatgacccatgagcactactgccagaccgcgctgaatctgccggcctacatgcccgatctgctgcacgacaagaaaaacaccatcctgctgttcctgccgcaggcccattccttcgcccgcgccatcaactacatcgtcgtctcctcgaacgtccgcatctacatcgccaccggcatcaagacgctgatcagcgatctgcaggtggccaagcccactctcatgatcgtggtgccgcgcgtgctggagaaggtgtacaacgccgcgtcccagaaggccggacacggtcccaagggcgtggtgttcgcctccgccgtggtggctgcgcagaactatatgaaggaagtctccgccaacggcaaggcaggtgcactgacccgcactcgccgcgctgccttcgatccgattgtctactcttcgctgcgcgaagtgctcggcggtcgcgccaagtggattgtggccggcggtgccccgcttgacccggaactgctggctttcttccgtggcgcgggtgtgcctgtatacgagggctatggtctaaccgagaccaccgcaccgtgcgcgttcaacccgctgggtacgccgttccacgctggttccgtgggcatcgcattccccggattctccctgcgcatcgccgaggacggcgaaattcaggtcaagggtcgtgctgtgttcccgcgctatcacaagaacgacgaggccactgagctgtcgttcaccgaagatggctggtatgccaccggcgatctgggccgcatcgacaacgacgggttcctgtacatcaccgggcgcaagaaggacctgatcatcaccgccggcggcaagaacgtctcccccggcccgatcgaggaggtcatccagcgttgcgagatcgtctcccaggcgttggtgctgggcgacaaacgcccgtttatctccgccctggtgacgttggacgagaagtcgttgcgcccgtggctcgccgccaaggggcttgacgagaacatgtccctcgaggacgcggcaaggaacgccgccgtgcgcgccgaagtgcagcagtgggtcgatcgggccaacgagggagtctcccgcgccgaatccgtacgcaagttcatcatcctgcccgaggagttcacccaggagaacggcctcatgaccgcttccatgaaggtgattcgccccaaggtcatcaagcgctactccaccctcctcaacacccagatgtacaccaaacggaagtaaaccgtatagcaaaagctccctctgacgagggagcttttttcgtctatacgccctagaagccgaggcgttccagctgcttggggtcggactgccagcctttggctaccttgacgtggaggtcgagcttggctttttggccgacgatgcggttgaccggggtgcgtagcttcttcttgacgtaggtgaggttcgaggcgcccttgccgatgatgatcggcttctgtgagtcacgctccacgtaaatggacacgttgacctgcgccttgccgtcatagccctgaccggtctcgttgtcttccggatagtcgatggaatcgaccaccacggccagcgaatgcggcagctcgtcgtccagggtctcaaggaacgcaccgcgcacgagttcggcgatggtgtcttccggacgctcctcgctgatctgatcgtccgggtacatctgcgggccctcgggcgtgtgctcaatgagcacgttcttcacttcagccagattgtcgtgcttcagggcgctcaccggcacgatgtccgagaaatcggcgaaatcgttgatttcgatgagcttgttgatgagttgctgacggccaagctcgtcgatcttggtgacgatggcaatcagcgggatgcgccacttgaacgtaccgtcctcacgcttggtggcgaagtcggtacgcagtcgggaaagaatacgcttgtcgccggggccgatttcctggtcggcgggcagcaggaaggccaccacgtccacatcggccaaggattcgtcgaccacgtcgttcagacgctggccaagcaacgtacgcgggcggtggataccgggcgtgtccacgagcacgagctgcgcgtggtcggcggtcaggatgccgcgaatcgccttacgggtggtttccgggcgagaggatgcgatggcgatctgcttgccgatcaacgcgttgatcaacgtggatttgccgacgttcgggcggcccaccacggccacgaatccggagcgatacggcacgtcctgcttggtcacattctccgtttcaccggtcgcgtcgacttcggcaacgccggcaacatcggaagcatcggtgacgtcaatgtcatcgacgtcgttcgtgctgttgttctggtcggtcatatcactccttgctggcggtatcatcgccttcgacgggctcgccgtcagtttcctcatgggtcctgctattttcctcgccgccctcgacgtgcgccggttcgacgacgatggtggacaccttcttgcggcgtccggcggagtccacggcggtcagtcgcagaccgcgcgtcacggccgaagcaccgacaatcggcacgcggcccagaatcttggtcagcaggccgtacacggtatcgacatcgtcctcatcaatgtcgatctcgaagatctcctccagatcggcaatcggcgtacgggcgggcatcttccacttgttgtcgccgattttctccggctcggtacgctgggtgcggtcgtgctcgtcttccagctcgccgacgatctgttcgatggcatcctcgatagtcaccatgccggcgatgccgccatactcatcgaccaccacggccacatgttggcgggaacgctgcatctcatggaacaggtcgtccaccggcttggattcgggaacaagcagcggctgccggacgatggattcgaccgtgcgctccatggccgccgggttgaaggcggtggcgcgcacggcgtccttcaaataggccacgccgatcaggtcatccacatcctcaccgatcaccggcacgcgggagaaaccggagcgggagaacagtttcagcgcggaagacagtgtggagtcgcgctccatgcagatcatatcggtgcgcggcaccatgatctcgcgagtcaacgtatcagacagggtgagcacattgcgcaacatttcggagacttccggatcgaagtcgttggactccaccagtcggtcgatggcggccttgccctgctcgagctgaatcttctcaagctcctcgtcatcggacagatcggagtccttggagcggcggcccggccccttggaaccggacttgtcgccaccgatgcgtgcgaacggcgtgagcttggtggccaacgacacgatgcgcgagttggaaatcatgatgtcgaccggcttggtcatgccggcggtgcgcgggcggaccagtacggagaccacggctacgataatcgcgaacaggaatccggcgagcagttcaacccacagttccgcaccccacagggatgcgatggaagacaccagtacgccgtcgagcacattgcaggcgatgcggaagaacgcacagctgccggcggtggcgtaacggtcggcgatgagccgttgcacgcgatgaatcttgtcgatcttcttcatcttgaggaactggcttgcttcggagtcggtctgcacctcgaggatgagattgttgaggctggctcgcgttacgcgggccacggcgccttcagcggcggccatggtcagcgaaagccagacgaacagggccgccacaagtacgagaatgacggtgatggcgatcagcgtggtactggaatactccataatgttttttcggtgtccttgaatgtccttgaacggtatagaataatccgaatttggtgtgattgatttggaagtttatttggaatcgaggtcgcggccagcaccgtgcgcggcgtcgtacagggccagcgcgtcgggtgtgccggcgggcagcgtggcctgcacgttggcatcgtggcgcagggcgaagaaggtgagcagcagctgtcgctgcaggccgaacatctggcgctcctgctcgggggtcacgtggtcgtagccgagcaggtgcaggatgccgtggatggtgagcaatagcatctcctgcatggtgctgtgcccagctgcggcagcctgttgggcagcgacccacgggcagatgacgatgtcgccgagcactccttccatcacggttttgccgtcgcctgggcgcagctcgtccatcgggaagctcatcacgtcggtcgggccttcgaggttcatccaacgcatgtgcaattcggcgatgggatcgggatccacgaacatgatggtcaggtcggactgggtgctcacgcgcatctggtcgagtacccaaatgcccaaatcggagaagaccttggggtcgatgacccactgggtttcattggtgacgtcaacgctcatcgtctgtctcactttggttggttgaatccgtttgctggcgggcatcgaagtcggtatggttgcggcggcccttgcgttcgatgtcgcggtggtcgccggcgatggcggagtgacggtcgtaggcggccacgatctggccgaccagctggtgacgtaccacgtcctcggttttgagatgcacgaatgcgatgtcgtcgatgccgcccaggatgcgttcgatggtggccagtcccgagcgcggcacggtcaggtccacctgcgagatatcgccggtgatgaccatcgtggagttgaagcccagacgggtcaggaacatcttcatctgctgttcagtggtgttctgagcctcgtcgaggatcacgaacgcgtcgttcagcgtacgaccgcgcatgtaagcgagcggcgccacttcgatggagccgtcgtccatgtaccgcttgagctggtcggcgccgagcatgtcgccaagcgcgtcgtacagcgggcgcagatacgggtcaaccttgtcgttcagcgtgccgggcagaaagccgaggctttcgccggcctccacggccgggcgcgtaaggatgatgcggcgaatctgcttgtcctggaaggcacgcacagccttggccacggccagatacgtcttgccggtgcctgcgggaccaatgccgaaggtgatggtgtgcgattcgatggcgttcacgtaggccacttgtccggcggttttcgcacggaccggcacgccggcggcaaaggtgatgacgccgggaaccgtgggcttgcggtacgtcgggtcgtgggagccggcagaacgtgcatgggcgcgttcgtttgaggtcgattgcgccagtttgtcatgcaccgggccgtgacctggatgttcgaggcgcacgtggttcttgagcacgttctggtcgagcatgcgacgcacggtgtcggcgtccataggcgcggtgtaggcggcttggatgatggtgttgaccaaatcctcggcctgtgcggcctgggcttcggtctgcttggagcgggagacgatcgccacgcggttgccgcgcacgataatcgtcaggtccggaaaggcgcgctccacctcgcgaatgacctcgtcaaccgggccgagcacggcgacggggtcaagttggggcgggatggtgatggtacgtgtagtcgttgccacgaagcggatattcccctactactcgtcgagcttttcgccggtcatcacgtgcgcgtgcacgtggaagacggtctggccggcgtcgagaccggtgttgaacaccagtcggtaggcgccgtgaaattccttgtcggcgatgttctgcgcgatggagacgatgtgggccagctcggtcgggtcgtcggcggcaagttcggcgacgttggcgtagtgcttcttgggcaccacgagcacgtggaccttggccttggggttgatgtcgttgaatgcgtaggtcgtctcgtcctcgtagaccttgctgctgggaatctgccctgcgatgatcttgcagaacaggcaatcgtcggattcgctcatcatgctccttggtttgatgttgctacgcaccagcttagcgcgtgggcgttactcgtaacgtcccaacacccgagacaacagcgacaacgctacaggaccggccgtcgcggctctcagaatattgagccccagtacgcagctcaccgctccggccttgacgaaatcagctacctcctgctcactgatgccgccctcaggcccgaccaccacactgacagtccgcggccggccgtcctggagcgtgcgttccaccaactgcgtaaccttctcctccacgccggaccacgtatcggtagcatcctgatgcagcacaatcaccacatcgccatgcacgcaggccctgcggcagatggccacgacctccttgctggacgcgcacgcctccagttgcggcttaaaagcgcgccgcgactgctcggtggcggcatccagtaccgaattccacttcttgtccgtacggccgaccttccacttggcaatggatcggtccgcctgccatggcaccacttggtcgacgccaatctgcgtagccatatcgatggcctgctcatcatggccggttttcgccaatgcctgaatcagcgccaaacgggtgagcggctcgggttcgcgccccacttccacaacttcagcaagtccggcttcaggatcggccatcactgcctggattctcaagccgttgccgtcggaaagttgcaggctgtcccccgccttgagtcgcatagcctgcacagcatggcgcttgatgtgcgcgggcagggttagcttccagccggcgtgaagttcgtcgctgttcaccgggacatcgtcgacctgcgggtcgaaaagaaaaagggcatcagtcatgacttcaaggctacacgcgacacgccgggcacacgcgcgaattgcatccctgtaatttcatgctaagctatttactcgttgtccaaacgacacctgcccgggtggcggaatggtagacgcgctagcttgaggtgctagtgcctattttatacgggcgtacgggttcaagtcccgtctcgggcacagataaaccccttgcattgcaaggggtttttcgttatctgcacacacgaaaggccaccaatgcagttcatcacgctggacaccgttgacgacccgcgcgtcgaagcgtatgtgagcctcaccgaaatgcagttgcgcaatcgcttggaaccagccaagggcgtgttcatcgccgagtcccccaaggttatcgaccgcgcgctggccgctgaccgcgaaccgctgtcactgctggtcgaggaaccttggctggagggcatgaaagacaccttcgacttcatcgacgggcgctggggcacggacattcccgtctacgtggcctcacctgagcagctcaagcgactgaccggctatcgtctgcatcgcggcgccctatgcgcgatgcgacgctggccgctgccctccgtagccgaggtctgcaggagcgcccgccgcgtggcagtaatggaaaacatcgtggaccacaccaatgtgggcgcactgatgcgttcggcagccgcgctcgatgtggatgccgtgctggccacaccctcctgcggtgatccgctgtaccgacgagccgctcgtgtgtcgatgggcaccgtattccagattccgtggacccgtatcaccgggttcaacgacgacggtaccgaaaacaagcattactggccgttccagggcatcgacgagttgaagtcgctgggcttcaccaccgtggccatggcattggaggatcgttcgatttcgttggacgaactgacacgccgtctgcacgcgcctgacgaagatccgacgcatatcgacaagctcgcgctgatcttcggcaccgagggcgacggcctgtcccaccatacgattgcccgcgccgatttgaccgtgaagattccgatgagccacggcgtggatagtctgaacgtggcggcatccagcgcggtggcgttctacgcgacacgctaaggaatcgcacgcgctccgaaaaggccggatccttaaacaaatctacgaaactgttcatcgcaagttcacggcacgcggggggaaagccttgcatgttcgaatttttctgcaattattaactatgtaaaccgaatgcaaggaagcatccggcccagcagtgcggtgtcgaaagacgctcagtaacagagaggacagttacgatggccaagaatcccaagattctgtcgattgtgcttgcaggtggtgaggggacccgcctgatgccgttaacccgcgatcgcgcgaagcccgccgttcccttcggtggtgtgtatcgtctgatcgatttcccgttgagcaatctggtgaactccgggtaccgtcaggtcgtggtgctcacccagtacaagtctcactcgcttgaccgccacatctcccaggtctggcgtttctccccgctgcttggctcgtacgtctcccctgtgcccgcgcagcagcgtctcggcaagcactggtacctcggctccgccgacgccatctaccagaccatcaacatcatcgaggacgtccagccggacatcgtggtgatcgtgggcgccgatcacgtctaccgcatggacttcgagcagatggtacagcagcacatcgagtccggcgccgagttcaccgtggccggtatccgccagcccatcgaggaatcgaaccagttcggtgtaattgaggtcgatcccgatcacccgaacatgatcaggaacttccaggagaagccggccaccaccaccggtctgccggacaatccgaaccagattctggcttccatgggtaactacgttgccaacaccaaggccctgttcgaggctctggctctcgatgagaaggctgccgacaccaagcatgacatgggcggcgacatcgccccgtacttcgcttcccgcaacgaggccggcgtctacgacttcaactcgaacgagattccgggttccacggtcactgatcacgcctactggcgcgacgtcggtacgattaagcagttctacgatgcgcacatggatctgatcgcctatgtgcccgagttcaacctgtacaaccaggattggccgatttacacgatgtccggcaacctgccgccggccaagttcgtgcacgccggccgcgaccgtctgggccacgccaccgattcgatcgtctcccccggtgtgatcgtctccggcggtgaagtgcaccactccgtgctctcccccaatgtgcgtatccactcgtgggcacagatcgtcgattctgtgctgttcgacggtgtgatcatcaaccgccgcgcccgcgtgtacaaggcgattctcgacaagaacgtggtcctgaccgaaaactccactgtcggcatcgataccgagcacgatctggcccgtggcttcaccgtcacgccggacggcattacggttgtcccgaagaacaccatcgtcgatgactgattgaccagtccagacttggaaaagccccgcatcatgcggggcttttctcgtatagagctccctcatcagagggagcttactaagcgctatcagtactttggcatgttgtcgaagttgaagccaagggcggcgagctggtcgcggccttcgggcgtgatgcgctccatggtccagcgcgggtcccacgtccagtcgatgcggaactcctcgaccagaccggccagcgtggatgcgcattcgtcctcgataaggtcggtcagcgggcaggccggcgtggtcagcgtcatcgtaataatggcgcggcctagctcatcgatctcaatgccgtagaccagacccaaatcgatcacgtcgatgccaagctccggatcaatcacctgatgcagtgcctcgcgcacgtcttcggcagtggcgcggccgatatcgtcaatcgccttgatcggaatctcgctgccatcggactgttcgtcatcccggcaaccgcatttgccatggtgaccgccacacgcacaggtgtcatcgccggacgcagcagagtgctcgatcgggcgtccgttcgggaagcccttggccaaggccgggttggccatcacgcggcgagcggcctcctcgtcctgcaggacgccgttgacggcatcgaaaacggacggctgtggttcgggaaccaaattatcgttggacatatttcctcagttctttgcagcgagggctttggcgatggagtccttcagcccttcccagcctagcagagcgcatttgatgcgcatagggtatttcgacacgccttggaataccacggcgtcgccgagcttttcttccaggttctcgtcgtccagacctgcaccgcgcgattccatcagcttgtggaatgtctgttccagacccatggcctcgtccacggttttgccgtccaccagatcgaccatcaccgacaggctggcctgcgaaatggagcagccgtggccgtcccacaccaatcgcttgatggtgtgcggttcgtcatcggagacttcgacatggatggtcgcctcgtcgccgcaggtcgggttgaactggtgcgattcaccgggcgtgcagtattcgtggctggcttgcacggtgacattggccgccgcgtccgcggactgttcgaccgctgcgttgggagcaaaggattccttgccatgcggatgtttcgacgcctcgaggatgacctcttggtacatctgttcgaggtcatccccgctcataccaaattcgttcatggtgttctgttttactccactccaaagaacttacggatgcccttggccgcttcgaccaatgcttgggcatcttcgaccgaattgtagacaccggaggaggcacggttggatgcgtataggccgaagtggcggtgtaccggctgggcgcagtggtgccccacgcgaatcgcgatgccctgggcgtcgatgaactggcccacatcgtgcgggtgcacgccggccacgtcgaacgccacggtgccgatgcggtccacgttttcgcgcggtccgaggatgcgaatgccatcgatgtcgccgagcttcagcagttcggcggcgatggtcttctcatgggcctcgatgttctcaagaccgatgttcatcatccattcggcggcgacgcctgcggccaccacttgggcgaccggctgggtgccggcctcgaaacgggccggaggggccatgtattgggcctcgtggtccatgtaggcgagctcgaccatggagccgccgaagttggccggcggcagggcttcgagcagttcgcgcttaccgtacaggaagccgacgccggtaggaccgtacatcttgtgcgcgctccaggcggcgaagtccacatcaagcgcgtggaaatcgaccttgaggtgcggtacggactggcacgcgtccaagatgaagatagaacctacttcatgcgcacgcttgatgataggggcgatgttggtgatggcacccgtggtgttgcccacgtgggtgacggccacgaccttggtgcgttcggtgatgacttcgtcgaggttctccgtgcgaacgcggccgtcctcggtcaggtcgatccacttgaaggtggcaccggtacggtaggccagctcctggaatggcagcagcactgaatgatgttccgcacgcgagacgacgatctcatcgcccggcttcagggcaaaacgcttggcggcttctcccccacgacccagcgatgcattgccgaatgcggtggcgagcaggttcagtccggcagtggcaccaccggtgacgacgatctcttcttcgccttccgctgcattcgcgccgaccagcttggcgaccttggcacgggcctcttcgaaagccatggtactacgggccgccagctcgtgggcaccgcggtgcacgccggcgttgatcgtacggtagaagttcgcctcggcgtcgatcaccgcattcggcttctgcgaggtggccgcagaatccaggtacacgagcggatgcccgtgaatctcctgatccagaatcgggaactcgccccgaatctccttaaaatcaaccattatgttcccctacttacgtaacaattgtacgaaacgagtgggagtcggacatggcctgttcgcgaccgtaaagacttggcctgagtggcccggagcgtgtcgagaatagggcatgtcagactcccacggtcacggactcaggccagcgcggactcggagtcggcgccttcgggcaggtactggtcgtagccgttctcttcgagttcgtcggccagctcagggccgccggtcttgacgaagtggccgtcggcgaacacgtgcacgatgtccggcttgatgtacttcaagatacgggtgtagtgcgtgaccatgaggatgccgaactggttggcttccttggcacggttcacgccttcggacacgatgcgcagggcgtccacgtccaagccggagtcggtttcgtcaaggatggcgaacttcggcttcagcagttcgagctgcagcacttcggcgcgcttcttttcaccgccggagaagccttcgttcacggaacgggaggcgaacttcgggtccatcttgaggcgcttcatggctgcggacaggtccttggcccactggcgaataccgggagcctcgccgtcgatttcggtcttggcggtgcgcaagaagttggtcatggacacgcccggcacttcgaccgggtattgcatggccaggaacaggccggccttggcgcgctcgtccggagtcatcttgaggatgtccttgccgtcgaggagggcctcgccggagtcgaccacgtacttggggtggccggccaacgtgtaggcgagagtggacttgccggaaccgttggggcccatgatggcatgggtttcgccggagtggacggtcagggtggcacccttcaggatcggcttgatgccttccttggtttcgacgtggacgtgcaggtccttgatttcgagtgttgacattgttgtgctcctaaaaatgctgttcttacttgtcttcgaggacctgtgccatggcgtcgttttcgccacgggccagtcggcggtcaatcacggtcatcagatgttcggagatggcgggaatgccgatctcctcgacgagttcgccgaagaagccgcgcaccacgagcttgcgggcgtcggtttcggggatgccgcgggattcgaggtagaacagttcctcatcgtcgaagcggcccaccgaagaggcgtgaccggcaccgatgatgttgccgttttcgatttcgaggttcggctcggaatcggcgatggcacccggggtcaggaccaggttgcggttgagctcgtaggagtcggtgccgggggcggtgggctggatgagcgcgttgcccacccaagtggagtgcgcgcccttgccgtcaagcgcgcccttgtagaccacgcgggacttgcagtcggggtggttgtgtaccaccattgtgcggtgctcgatgtgctcgccggggtccacgaagtagatgccgagcatgttgaggtcgccctgttcgccgccgaagtcctgatccatgcggatgcggacgatgtcgccgcccaaggtcacgacggagtggcgcagggatgcgccttcgccgacgtggatgcggtggttggccacatgcttggcggttttggcccattcctgaacgaacgtggtggagacgtgcgagtccttgccggtggtgatttccacgccttcggccagtcgtgcgtcaccgtcgtgttccacgacgacgtccgcatgagccttgtcggcggcggcgatcaccagatggaaggcgtcgaggtcctcccccgcgccgtgcaccttgacgagcacgggctgggcgatctcacctgacagttccagaatggttgcggtgtggccggattcccattcgactgcggagacgcggtcgttgggcttggacacagtgccggacaggccctcaccgagcttgatctggctgagcttcacgccttcggccaacggcgagccgtcaatcatggagacttcgatctgcgtttcgccggaaggcttgaacacggtgaagaactcgttgatgcgctcgataggcgtgtagcgccattcgtcctgcttgcggctgggctccgggtagtcgcctgcgttgaacgaacgcacggcatggtccacggaggacggcatggcggccggaatcgcgtacgggtcgttggggtcggcgaccggaatcttgatttccttgacgggtgttgtgttgtcggtcatcggaatcagcccaccgatccttccatctgaagttccacaagtctgttgagttcgagtgcgtattccatcggcagctcgcggctgatcggttcgacgaagccgcgcacgatcatgcctcgcgcctcttcttccgtgagtcctcggctcatcaggtagaagagctggtcttcggagatcttggaaacggtggcttcgtgggccatcgagacgtcgtcttcgcgaacgtcgacgtgcgggtaggtatcggagcgggagaagtcgtcgaccagcagggcatcgcacacggtcgagttggacgaaccgtacgcgcccttgacgattttgaccagaccgcggtaggcggagcggccgccgccgcgcgagatggacttggcgacgatggtggagctggtgtgcggggcgaggtgaatcatcttcgcgcccgtgtcctggtactggcccttgccggcgaagccgagggacatggtggatgccttggcatacggttcggcgaggatgcaggccgggtacttcatggtggccttggaaccgatgttgccgtccacccactccatcgtgccgccctcacgcacgtaggcacgctgggtgacgaggttgtagacgttgttcgaccagttctgcacggtggtgtaacgcacgcgggcgtgcttttcgacgatgatctcgacgatggcggcgtgcagcgagtcctcggaccagatcggggcggtgcagccttccacgtagtgcacgtaggagccttcgtccgcgatgatcagcgtacgttcgaactgacccatggccggggtgttgatgcggaagtatgcctgcaacgggatgtccacgtgcacgcccttcggcacgtatacgaacgagccgccggaccatgccgcggtgttgagggcgccgaacttgttgtcctcagggggcacgacggtgccgaagtacttcttgacgagttcagggtattcgcgcacagcggtgtccgtgtcgacgaagatcacaccctgcttcttcaggtcctcacgaatggagttgtagatcacctcggactcgtactgggcagccacgccggagacgaggcggttcttctccgcctccgggatgccaaggcgatcgtaggtgttgcggatgtcgtccggcagctcctcccacgacttcgcctgcttctcgatcggcttgacgtagtacttgaagtcgtcggcgttgaagccggagagatccacaccccaatcgggcatgggcttttcgaggaacgccttgaatccacgcagacgcatgtcgagcatccactgcggctcgcctttgtcggcgctgatcgcgcgtacgacgttctcatcaatgcctcgttttgcggcttcgccggcggcatcagaatcatgccaaccatagttgtagtcgccgaactggctgatgatctcgtcatccttcttgatcttgtcctcgttgacgcgggtacgatcagccacatactggctcatctccacgtcagcggcggcgtttggtgctgtgttttcggtcaccatcctgccttccttgtatcacacttaaccctatgaaaacctagcagaacccaagtgcaaacactagctgccctgacgcatattggctgtgggcttgattacatgcgggcgccatcgggccatgcggcatcacggatggcgccaaacggcgaaggcgtggcggcgaagcatcctgagatgccgtgccgtcacgccttcatcgtgcgcggaccgaccgcgcgggatccacggtcagcgcgccgcctgatggtcgagcgcggccttgaccagaccggcgaacagcgggtgcggcttggtcgggcgagacttgaactccgggtgagcctgggtggccacatagaacgggtgcacgtcctgcggcagttccacgaactcggtgagctcgccgtccgggctctggccggagatgcgcaggccgccttcacgcagacgatccttgtaggccacgttgacttcgtaacggtggcggtggcgctcggtgacatgcgtggtgccgtacagttcggcgaccagcgagccttcctccagctcggccgggtaggagccaagacgcatggtgtggcccatgtcgcccttaccggccacgatgtccttctgctcttccatggtggcgatcaccgggttggcgcaatcgggctcgaactcggaagagttcgcgtcttcaatgcccagcacgtggcgggagtattcgatgaccatggactgcagaccaaggcacaggccaagggcgggcagcttggtttcacgggcgaacttcagggcgccgatcttgccgtcgatgccgcgaatgccaaagccgccggggatcacgatgccgtcgacgttgtcgagagcggcggccgcgccttcagtggtttcgcaacggtcggcagcaacccatttgacgttgaccttggcccagttggcaaagccgccggccttgatggcctcggtgacagacaggtaggcgtccggcagatcgatgtacttgccgacgatggcgatgttgacctcgtgcttggggtggtggacgcgctcaagcaggtctgcccattcatcccaatcgacatcgtggaacggcaggccgagctcacgcaccacgtaagcatcaaggccctcttcgaacaggatcttcggcacatcgtagatgctcggcgcatccacgcagttgaccacgccttcggcatcgacgtcgcacatcagggagatcttgtctttgatggactggttgagcgggcggtcggaacgcagcacgagggcgtccggggagatgccgagctgacgcagcatcatcacggagtgctgggtgggcttggtcttgagctcgtgggcggcggaaatgtacggcaccagggaaacgtgcacgaacatgcagttgtccgggccgagatcgcggcgcacttcgcgggcggcctcaaggaagggctgggactcgatgtcgccgacggtaccaccgatttcggtgatgatcacatccacgtcatcggaagcctgggcgcgcatacgagacttgatttcgttggtgatgtgcgggatgacctgcacgcactggccgaggtattcgccggcgcgctccttgcgcagcacttcctgatagatctgaccggtggtgacgttggccttctggctcaggaagacgtcgaggaaacgctcgtagtggccgatgtcgagatcggtttcggcaccgtcttcggtcacgtagacctcaccatgctggaacgggttcatggtgcccgggtcgacgttgatgtacggatcgagcttttgctgcagaacatggataccgcggctgcgcagcaaacgaccgagcgaagatgcggtcaggcccttgccgagagaggaaacaacgccgccagtgacgaaaatatgcttggtgacgtgttcttgagaattaccatgtgttcttctaaccatggaattccactctatcatccgtgtatgacccggcgtgttcatgacgtggccggtgtagtcgcgcgtaggcagcccgtctcgtcctgccttggccagcatatggtcgaatacacggcgtacttcgggtccataaggcgcgcccggacgaggattcgggtccgattcgtcggaacaggaatcccgggctcaacgtcgactgatacccgggattggctggagggcttggttctattcgctcagcaagtgcgccacagcatcgagcgcgagcttgtagccgtagaaacccatgccggtgatggtgccggtggccacagggctgattacggaacgcttgcggaactcgtcgcgggcggacgggttggaaatatggacttccataagcggcaggttctcatcaatgaccatgtgcgcggcgtcggcgagagcatacgaatagtgcgtgaaggcggcgggattcatgaccaccggggttttctcgtcggcggcttggtgcatccagtgcaccatttcggcttcgtcgtcggtctggcgcacctcgacttcgaggccgaggtccttgccccattcggcgcagagcttgcgcagggtgtcgaggtcttgacgaccgtagacgtcgggctggcggacgccgagacgtccgaggttagggccattgacaacaatgactttggtcattgggactccttttgtttgtgtttctctccctccgccccttcggggcacctccctcatcagagggaggtagaaggtaaatccgactccggggcacctccgttagaggggagccaagtactttttctgaggggatggcgaacggcacggcctacggccgttcaattactgctggatacgacggaatgcttcttctacggcttcggcgggcggattgtcgaggtgtacgacgtgaccaatctcgtcgaggaccacgaaacgcagttcgttgccacgggctttcttgtcgcgatgcatcaatgcgagcacgtcgtcgaacgagctgccattccacgacgtcggcagacccagcgaagcgagcaacgaacggtgatagtcaaccagatcctgatcgatgtaaccgatcagatgggccagctcggcggcatacaccataccgacggccaccgcattgccatgcctccagcggaagtgctcgagcttttcgatggcatggcccatcgtgtgcccgtagttgaggaattcacgcagacccttctccttcaaatcggaggagacgtggtaggccttgacctttaccgtgcgctcaatgagctcggcaaccacgtcttcgagcggcgagccgaggaatgtagagccgtcgaaagcgcgcagttcagctgcgtggtcttcgaggatatgcaggatttcggggtcgcggatgaaaccggatttggcgacttcaccgagaccctcaatgaagatgtcattgggcagcgtagccagcgtcttggtgtcggccagcacaccggcaggcgtgtagaacgagccgacgaggttcttgccctgcggggtgttgatgccggttttgccaccggtggaggcatcgaccatggccagcagcgaggtcgggcagtttacatagcgcacgccgcgcatccacgtggcagccacgaaaccggccaaatcggttgcggcaccgccgccaagccccaccacggcatcggatcgggtgaaaccttcgttgccaaggcgttcccaaatgccgttggccacggtaatggtcttgccgggttcggcatccggaatcacgatgtcggaaacctcatagccgccctgacgcaacagggcgcgggcacgatcggagtgtcgctgcaccggctgggtatggataagcgcgattttggcgggcttgggtcccagcacgtcgaccagatgattcatggcaccttcgccaatgaccacatcatacggctcaattgccgatccggtaacatgcactgctcgctcagataccatatcaatcactttcttcgctgcgccctgaggcgtaagcccccgggtatggacatgaacgttggcgacctcgcggaataccgggtcacgctgcttgaacagtttcttccaacgggagttggcattgccattgagcatgggccggcctcccccgcggttcgcgcgttccatggcctccgccggatcggcgtcaaggtagaccacacgaccgccatggtcgatgtatgaggcgagggcatgctgggtggatggcgtcatgggagcgccaccgcccagcgaaaagataccgtcgaaatcctcaagcatatcggcgatgagatcggcctcgacctcgcggaatgccggctcaccgtattcatcgaagtaggcgggaatcttcatgcccacttcacgttcgatctccacatcggcatcggcgaacggcagacgcaacatatgcgccacttccttaccgacacgtgttttgccggctcccatcatgccgatgatgacggcgcgggggcgtgcggtcataatctacgaatcctctcgacgattggtgggtacagttgctgatggttccgcggcagtcgtctcggaaccatactccacttcgttcagcgcatgtgctccggccacgaggcgagatacgactcaaggttgcgccgtgtttcggcaacactgtctccaccgaacttatccagcgcgtacttcgccaaagtcagacgcaccatggcctcggccaccacggatgccgcaggcacggcggtgctgtcggaacgctggttgatggcttgtgcggattcgccggtcagcacgtcgaccgtacgcagggccttggggatggacggaatcggcttcatggcaccgcgtacgcgaatcacctggccattggacataccgccttcaatgccgcctgcgcggttggacagacggtcgatgcggccgtcggcgttgaccacgatctcatcgtgcgcctgcgaaccggggcgggaggcttccaggaagccgtcgccgatctccacacccttgaacgcctgaatgcccataatcgcggaggccagagccgcgtccagacgacggtcggattccacatacgtgccgatgccggcaggcacgccgtaagccagcacttcaatcacgccgcccaacgtgtcggcggccttcttggcctcgttgatgcgttcgatgatgcgggcctcggcctctttatccaacgtacgcacgggagaggcatccaacgcttccagatcgtcaggtgtgggcaacggcaaatcagggttggtctgcacgccaccgagcgccaccacgtgggctacggtgcgaatgccgaacgcctgatccaggaactgcttggccacctcgcccaaggccacacgggaggcggtctcacgggcgctggagcgctccagtaccgggcgggcgtcgtcaaaaccatacttgcgcatgccggtcagatcggcgtggcccgggcgcgggcggctcagcggcgcattgcggccttcgcgcggcaggtcatggtcgagtgcatcggcgctcatgacctcggtccacttcggccattcggtgttggcgatttcgatggccaccggcgagccgagggtcaggccgtggcgtacaccggtcagcagacggatcttgtcttgctcgaacttcatgcgggcaccacggccatatccaagtcgacggcgtgccagtgcggaaacgatatcgtccgtgctaatgcgcacgccggccggcaacccttcaatcatggccaccaatgcttctccgtgagactcccctgccgtctgccaacgcagcataacttccctcgtttcatgtgtgtacgtctatgtgtacgtctaactaggggttaatgttaagccatgccatacctgttcacgctacccggtctgctatgtgggcttgcactgtccattgaggatgttcgtcatcggcgggtgccgatcgcatgggtggccgtgggcgcgttaatccagttggccgccgatttcgcgcatggagtggtggcgaacgacctgttcgtgctgttgcaggcgctgttgttcaccgtgctatgttgcctgatccagttcgcgttggcgttgctggtgccgcggtcattgggattcggcgatgtgaccgccttgatacctatgggattgtctgtcggactgtttggcctgttgcctgtggtggtctggtggctggcgatgggcgttgccggcatcacatggattgccctgtggacgcgattcgacccacaacgcacatcaccggcacatgcgggcaaggtgccgtatgtgccggtgatattggcgggcgcgattgtggcggtggttgttggggcttaatcccgtattactcccctcagtccgctttgcggacagctcccctcggcgaggggagccaatgaggcgactactggttttcggcttgccacttgcgtagttcggccacattctggtcatgttcatcggcggttacggcgaacttggtttcgccggtgtccagattgaccgtgcagaagtacagccaattgccgctttcggggtgcagtgccgcttgaatggcgctatcgccgggattgctgatcggcgtaggcggcaggccggagatcttgtacgtgttgtacgggttggactcgtcttgggtcatctcggtggtcacctgcgcgggcttgacgttattgccataggccacggtggaatccatgcccaacgacatgccctgctccaaacggttctcgatgactcgcgtcactttgccgtagtaatcggctttgttgacctcggcctcggcgatagaggcgatgatcatcacccgttcgcggtcactgccggtcggcacgcccaattcatccaacttggcgatacgcttatcgaccatggccttgaggatttccgaagcgctcttcatgctcttgacgttgtaggttcccggctccagccatccctcaaagctaccgcccgcttcattgggcagaatatccttacccttgttcttgataatcgtgtcgaattcgctttgggcaacgccggaaagcttcgcggcgtcggcgaacacatcggtagcacgttcaccgggatgaacctcaaggaagcccgccgcctggttggtgtcggagagaacggcgatcacatcggatgcggccatatgcttcttcaatgtgaacgttcccggatagagtgtcgcgctattggcgttgaccacgctggtgaacgcggcagtagacttgatgacttcggccttgagcagattatcggcgatctccgccgcgccttggccctcgctcacggtgaattcgacctcgccatagcccggtccccgatagtccgcgatggccgtcgactggttgctccggctgtcgcgccatgcgatgagcttggttacgccgaaatagccgccgccgataagcagggcgacgatggcgatagcgatgataatgccactgacgcgcttgcgcttgcgctgtgcacgtcgcttgcgcatctccttgcgggatttcggcggttctggcggctcagtcccgcgcattggttctgacccctgttcgacccaatgcgtgttgtcatcaaagaactcgttaaaatcatcggtcataaccgatacctcactgctcccgggtacggtcgagtgccgtctgcaaaatcaccactgccgactgctggtcaaccaccggcctgtgcttgttcgaagctttatgggcctcgaacagttgacgatgcgcactgactgttgtcaatctctcatctatcaatgacacctgcggaatctgatactccgtagaatcactgtcttcactctctgcttgcagcctcttctccagattggccgcccacctgcgcgcttttttggcgcttttgccttctgtaccgtccatctgcaggggcagtccgacgattacatggtccacatgttcgtcttcgatgacgttcaggacctcgtcaatagcaaagaaatagtcgccggcaacatgaatgttgccagcagggtgtgcaaaggtaagctccgggtcggacagtgccagtccgacccgggcattacccaaatcaacgcctaaccacaccactggcggaatcaggctttctgcgcctcgtgctcgagcgcttcgagggcctcgtcgatcttggaggcatcgacaccgccaccctgggcgaagtccggcttgccgccgccaccgccgccgaggaccttggctgcgccacgcaccagatcaccggccttgatgccgaccttgcgggcggcctcgttggtggccacggcgaccatcggcttgtcatcctcgttcacgccggcgagggccaccaccacgggggcgtcttcaccgagctgggcgcgcacgtcgagtacggtcttgcgcagggcgtcgaccgcgccgaagtggcccacgttcttgacggccaccttgaccggggccgcggagttcttggtgtcagcaaccaacgccggaaccgaggcggccagctgggactcgtacatggaggccaagcgacgatcggattccttgagcttggcgagcagggcgttcacacgctcggcgagctcgtccgggcgagcgttgagcttatcggacagctgggagaccagcgcgtgctcacgagcgttgaagtcataggcaccctggcccacgacggcgtcgacacgacgcacgccggagccgatggaggcttcggacaggatgttgaccatgccgatcttgccgacgtggtccacgtgggtaccaccacacagctcgcggctccagccgtcttcgccgatggagaccacgcgtacgatgtcgccgtacttctcgccgaacaggtgcatggcaccgagggcgatggcgtcgtcgaacttcatttccttggtggtcacggcgaggttgtcgcgcagcttgtcgttgacgcgctcctcgactgcggagatcacggacttggccggggccttggaccactggaagtcgaagcgcagacggttcggggcgtcctcggagccgcgctgggtggcctgcgggccgagctcctcacgcagcgccttgtgcaccatgtgcgtggcggtgtgcgagcgggcgatggcgccacggcgggccaggtcgatgttggcgttgacttcggcgccgacgaccagcgtgccttcggtcagacggcactggtggacgatgaggtccttgatgggcttctgcacgtcgtcgacttcgagcactgcaccgtcgtcggacaggatctcgccctgatcggcaagctggccgccggcctccgcatagaacggggtacggtcgagaatgacttcgacgttggccgggccggtgacggcgggcacggagcccttgccttcctgcatgatgccgatgaccttggcacgggcggacatgtccgtgtagccgaggaagtcgatcggcttggcgagcgtcttcttgaagtcgtcatagaccgacaggtccacgttgtgacgcttcttgagggcgtcggcgcgggcacgggacttctgctcggccataagctcgcggaacttggcctcgtccaccttcacgccctgatcggcggccatttcgagggtcagctcaatcgggaagccgtaagtgtcgtgcagagtgaacgcatcagagccggagaccaccgggtcggcggtcttcttggccttcttgacagccacgtcgagaatctcgatgccgttctccagcgtacgacggaacgcatcttcctcgccgtaggccgcttcggagacatcgtggaaggtgtcgttaagctccgggtagctggcgaccatggcctccttggagacaggcagcagctcgggaatcaccggatcggtcacaccgagtacacgcatggcctgcacggtgcgacgcagcaggcgacgcagcacgtagccgcggccgacgttggacgggcgcacgccatcggacataatcatcagcgcggaacgcacgtggtcggccacgacacggaacttgacatccgcggcctcgtcctcgccgtacttgcggccggacatgcgctcggcggcctcgatgaccgggaagacctcgtcggtctcatagatgttctgtttgccctgcatcaggtaggccagacgttccagaccggcgccggtatcgatgttcttctgggccagctcgccgacgatatgcaggtcggtcttggacttgacattgtcgacctcgtagttctcgaacacgaggtcccagatctcgatgaagcgcgtctcatcggccgcgggaccgccatcacgaccgtattcggggccgcggtccacgtagatctcggagcaggggccgccagggccagggccaccggtggtccagaagttgtcttccatgccgaaaatctgcatgtgctcgggatcgaagccctcgttcttccagatggaacgggcctcttcatcgtcggtaaaggtggtgacccacagcttttccgggtcaaagccgtaaccgccctcgctctgcggggtggtcagcagctcccaggcgtagtggatggcctcttccttgaagtagtcgccgatggagaagttgccaagcatctggaagaaggtgccatggcgggtggtcttgccgacctcatcgatatccagcgtacgcacgcacttctggttcgatgtcatgcggcgcttcggcggggtctgctcaccaagaaggtagggaatgaacggcaccatgccggcgatggtgaacagcgtggtggggttcggggaaatcagggatgccgaaggcatgacgagatgatcatgtttggcaaagtaatcgaggtatcgctttgcgatgtccgcagtgcgcatgagcggatgaactccttgtttgggtaatgggcgcagtcgcgcctggtattggtggaaaaagactggattatgaggactagtttgttctagctggttcagtgactagatggcaaggcggcatgcgcgtgtcagttggcgcgctcgatgtactgacggttgagctcagcctcgcgggctcgacgggtggcattgaactcgttgaccaacccttcgagtgttttcatcggcacattgtcctgatcggggccaagcaggaactggcgtgccgcatcaggcgtattggccttgacataggcctgtgccttggtgacggcaacgattccgatggccacgccgacgccgacccagaagatgcgtttgaacatcactcccccttctcggcggtgtcgttgacggtggttttcgcggcgttcttcgcaaggaaggactgccccgtagttttcagcgcgtagaaggtggaagcaatcttgatgatgggcttaccgaggaaggagccatacaaatcggtcaacgcaccaacgttgttggcggtggtggaagccgcggcggaaatcttgttcacgtcttcaagcgacttgttgacctgcttgacggtggtcacgccttcgtccagcgcggggatggcgtgttcaccggactcccggaccgtctgcgatatctgatcaaacatcttgcccagcctgatcagcggatagatcatgaaaccggccaatactgcgaacgcgatggccgcgatcaggccagcgatctctccgacttccattgttgcctccttgaggtcacacttactcggataagggtagcactcctcccctatttacccgtgcaactgacgatgaaatacgctatttgccgtatgagacgatggtcacggcctgcgaaaacggtttggtcgtgtcgaagtcgagtacggttaccgagccgttggccggtcgttcgctaaggtcaagatcggggcctccgaaacggtggccgaggctgagcagcgtgttaccgtgcgaaatctgaagcacatcatcgccatccttgagattggggttgctggcgatgagctggaatgctccttcgacgcgcgtccagtattcttcatcggattccgcgtcatggaaggggtcggcctctttcaggaaatcacgggaggcggccagaccaaatttggctacgatgtcgttgtagtccttcgcgccgtgaggtccacccgcagcggtccaagccagcgacatgtcctgaccctcgaagtatccgtagcattgttcgcggaaatgcatatcggccgtgagttctggccgtgcatgtccggcagcctcattgatatcgagaattcgcttcgctgtgatttcggcgcgagaagtatcggaacaatatgccgccgcaaaatcatagccctcaagtttgtgcccggccctgtcggcatcggcaagtccggatgcggtaagcggcgcattgcaccatccctgaagacggttgtatttattgaacgtggtttgcccatgacgaaccagatgcaaatgcagaatcatggttcccatgctaccgcagtccgctaaaacgcaggcccgtcgccccctccatggcacgcgaaccgcaggagaccgtcgacgaaaccgacaacaggcccatgcgagtgctcggctaccgcacccccgccgaggcattcgccgacgaactgccagaatcagccgcgaacaaggatgttgcacttacaaatagataacgggggccccagctgacatgactgatttgaggtatgatatacgtatgtcataccactgttataaggagtaatgatggctatcaaggagaaggccacgatcagtctggatgcgcagaccaagcgtgacggcatcgccatactggacgccatggggttgaacctgagcacgtttgccgaaatgtctctcagacaattggtacgcgacgggcgtctgccattcacgccaagcgtccgcccttcattcgaaaaagacaacgagggatatcccctgttcaaagcgaacatggatgatccccgcatcgtgacgccccagatacgtgatggtgccgtgatcctgccggagggttgggacgatgatgaagactgatccgcgccagttcgagatatggtgggtgccgttcgcttttcccgacaagccaggcaaagcgaagaaccgtcccagcgtgatcctccaatgggacgacggcacccgcatcgccttggtgaccaaggtcaccggcaacacctggcgcgacgaaccgggctatgtggtgctgcgtgactggcaggacgcgggactgagcaagcccagcgccgtgcgatgctcgcaactgctgcggctgccaagcaatcttttcctcgacgacggcccgacaggaagactttcggcatatgatgccggccgcgtcgcctgggcgatcaacgaactctatccgggcctactagcctgagagcaaccgataccgtcaccatccctgtcgaggtgcttgccgcagcacgggtcaccgacgtcactcttgtcaagtttggcgtgatgggctgttgtcgcgggcgaatcgttccccgataaccgctaatgcagtccgaaccagccgctgcctcctgcctcccgataaaaatgaattcgtcaaattctttcgggcagcgaatgcagatacatgtatagagcatctgtactattttcaagaatgctcattgtctgcggcaacggttcggcatacacagttttataatccacctcatcgtactctttccgaatggggaaagccaaacgttcatcgtcaacagaaaagtctgcttgtacaccctctttattccctcttgcatctacacgaatccatcggtcaatggatctcagataagtggcattcaaggcatggatgcagtatccgctttcaggcgtactgcctaacgtaagcctttgatagcatattccggcaggaatgccatttgctcttaatagggcggccaataaattagattttgcccaacaaataccgacgccctcccttaatgcgtctgaggctgttgccgtgactcttttgtcttggacatcccatgaatgcttgatttcatctctaacaaaatagtaggcggcttttgccagttcgatttcgccttcagtggagtcttttagttccttggcttttctttgcacactcggttcattccaatcgatatagtgcgaaaaggcaaggtagctactgatatcatcttgaatatccaacatataacacctccgagaatcccgattcgtcgctctcttactttattaccccgttgcgaagttggttgtttcagcaagtccgacatagcggcttctcaccaagctatctcattttcgtgcagaccgatctgccaaaacaacgacgaccagattggccagcaccatgacaacaagcgtggccaccaacgcaatcaatgcctccgatgccatgttattgaagctcttctccatggccccgccaatgatgatttcaagggcgatgaggaacagggcacatgcatcaacgaggaatatcggagcgtactgcttgtgaatccgattccatgtgtcttcggatgacattgttgccggcgttttgatgcctaccgaattctgcaaaggcaacgttccgttctttgcatcacgatagaccccgaccaaaaacacgccgacgaccacggccacaactacttcgacgataagcatgcgtcaaggacatctcccccccctagactagtaatggtttgaatcccgtctgcccaccgatggcaggtcgattacgcgaggtgaccatatggctccagtggagcgtcatatcgaggaagcgctgtatcgcagtgccgtggaactgatcgagcgaaggtatccgacaggatggggaggcgcggcggcgatgcgactcgccggcaaagacaacggtaaacatgacggaagcaacggctcggaggcacttatcgtcacgagcgtggcgattgagacacccaatgccgccgcttcgctatgcatcgaggtcggagcgatgtgcgaggcgatgaagcttgatcgccgtgtcacccacaccatctgcgtcgtacgcgatgacgaacacgccccgttcaccgtgttgtctccatgcggcatctgtcaggaacggctgcgctattggggcgacgacgtgatgtgcgccgtttcagacaacaatcagggagagcatccgttgttcgtgccgctgcgcgacctgcagccgcaccattggactcaggtgtatccactcgccgaattggaacactacgagcgataagccgccctcgattgaaatccctacctccctaagctatgcagtaggctccgcccgcaagtcacactggtacaattttcaggtttgagactgtagcaagttgagtcgctttatcagtaagtctgtatttggaggtatcgatggcccattgtccgcttatcggcgtggtcccgttgtgggacgacacactgaatagcctgtggatgctgcccggctatttcgacggcatcatcgaagccggcggcatcccggtgatgctgccgctgaccgacgacgagactacaatcgaac

SEQ ID NO: 36 - DNA, 22581 bp, Unknown
  R30_18m  MAG No. k141_11669
aaagatgcacctaagttcccctctcccagcatctgacgcatgagcgtgtcgtccagcagggacgtcacgggcacgccgaagtagtcggccagcgccgcgatgtcggggatgctccacgtgttcttgttcttcatcttcgcgctgacgccgcccctggtcatcttcaggggttccgtgagcgccgtctgggacaggccgtgcgcggtgagcagcatgctgatgttccatacgatcaccttctgcaggtattcgcccgagttcgtcatccgtttctttatcgtcgtggtcatggcaatcgccctttcactgcttcgcaaacacatgttgatatgtccaacatctctggacacgatattagcactccgacttgcgaaaggcaaaatacttaattactatgtcaactgtgagtagacaaaagcatctttccgtactgtctccggtggctcgttggatggcgcagcagggtctgtcctgccgcggtctggccgcggagatggggcaatcgaagtcatcggttgcgggaaaggtgaacggctccctccattggcagcaggccgatctcgtctggctgtatcggatgaagggactgccgtcggatttcgtgctgggcaacgatgccgccctcgtgaacaggctgctgtctcctccggcaaaagaaggttccgcgcactaggcgcggaaccgaacgacaaccgaaggcgtctccgacccgtacatccgccaagattcccggccgccgacgtcttgtatcccaagtgaaggagggtcatcgccatgaccgattctaccaataccgccggcattcgcccggcatctgtcttcgagcctaatcgccggcgcgacgccgcgcggcggacgacgcgggccggcggcaacgtcgatctgcgcatcgcgaaggctcatgtgctgtccatgctcgcccacccgtcccggggctcgcgccgctgaggcgcgcgtccgcggaccgtttccccgataccggccgaaccatgtggtggttggtcgttgccgccgtgtgcgtgtccggcggcgttctctcgtatgcgttgtgccgcgccgcccgtctgggcgacgacatcggcgcgaggctgcgcgaacgccgcgaagcggacccggcgcatgacggcgggaaggtcgagcgatgagcagcagagccgagaactgggcatgggagcgcgacgacgtcaagggcatcaccaagttcgtgctggtgtatctggcccgccgcgcctattacgacgatggcgcagccgcgtggccgagcgtggagaccatcgcgttcaactgcgggtgctgtgagcgcaccgtgatccgttcgttgcaggggctggagcgcaagggctacatcaggcccggcgaccaggagatgtcggcgcgcaacccgcgcacccgcaagccgatcgccaagggacaccgctcgcgcgtgtgggacgtcgtcatggacggcgaccatcccgccgagaacatcgaggagaagccccggaacctggacgcgctggcggaaggcgacggcaagccggatccgatgaaggacaatttgtcacccgacggattgtcacccgagccgaaggacgtggagacgaggacaaattgtcccggaatcttggacagaaagtcacccaatagacaagtgataaacaattctcccctcatccccttcggggatgctcccctcaacgccgaacaagccgccacgaaaccggtcgccgacccgaagcccgaacccgttccggcgaccgattggggcaaggccctgcctccaaggggttgcaggaacccgctgtgggtgcccgaacccggcaagctgcccgagccggtgacggaacgcgccggtcaggaggtgcgcgtgctcgacggcatccgccgtcgcatgctcgccgtggaccagaggttcgatgttccggcgaccatggccgaccgcaaggccgtccactcgttgctgatcgacaggccgtacggcgagatcgtcgcgacgatggactgggcgtaccgcaaccgctactggctgccccggctcaccagcggcgccaggttcgccgcgaactacgtgcagctgcggctggaaatgctcacccatcccgatccgacgggcaagcgggcgccggacgccccgctgccggtcgtcaaggaccccaaccgggcgataccggtcagctcgtcgtccgcgagccgtgtgccgatctacggggcggcgctgctgcgcacctcgctgtgccaggaacacatcgaaggcgtcatctcgcaggaggcgtgcccggtatgcgcgtacgacaaacgcaaccacgccacccacgacgtcgccggacggcgcaaggcgaagaccggcgcgtcggcggaggcggtggtgcggccatgagcggggacgggcagcgtcttgaggcgtggaagaaggccggcgaatgccgcgacttcccgcaaccatggtccgactacctgtggtcgctggagttcgagcaccgtcccggcgacgcgaaggcgttccactcggtcgccaaggccgtgtgcgaacgatgcccggtacgcgccgaatgcctggcctacgcggccagcggcggactcgaatggggcgtgtacggcggcaaggtgtgcaccgaccggcgcaggatcgcgcgcatggccgaagccgacggcgtcccctgccgggaccgcggcctgccgtggccgcaacgctggcggctgctcacggactggatacgcgcccaccggaacgtgttcgacgaagccaccggcgaggccagcgccgaacgccagcaacgacgcctgcgcgcacggggcaggacggccgatcgccccgccccgcatgagccgtcagacaatcaaacattcaaacaagcaggaatccaagcaatcagacaagcggacaatcaagcgaccgactgaccgggttcgcatgatatccggcagtcgcaaaggagaagaacgaatgcgcatcgccatagccaacgccaagggcggggtcgcgaagaccacgtccagcatctacatcgcctcggtcatcgtttccaggggcggcagggccgtcgtgtacgacgcggacccgcagtccagcgcgagcctgtgggccgcagccgcggaacagaccgcggaccccctgacgttcgacgtgttgcccgccaaccaggccacgctccgccagctcgccgcgggagccgacccggacgaatgggcgatcattgacgcgccgccgcagggaccgaccctggacatggccatcaaggcggccgacttcgtgatcgtgccggcgtcggactcgcccatggacctccagcaggcatggagcaccctcgacatggccaggatgagcacgcccgccgcgctgctgctggtcaaggccgaacgcaacacgaaggcgttccgcgacaccatggacgccctcaacgccatggacactccccggttcgacacgatcgtgccgaaggcccagtcctacaagcgttcgctcggcaccaacccgcaccagcagggcgaataccgcgacctcgtcacagaactccagcagatcgccggaaagcaggagtgagaccatgcagggcaactaccagccactggcacgaccggtaccgttcgacgacgtgctgcgccaacagaacaagacctccaaggccacgggcgaaccgttggtcatgctctcactgcgcatacccgtgtcgctcaagacccggctcaagaccacggccgccgcgcacgacctgcccatgcagcagctcctgcgcgacgccatcgaacgcgagctcgaccgactcgacagcgacgacgagccgtaacccgtcagacaatcaaacaatcaggcaatccgacaatccagcaggcaaacaagccaacaaccaaacattcaggcagtcaaacatgcagacgcgatcccgaaagccgatgcgtctgcggaaaggagacactatggactattcgatggaggtctccgtgctcggcgaccggatcagcatcggcgaggaggcgcacgtcatcaccctcggcgtgaacacgggattccccgcgggctccacggcgggactggcgtacacgctctcgccattgcaggcccgcgtgctcggcgcgcagatgcgcgcggccgcggacgccgcggaggggcatccgggcatgccgtccgacgaggaggtgaacgcggcggcgaaggtgttctgcggcggcgtgtggaacgggttcgatcccgccaccatgatgccgaccgaacggttcgaccggttctggggcgacggcgagggccaccagctctatctggcgatcgcacgtcacgcgctcatcgccgcccgcatgtccatcctcgccggacaagccgaaagctgacaagcagacaagcccgcatgcagataatcaaacaatcaaacttgattgcatgcaggcaatcggacatgcaagcaatcaagcaagccaacaatcaggaaaacaaacaatccaacaatcaggaacggagcagaaccatgaacgacaaccacaacgaagacgaagcgcccttcgatggcacgagcgaggattccacgctcgaagaccagatgagcgcgcacatcgcggccatcgccgccagcggcgtcgccgccgaagccgaggccctggccaaccggcaggccgacatggcggccagggaacgccgtgaaacgcgactggcaatcctcgccgccatcgctatcattggcgctttcgctatctgcgtcattaaaacgttaaaaaaaatatacatgacccggacgataatcactttgataaatatagaaaattaacccaattaaaccaattgttcctcagattgcattaggccaataagtcgccgagttaaactgacgtttttctttagttttgcggttcttgtttcaataaacaggaaccgcctattttttgacgataaagaaaagtagcagatataaagcaataggataaacaataaaacacagcttacataaaacaggcattgatgagacgtaagaataaaaatcatactcaaatacattgatgcggtaaatgagaaaactgacaatgcaatacgataaagtatttttagtggacgaatttctttcgtcaatccttcaaacacctttattgaatcataaaggatgcttcctagaacgtaaactgacaaccagtaaaaaacaaccaatgtaaaagaaatcaccaaattggtcaacaataacttatgctgatgcacggatgagcaaacatagaccagaatcacaaacgacaatccgatactattaagagtcctattccatcttcctacactgcgaaacacatagcgctttcttttcctattggcgacattgcatagctctttttccgcttcgtgcaatctattggataattccttcaatcgagtacgataattcacagatatatcgcctatgccgtaaagcatagtgaaacaaaacaataaaccaaaaataagaagaacaccaagtcctttcccataccggagaatcagactagcggatgacaggccgagaaagcagacggaaagattactgaatcgtatgagcgttctacccatagatctgaatctaaacatatgattttttgaaagatcctcaactgcgatacccacggaaagacccgcaactatcgccaataaagcgaggataatagacaggcctgcatcttctgcaaaacaggggaaagcttttagtatagattccgtcttatcccaagaagatttttctgccaactcatttaaagataattccttataatgacgggctatggccgaaatagaggataatattattccaataataagccagaaagactcatatccaagccatcgtaaaaattcagcgttttcaaccttgttgtcattatatatactatctaggtcgattccctgattaccaaccgaaatatgatattcattattgcgatatagcggacttttataaggtgcggagatatgttttcatgtattatcatattgtatacttccttgtacgcaatcatctgcaattcatcgacaatgtcttatcgactgcgaatccgcgttccatatagtcctcattatctacatcatgcccgcatttgtcgaaactgaaatagatgcgaaatacaatgttatagacgacctctgcgttatgttacaaatactctaagtccatattcttaaccataattcgtgtccgcagccggatggtcctaggattgctaatgcgactccaggctatccagctacggatgacctattgcagttcgcctgccaggtatggttccacgaaggcgaggttgctgccgcgttcgagtgagtggaagtcctgcatggcgtatcgccaggattcctcccaagtggccgggttgccgtgtatgcgtcgcagggattggagagtcgtcgagaacaggttcgggtcccgtgtgaagcggtcggccagtttgatggcgccgctctgcttgtgctgcgcgtccaggttgtcggtcctgccgcggaacgcgtgttcgaggttgcggctgacatagaacagacggtatggaatcaagacggtgcgaccgccctgcttcttcctgaatccgtcgagtttgagcagggagcccacgccgtttcgcttggtcgtccggtccgcgatcagagcgtcgcggttcgtggtgacgatgtcggtcgtcgaatacagggtttcttccgctgacgggttctcccgcacgctgtcgtcaggcgcgaacgcaccgtccagatcgcagatctggatgacatggccgagctggccccatgtgcgatcatggtccttgagataatactcaacgagttcgcgcaccgtttgcgagggtttgtccgcggggtagaacccgttgcgccgatggaattcctcgcggtggttcggcgcggtcagcacgtcgcaatggaattcctgaccttggaacaggcggttctcgatcaacgccgagaacgccggcacgagcaggctggcgtcgctcgtgccctccacgaccagcaggacgatcttgcgtttagccacggtccgcctccgtcccggcggcattgagtgctgccagatcgtcgtcgatgtcgtcgtcctcgtcggggtggccggcggcgtagaggctgttgccgaacatgcgcggtatgggcgaatcatagatgtcggggccgttccatccgagctcgctggctgtcaggtaccgtttgcgctggttgttcgtggaggacttacgggggatggtcgcgaaccggttgtcgggatcggtcaccgtcgtgcgaatgcagctgttcggcaacacctccaacgcacgcaggttgtgggcggtgaacaccaattgccccgcgcacccgtccgccaactggtccagcatgtcgccgagcagcagttcgaacacgccggagtcgaactcgtccacggcgaccagcgcgttctcgtcgttgtacgcgtgcttgaggtagccgagcagcgcggtgatgcgtatgatgccctcgctctcgcagcggaagggcaccatgacgtcgccgcggcgcgagaacagttccgcggtgacccggtcctcgccgtccttgccggaaggcgcggtgccggtcttcagcaggacgtgcaggccgggcacgatggtgggcaggatgcggtcgaaggactccacggtctgtccgagccgcttcgcctggccgggggtcagtggattgggctgcagcaggtcgaacgggaattccgtgttgcggccttccgggttctcctccatgatcgggatgatcgcgaacgcggcgtaggagccacgacgggtggtggacacgaagatgtcgttggtcgcgtaaccgcacagcgtctcgcgcaggcggacgaactcaccgaaacgctcgttgatatacgtcaacgacctggaggacacgccattcgtctcccgcacacgggccaccgcccagtcgatcaggaactcggcgtccggccggtcgtcgagcgtggcgcaccgggagaacaggaacgaacgcccttccatgtacgcgcggtccgcggtgcgcgagaccacggtcttcaccgaactgaccgcctcgatggaacgccacacgtagaccggggtcgacacgaacccgtccgcctcggaatcctccatacgatgccccagcacctcacggcccaaacgcgagggatcgtcgccgatacgcaccgattcggcgacgacgcgcgcccgcgtcgaatccggattcgccttgcgcatggacaccctgtactcaagatagctcggcttctgcttatctccaatgaggaacgtcgccgtcacggtcgccgaaccggcgctggcgctgacgacatcaccggcggtatccggcagcatattcccggacaacagcgcgcgcagtatcccgatggcgtcgatgacggtggtcttgcccgacccgttctgcccgtaaatacccgtgacgctgccgccggtgggcagatcatcgaaatccaagacgccatgcgatatgttcctcatgtcatccagaacaagtcttttcaaacgaatcatcacattgccattctctaaaactcacaataatcaatttttaattgaaatacatgactattatacagcgtaacctgtgtgcataccaccgcgtttcgtaatcagatcataaccggagcgacacaacagccccgatccacgatgaggtggttcgaccgaggcaacgtttgtccgccgcagaggaacccgacgcggggtgatgctgatggtgcgttcggggtccggcggccggccgtcgggcttgcgggcgtgcttttcttccagggacccgggaggaggcgggttctggagtccccgtctcctccctttcccggagaggggcgcttctgtcgtatgtgggaaaggatttcgtatgaggttcgggaagaagggcgccggtgcggtggcgtcgatcaccgccgccgcggcgttgctggcctgtctggttccggtagcgttggccgataacggtggcggtggttccggtgaggacggtggcggttcgggcggtggtccgacgcagacggccgatgtgcattggatctacaaggattcgtggccggccacgctggatggcatgaagacggcgttgagcgacgcgaaggtgcgtctgtcgtccgatctggcgaacgggcagaaccagttcgtgaacatgaacaagactttgagcgacgcgatcgatgagtgccaacgctcctatacgggtgaggggaacgcggactgccgtctggtggcggtgggctacgtgcgcttggcggatggttcgttcaacggcagctatgtgagctcgaacgcgaagaaccgttgggaggcgcagtggaaggccgaggcgaagggcgactacacgtatcagggccagaagtactcgacctcgaccacgtggaaggacaagctcggcacgcgcagcgttgactcgctggcacaggagtcgatcgactccaacccgaacgcctcgttccgcgtgatcgtgctggcgcagaaccagccgccggtcgattacaagctgaacgtgaccaccagccacaagcagaagaccgacatgcaggtcggctccaccgacccgatcggcgacgtcatccacgccgacaacggcggttccgcgatcagggagacgttgaacggcaccgcgatcatccattacgagaacggcccctacctgcccgcgaagagcgtgagcaagccgatcagcttcccgagcaatggggatacccagctcgacgatctcgcctcgccgaaggatttcggcatggaacactgggccgagggcacgtactggatcgacatccaggtacccaagcagggccgcatgcaggcggccgtggacaccgcggaccgcgatccggccgaatcctggaaggtgagctcggtgccgcccgaacccccggtcaagaagatcgaggacggcgtgagcgccgaccggatgacgaaccgcaccaccatcacgtacggcaccggccgcggcggctacgagatgcgtttccgcgacgtgatcgaacccaacggcgtcgaatactccgtggacaactacaggctcatcgacaggatcgacggcaaccgcgacgtttccggcgagttcgaaatcaattgggacaaggcgtcgaacacggtgtcggccgcgcgttcggcggacaagggcgagatgcccatggaccatgtctacgagttcagcttcgacgtgaccgtgtcgaagccctccgacttccagcaggtcaaggaccatgcgtggggcaagtggaaccacgagcccgaggccgacgccggaaagaaacagttcgatacgtggcggccgaatcccgacaagagctggatccgcctgaacgcgaagggccagtgggaggcggtcatcgacccgaaggagaccaaccggaccggcgccgacgatatgacgcttctggacggggaccgggtcgcctcggtggtcaacggcaccatcgccaagaacctcatccaggccccggaaaccctgacgctcacggacgactggtcggccgccgactacctgttcaacgccgacgacaagtcgaagatcaaggtgtacgaggccgatgccggcaccgatcgcgagtccagcgtcaccgacatcgccaaccacggcagggacgtcaccgaccagtggacgatcacgatggaaggcaccacggtgaccgccaccgcaggccgggcctatcgcgagggattgaagggattgaagaccgcgaagcaggtcacgctgctcattcccggcaaggcggcctacgccaacggcaagggcgcgggccaggtgcgcgacgacttcggcaagcaggcgagcgacgaactgtcgttctgcaccgcgccggacggcaaggcgctgacgaacaagggctcccagaccgtcaacacgcacaccatccccacgaacgagccgaagatctgcggctacataccgcccgtcgtcaaggacgtggtcggcgaatcctcgcagggaggcgaccaggcgtccgtggacggcaaggtcgtctacccgggccagcgcgtggaataccgtctggagacccagccccacctgcccggcaatctcgcgtactcggtcagcgaggtggcggtcaccgacacctatgacgagcatcttgaagtggacaagcagaccctggaggtcaccgacctgtccaccggcaggttcatcccgaagaccgagtacgagacccagtggaacgacgcgcagcacgcggtgcgcctcgtgttctccgacgggtacgtgaagaccaactggcgcaacggggcgaacccgcgcatcatcgtccgcttcgagggcacggtcgccaaggacgcgcccacggacaccaaaatcggcaaccagtgggccctgaccctgaacaacatgatcaccccgagcaacaaggtatggaacgagccgcccgacttcactcccgtgaagaaggacacccaggccgacccgtccatcagcatcgacggcaagaccgcgctgctgggcgaccgaatctactaccgcgtgaccatcgacgccaagcagaccaaccaggcctacaaggtctggagactcggcatgaccgacgactgggacgacgaatacctctccctcgacgccaagcacatcgaggtcaccgacaccgctaccggcaaggacgtgaccgcgaagttcaacatcgcggcgatcgacggcgtcgcctacgtgtacgccaggaccgcggacacgaaagtgccggccaccggcgagaccatcaagggcgacccccagcccaggaacctcaaggaatacgccgaaaagaaaacccacgacccgttgaaggagccggccatcgaccagtcgatgctgggtacgagctacgaggtgagcctgccgatgaccgtcatcaaggtcaccgacggacatatcgtgaagaacaaagccacgcaggtcgtcaacgacacccgcaaggacaccaacgaagtcgccaaccccctcaaacccgtcaatccctccaaggacgtggtcgtgaaggtggacggcgaatccatcgacaagcacagcgtgtacctcaacagcctgttcctctaccgtctcgacagctccgtgctgcccgcgcaccgcgcctaccagaaggtcaccgactggagcatcaccgacccgctcgacaccgaacatgaccagtacaccggccaatgggccgtgtacgccatgcgcgacctgaccgaacagggcaaggtgatcgcccgcaagggcgtgaagatcgccggcagcggcttcgacgccggtatgtacggcggcgaactgttcaccctcgcccaggatgacaagggcgtggtcaccgtcacggcgacccaacgcatgctcgacctcgtcagcggcaacgacgaaaacgagcaggcatggaccgcgttcatccagtgcaagcgcgtcaagaccggcgaacacatcgccaaccggttcgacgaaacactcaacggcaccagccgcccgtccaaccaggtcgagacgcacacgcccgacatgaccccgagcctgaagatcgagaaatgggacgaggcctccggctggccgaccggcgaccgcgaccaggtcaaggacgcattggccatgcagggcgacacgcgcatcgtgttcaccatcaccaacaccagcaccaccgaccccgacaccaagcagggcgcatggtaccgaaccaaggacctgaacctcaaggaccaactggtcgccggcgacggccgggtgaccgatctcgaatatcccgccgattgggacagccgtgtcctcaagcccggcgagagcgtcgaggtcaagggcatcctcaagggcgtgaccgatcatcacaccgaccgcgccacggtcaccggcacgccgctggtcgaatgcgtcgtctccgacccggatccgttcgacggcaaggacgagacgtccgcacccgatgacgcggtcacgatcgacggcaggctcgtctgccccgacaccgaagtggtcagcaacaccgacgactggaacggctaccggaccgggctcgcccataccggcgccgccatccagggcgtgatcgcagcggcaatcaccctgctcgccgtcggcgtgggactggtcgccgcccgccggttcagacacgggaacagtagtgctggcggccgtcactcagaatcggcgcagtccagcgatatcgcggataccgatgaggatgtcgccgagactacggatgagattccttacgaatcgtccgtgatctgacccggacgtcggacctgcttcccgtcatgatagttcttccagtcggagtatcttacgattggaagaactatcatgtattcatcaaattattacggattacaattgatgtttcttttggcgcgacgaaagaaggaaacattctattagaatagagtcatttacattaaataattgcgcagttacgattcgaacgacttgagtggtgggtgggttgtcatctatagatgacaacccacccaaggtctttttgtttgtagttggatttcttactgcttgtcggtttcctcggaggcgaggcgcgcttcgagctgttcgacgatgtggtcgtgcatgttctcgtcgatcttgacggtcaggaggaagacgacgaggctggcgacgatgccggcgagcggcaggtagtaggcgcaggtcttgaacgtgcggatgtcctcgggatagtcatgtgtgcccatgatgctgcccacgccgccgagaaacgcgatgcgtctacggcccgccgcaatcatcgcgtccagggcgtccaacatcgtctgcgacagatcgggccgtacggagtcgaacaggtgcggtgccggattcgtgtcgatgcacacgccatgcgggagtgccgcatgcagggcgcgcaggtccgcttcaggaaacaccgtggcatccacggtgatgaacccatcgaactccgccgcgcgttccgtcagctcgcgtatggaccggatgaacgtgggctggtccaattccatcgactccgcacactccgcaagaaccttccgcagatcggagaagtatgcgtcctgcagcttctccccggatggaggagcgtccagcacagcaatcgcgggacggaacacgttgcggtatcccagctcctcgcatacgcgcagcacgcgccgtcgcgtctcctccttgatggagaacgatgggtcgttcagcaagcgcgacaccgtgctctgtgacaccccggcccgttccgcgacctccttgagcgtggccatgacatcctccccgcaaactttagtaaaggttttactacagcataacccgggatttgcaagatgacggattctcctactcaggaaatgacctacaactgataaacttcaagcgtcccgacaaaggggcaatgcatagagggcgggcgtgtcattgaaaaacatgctcgccctttaatcaaggcttatggcagtctgaactggcacccctcatgctcattgtctgtttttgaagaagacgaagagttggttgtcgtgtatggcggtgatggcgatggcagctccgatttgcgcggcgatgagggctgcggtgagtgcgggaagctggatggtggtcagggtgagtgcgttggcgtgtccgctggtccagcgtgccgtggtgtaggtgatggcggtggcggtgaggatggcgggcagggtccatgcgagggtttcgagcgcgttggtggcgaggatgccttggcggggcatgcccatgtgcaggtcgtcggctatttcgatgcgtcgcgcgcgcgtggccatgatggcgatggcgaacgcggcgatgggggtgatggcgagcatgctgcgggtggttcgctgccggtagcgggtgtcgaggtcggggttggtgccgagcatggtgttggcttgtttggtttgggtggcgggcgcggctccgggtatggcggtcgcggtggtgttgagcaggtcttcggcgtcggggtttgcggggttgatggtggcccagcattcgtcccattgctggccggcgttgatgggtgtgggggtgatgatcgcgtaggcgagtcgttggtcgcggctgtcgtcggcccaggggaagaccgcgctgatgtgcatggtgccctgggttgtgggcaggtcgtctccttcgcgcgcgtggagggtggcggcgagttggctggagatccatacgccgggttgggtttgctctcttgctccaacgccgagcacgttagcgagtcccggtgtcgcctgccaggcgtccagtggggccgcgggcatggcggtcagggtgatttccccgttgcttttgagcgcaccggccgcttggatgggattcgtggtggtgccgcctgtggtgccggtggtttgggtgaggtttgcgcaggtggtcgggtcgatctgcttgctgccggagatgatgtggatggcggcggcgctggtggcccattgccgtgattcgtgttggagggaagtaatggcggtcaggtcgaatacggcggttcctgctgcgatgagggtgaggatgccggcgcaggcgagggcacgtgtagtgccggtggcgacgttgcgccatacttcggacaggatggcggtcggtttcatcgtgtgtcgtccttggtgtcgatgttggggttcggattgtgccacgcgaggtcgatgacgcgggtgcacgcggcccgggtgttggggtcgtgggtggctatgacgacgatcgcgtcgccttgcgcgagtccggtgagggtggaatcgatgtcgttggcggtgcgctggtcgagttgggcggtgggttcgtccacgaggaggaggtcgggtttgctggcgatggcacgggcgagcatgagacgctgtgcttcgcctccggatagttcccggaactcgcgtgcggcgactttggtcaggtggaacgtgctcatgatggcgatggcttcgtcttcggcctgcgtgcggtcgatgccctggccgaggagtggttggacgacgtggtcgatggcggtgcgccgtggcatgccgtgggggttctggaacacccagcgcacgcggttgacccggctgcgtcggatggttccttcggcgggcggctcgaagccggcgatgatggacaggagggtggatttgccagagccggacggcccgcacaggccgacggcctcgccggtcgtgagggtgaagtcaaggtcgcggaacagccaggggccgtccgcgaaccggtggcccacgtgctcgcccgtgaccgacggtattccgccggccgcgggccgcgcggagtcgattggccgtgtcggcacggggtccgcgaccgtttcgaggggcaggatgctggtgctcatgcgcgtcctccttgtgtcagtgctgcattgcggcggggcattggatgtcgtcgagtttgtggccgagggcgactttgccgattgtcgcgtcggcttgttcgggttggatgagcgtggcgccgagggcggagccgatgacggtgacggggatagcctgtttgccgtcgggcgagacacaggcgcgggtgccgttctggccggtgatggcggagggcgggaccttgatcgcgtcgatgggttgttcgagcgcgagggtggcggttggtttcttgccgccttggtcggcgagggtggtcttgtagccgtcgctggcctggatctggtcgaggaatttctggtcgctgatcctgccgtcggtcttgtcgaggctggtcttgacgccgaagagcgtgaacgtgcgtttgccttctctcaggttcgccggcgtggggaaggtgatggccgtcagttggccgccggtcttcatgatttcggcaccgtccgtcaggttggtgttcagtccggccgtgcattgggttggtgtggcggtggtctggggcagccatgccacgtcggtcggtccgatcctgccgtcggggttgcgatcgccggcctgcgagagcagctggttgacgccgtccttggtgcgccacccgtaggtgccgttgccttcggcgttgtagccgaggcgggcgagttcctgttgcagggcgagcacgtcgggcccggtgtcgccggtgccgatctcgcggtagaggggcgtgtcggtgtgcagggcgatgacgggtttgccgtccacggacagcagtcgtttgccggattcgaccgcttggccgggcatgcacagggtttcgctgacggtgccggcggcgcgcgaggtgagcgattgttccgcgctggtctcgaacgaggcctcgacggtccgttcgtcgtcgaactgctggcggctggccgtgacggtgtcggggctcgtggccgcggacagtccgtcgggtgtgggcgtggggatgacgagcgcggtgacgagcacgcccgcggacagcatccccaggccggtcaggatcagcggggtcaggattcgtgttttcatgtggtcgtttcctttcgtcggatgcttgttcgtcagccgatgttgacggcaaggccggctccggtgaagcatgactgggcggcgtccgacgaggcgtcgaacggcagtcctttggacgctccgtccccgttcaacgcgttttcgagtttgcgtccggtgtaggcgtcatcgacgaggctgcttttcttcaggcattccacggcggtctcgtacgggtcggccaggaggcccgggttgccctgctggagctggtagagggattcgatgatcttgctggtaccctcggagcaggtgttggatgcctccatgtacttgttcacttcggcgtcggtcgatggcaccggcgtcacaccggtggtctggtagagtccgttggacagtttgcgggtctgttcctgccacccgttctcggccatgcacgcggtctgtttgtcgtgcgcggtctcgtagtcctcggcgctgatcttgccggtcttcttggcccgttggagcacgtcgcgctcgaactggctgagtgtgtccttggcgaggtactggtcgaacagggcgctcatgctcggcgcgattctggtgccggatgtctgcgcgtcgtcggccgtgttctggttccagggcgttgagcatgccgtcagcgagacgagcagtcccatgcaggacagcagcgcggcggccctgcgcagcgtttcttggcggaggatggatgatgtgctggtggtcatggtggtttccccttccatcggctggtgcggtctgtttacttggtgttgaagtcgggatcgtggtagtcgggcaccttggcttggcattccttgatggccttgtcccggtcaccgtccgtggaccccgaggacaccgagccggagccgtcgccggtccattggagcacgacccagttgccgtccatgatctgcgcgggcactcccgccgccgtgagacagtcgcggtatcgttcggcggcctgtttcgaggccgggttcgatccctgcggcgcgtcgccgccctggctgtcggtcttcggcgccgcgtcctgcgacgtcgtcgcggagggcgcgccggatgactgcgacgactgctgttggccgcatgccgacaatggcgcggccagcgcggcggccagcgccgcggccgccgacagtctgaatacggatgtggttcgcatgtgttcctcccttgcatgggttcgccgctgccggggcgatgctttggcccggcggttgccggacgatgcccattacagccggctctccgtgtgcgatgggtgcgtgtcgcgctcacctaacgcacacccacgccgagcataatggagaacgcgaaggcaatcgcatgaaggccatgaatcggaatcggaggcaacgaaatatggcgaggatcctgatcgtcgaggacgacgccgacttgtcggccgtgctggacgactgtctcaggcacgaggggtacgcgaccggactggcaggcaccggcgtcgaggcgctggacctgctctcacggggggaatacgacgtgatgctcctcgaccgtgatctgcccgtgctctccggagacgaggtcatgcgcaccgcggacaggctgcgcatccccgtacgcacgctcatgctcaccgcggccggcagcatcgaggaccgcgtgcacggccttgacctcggagccgacgactacctgcccaaaccgttcgcctaccccgaactcctcgcccgcatccgcgcgctcctgcgccgaggcgacgccgacgacgcgcccaccgtgatctcacggggacggctgtccgtcgataccgtgagacggctcgcctacgcggacggccggcctctcgacctcgcaccccgcgaatactcgctcctggaggaactgctgcgcgccgacggcgggtggatcaacacccgcgcccttctcgaatccctgtggccgtccgaggcgcacgaccagcccgacctcgtcaagaccgccgtctactcgctacgacgcaaactgcccgacccctcgctcatcgcctcatcgcgcggagagggataccgcataccatgaccgacaccgacacgaccaaccggccggccgggcacgccgcgcgcccgcgcaaacccgccagcttccgcatccgcctcgccgtcaccgtcggactgctcctgctcggcatgctcctcgccgtgatcctcgtacagaacatctcgctcgactgggcgttccagcatcaggtggacaccatctccacaggcagcaaccagaacaccatcacgacggaacctgccacgccccaggacggggttcccggcacggccgactcatgtaacgcggatccctgcgacgtgaccggtgccattctctctccgaccgccgggcagaccggcacggagggcgtggtgctcaccgtcagggacggcgtcgtgcaatggatgcgctacggatcgctcgccgtgttcgccgtatccgcgctcctggccgtgctcctcgtctggaacctgtcgggcaaactcaccgcacacctcgactccatcagccgccagaccggccaactcgaccccgaccatcccgccgggcgcatcagcctcgatcatcccgacgccgagaccgccggcctagccgacgcgctcaacacgatgctcgaccgcatcgagcaatccaacgaactgcaacgatcgttcatccgcaacgccagccacgaactgaaaacaccgatcacgaccatcggcaccagcctcgaagcgctcatggcccaggaccggttccccgaggacgtcaaaccagccatcagccacgccatcgaagcgaaccgcaaaagcagtgaactcatcaacagtctgctcgaactctcccgcatccagaccgtgcccgacaccagcacggaaaccgtggaccccgcccgcatcgtacgcgacacgctcgaaacccaccgcgaacaggcacaggcacgtcacctgcgcatcgacgccgacggactcgccgcataccacggccccttcatcgagacgaacccgcgctacctctcgctcgctgtggacaacctgatacgcaacgccatcatccacaacaccgaccacggcgccatcacctgcaccatccacgacgacaagcagcacgtcaccatcagcatcaccaacaccacaaaacagccggaccaccccgaagccacggccgacctcatccaaccattccaccgaggagacgcaacccgcatggccaaccaacctggccacggcctcggactatccatcaccaaagcctgcacagacgccatcggcgccagcctcaacatcagccgtcccacagccgatgtattccgcgccggaatcatgctaaatcgacatatcggcatgcccattagatgatttattcacgataagatatccttactcatactgactgattagtcaatgaatgcgaggatatcgatgaatagtgcggaacggagacgtagaacgcgcgaagccctgctcgaagccgcggctctcgaatttgaaacacagggatatgcgaagaccacattgcagggcgtcgctgaccgacttggtttgacgcgtggcacagtgctgttccattttcacacgaaggaagcattacgggatacgcttatccaatggtgcgatgagcgcctgtgcgcaaaagtgtcccaatgtagcggcagaagcgatttcgctcggattctcgccgcgattgctgacatgcactatgaagatgcgcgaatacgttccggattgctgctgcatgaagaaaaagcccgagcggagaacgcggggcacatgaagtgggaggaagcacttgaactagtcttgtttgggcagctcaacgacgcccatgacagcattaaggcaggagccctaatcgatatgtacatcgccgtcataaggtccgatcgatggaagaataagcagcagctccgtcaggctcttgatttctatctgtccctaaccggtctgagcaaagcggctgaactctctgataacaggctataagggaatcgtatggcaagaatcaacgattcttgttgactgactagtcagtcaatgcatattatgggagcaccaaccggaaaggttggacaacccaaggaggaaggaactcccatgaacaccaccgccaaaagcaaaatcggtctgctgggcaaagtcggagccgtcgccgcagctgcggcagccgtgatggctttcaccgttcctgccgctaacgcggccggaacctacgctctccatgccggcacggactatgccttggcccagacttggaccaacggaggaacccaaggtcgctcctatgcgcagcatggtaggcgcgtagcaagcaccgtgtggactctgcagtccagccgcgcatacgccgatgacgggtactcgaccagctatcacgctcaggtctggttccgctgaatttgactctatgaatcgaggaggcgagctttgctcgcctccttctttattcgtcctgatcaaaacggtctcaccgcacataaaggacaacgagaccattcttgtccgccgctattccgccggctttccctgacgatgggtgtcaacggagaccgttgcctgtcgggctccttgatcgtcatcagaggaggccgtcgtggatttgttgaatcaggtgcttcagttgttcgtcaggttcgccaccatcggcggtgggctgtggctggtgtggggcgccgtcacattcggcggcggcctgaaggatcataatgggccgcagacgcagtctggactgtggcagatcgtgggtggaggcatgatcatcgcggccgcgcagattttcaacgcggtggctctgggctgagctgattcggggcctgccatggaggacttcatcgtagccatgctcaacatgatcggcggcggaggtgccggttcgatcacggccgggctgttgtcccaggcgccggagacatggaatcccgctctttaccagttggcggtgaacgtgcatggagtcgccgtcaagcctctgacatcggtggtgctcgcggtcatgttcacgttggagctggcgcgcaactcgacgcgcattgaagcggatcgcgatctgggtgcgaagatcgtggccggcaccatgttcaagatcgcgttggtgttcatcgccgtgcagaacgccggtctgttcatcggcatgttcaaccgggtcacgcagttccttatgcagggcgtgtcctcgcagatgtcctttgaggtggcgggcgagggtggccagttgggcgatctgatgcgcgaccagatccgtgatgccggggtgatggggcaggcggcgttgttctttctgctggtgatcccgtggttgttgtcccagttggcgtcggtggtgttcacggtggtgctgtatgtgcggttcatcgagttgtatgcgttgacggcgtttcagtcgttgccgttcgcgtttctggtgcatgaggataccaagccgatcggcgtgggtttcttcaagtcg

SEQ ID NO: 37 - DNA, 12519 bp, Unknown
  R30_18m  MAG No. k141_12340
cgcaaggcctgaccggccattccggacacacattctggccgacctcgagttccccgcccatacaactcgaacaggaggaacgcccaccgccacaaaggaacacaagccaaaacggacacacattttggcctataaccccggaatagtttccttgtagtgtcttcagagggtgttcggcccgacgatgtcggtggcacgttacgtggtgcatccggtaggccaaatcggtgcaccactctatgtctgaagggagccactcatgacattcgatgatcgatcggcgtgccatatgagaacgtctccgtcgattccgacggtgtttacacttttacatcttcctacaccttcttacacttttccttcaggtcgaaaagtgttggaagtattggaatcattgggattgaagaccattttcctttacacttttgctcttttcgcgggtctattgcacaagggatcctcaaaatgcgttggaatccttggaatctttgggattcagggatccggaggaatgcgatgagcgggcgccgtaggattcggttcggtcgtgtccagaacctctagggacggaaaacgcaggtatgtggaggcacgctaccagccgccggtatgggcctatgccaaatggcccgatttgccgaagcattattcgagacgattcgacgccgactacaccgcaatggcggaggcctggctcgctgacgttgaacggcatataagactcggcgactgggaaccgcccagaatcgtggtgagcaagacgagggcgacggcgggaacatcatcggggctatcctcgccggccatgacggcagacggtcacgcatctatcacactgcggtccatcctgaagcgcgcggcatgggtgttggctcacttttggccgggcatgcggtcgaggcgcttcgcgcactcgggttgccgaaggttgccgtcggcgtatatgcggacaacaaggccggcaacgacttctgggagcagcagggctttgcaatccgagacgacctggtctatcgcgagctttccttgtaaggtgtccacccgcaatccggcttttgcggtcggtcattcactcgtttcgttgccgcacgcacatttcatgtcgacgatctgttgactctgaatcgtgattcaaatgatccgggccgtatggcctatggattcgatgtcggtttgcttcaatcgcacagacgtctgatgcacacaagtccgcaccggatattgaaacactcagtcttcgatgacgctgggatcggcgccacttttttgcgtggcggccgcttatgaaggtgcatatgccgtcggagacggtagccttcctgccgtatgacttcctcatagatacaagcagcggaccatgggactacggtctccccagttctgctagatgtatagattgtttttaagaaaacatagaaagtatgggagatataggtaatcgtgacacctcttgtcggcgtgaaggtacggaaaagcgcaaatttccttctggcgggctttgagcggcgaacagagtggtacactcattctgggaattggtagaaagccttgctgttgctgggtttgtgggtttcggtagatagagtctccatgatgtgcgcagacctcatgatgcgacgggctcgcctgttcgggccgctgctcgcctccggctgcgaggtgctgatctcgggggaggggacgcgccgcgtgcgattgttcgacggtgagcgggccttggtcgggaacgccacggccaaacgaagaagggaattcgcggagacgcgtcttttggcccacgaggccttacgacgtatcggccatgacgggcccatactcaaaggttcggatggtgaaccgctctggccatccggcatcgtgggatctctgtcgcattgtccgtcgctgtgcgtcgccgccgtggcgtcggcggaaagaatccgtgccgtgggagtggacgtggacgattcggacggattatccgacgggatcatgcggttcgtgttctcttccgaagagctcgcatcattgcgtatggcctcctcggtggaacgtagggcggccttctgcgcgaaggaggccgcctcgaaggcgttgtccgcattggacgggacgggggacttccgtaaggtatccgtgagcctgaaggcggatggaacgttcgccgctgtgagacgggatgtggcgttgtgcggccaatggcgattctacgatcggctggtatccgcgatggtcgccattccctcggagaccgtctgaggggcgcggacccctcgaatgagcagccggagcagaaaggaataggccgcatcgtcatcgtcgacgggcgtatcatgttcgggtcgtgtctcgaattggacgaatccgtgcacggcggaccatatggaccatgcgatgaggtgcgggtcatccctccggatctttcccgcggcctgcccgtagcgcaccagctcggtcatggcggcgaggcatgcctccgaagcctcgcccgcatgccatcgccacaacagggcgtagatgccgggcgacgccttggcgtgcccgcggtatacgactcccgcatcgtagagtctttgcaggggatcctcggtggtgacgcgcaggagcttctcccgtaacgtctggaaactgtcgtcgatgagagcgttgatgacggcctgcttgtcgccgatatgccggtagatgctcgcgggggacacatccgccttttccgagagaagccggatggtgaaggcgtcatagccgtcctcttcgatgattcgtttcgaggcgtcgagtatgaggcccctgatctcggtggtgggcgtccgctggctttttgtcgttttccgaatagtcctcatatgcttctccgcatcatcccgccgttacggatgaaaaacgccatccggcccgtaggtccctgcaccgtcccatgatgggtggggtcgaaggtccagccacgctcttggaccgcgcctcgatgggtgtgatggctggtcccaccgtattgagattgccaccgagccaagacatgtcgggggacgctggccggcgcgggcgtggaacatgccgacgctctggctgccgtgaccggggaaacatgccgcgatgtcaccgatggggttgcgtgtgtcctccgctatcgcgccggccgtcaggagacggtccgtcatatccgtgtccttgatccgtgggatccgtccgtcatctttcatgatggatgttcctttctattgggggagattgcctgaatcgtgtttgggaagtgtgatccagcagagcagcgcgaacgccaatgcgagggcgcaggcgatccagcatgccgcatgcgcggcgctcatgaaactggtcgagacggactgctccacggtctgtcggatacctgccggcaggtgcggaaggatcgatttcgcggccatcaccgaatcctccgctgctttcgcgatggaagacgggatctgcagtccggacaacgagtccgagagctcgtcggggtagacggaggagatcgcggaccccatgacggcgacgcccagcgtgccgccgatctcacggatcgtgtcgttgacggccgatgcggcgccggtcgagctttccggaacggtgctcatcagggcgtccgtggcgggcccttgaatcagggcgatgccggccgccatcagggccatggtgggtacgaccacgaaccagtagctgcaatgggcgtcgacacgcgtgaccacgaacatgctcgccgacaggaacagcagtcccgtcgagacgaccgaccggtatccgaaacgtttcgccaattgcgtggcgagcggggcgaccgccgccatgaccaccgcgaagggcagcgtcgcgaccgccgtctgcaatgcggtgtatccacgcaatgcctggaaccattgggtggtgatgaagatgaagccgaacaggcagaagaacgcgacgcagatcgcgcaggtgctgctcgtgaacgtggcccttcggaacaggccgacatcgatgagcggggcgtgcgtatgcccctcgaccgccgcgaacaccgcaagtatgatcagggccgcgcagatgccgcctatgaccggccaggagagccagccgtaagtcgggcgttcgatgatcgcccacaccagcaggcccacgccggccaccgataacacggtgccggggaaatcgaacctctcggaacggtacgcccgtacctcgggcaccgccaccgcgatgcaggccagcgccaccacgccgatgacggagcacacccagaaaatggaattccacgcatagtgctccagcaggacgccgccgatgatcgggcccagggcgatgccgacccctgatgtcgccgcccacaggccaacggccaggctacggtacctggagccttcgaagatgacgatgattgatgacagcgtcgccggatagatcagcgcggcgcagacccccaacaccacgcgcagcgtcaccagctgccacagggcccaggagaaggccgtggctgcggagaccacggcgaatcccgccaatccgacgagcagcatccgtcttcttccccatcggtcgctgagtttgccggcgggcaggagcagcgccgcgaaggacagcgtgtaggcgtccaccacccattgcaggtccgtggacgaggcgttcaacgcgtcgctcatcgtgggaatcgcgacgttgacgatggtgttgtccatcacgaccagcagcaccgccagacacagggcggtgagggccagccccctgttcccggaccgtgcgtgtctccggaccggcatgggggtgggaatcaacgaacgttcagattgcatatcaatgctctcctactgtgtaacaatgttatctacaaatgaaacaatactcctctctgtggggggatcgccaccatccgtcaacgaggcatggaagtgctccgcgtgcggacggacccaccgtcggcgccatgaaccatgccgccgcccgtggcgcgggaacgggaaggccatgcggcgtcgcccggggtccgcaaaccccatggcatgttccgggcccgggaatgccacggccgatgggtcctccaaaatcagcgccgtccgcttccgggcggagagttcgtgcggtcgctttgatgacacggccgccgtcccgtcgggactttcagcatcacccgattaccggtccaaccctcacggcgggaccatgacccgtcgaacttcaatgaggaaagcgccggccgaccctttgccggaaaacgcgaaccgtcggcacgccccgctgaagcgacgccgacgatggtttcggatggtgggcggtcccgatcgcccgatccttctcgatccaccgcccggcaatcgccgaacgcccgtggcggctcacgatggttgcaggcccatgcccatccaaggcgttggccgcatcctgcaaaaaaccgggtccatcgtacgcccgaacatgcgaatctccgtacgccggcgtggatatcccgcataggcgggatatccgtcggggagattccactgacagcgtgaccagtcactcatgcgccggcgggagacgctaccatgaagacgcgaatcatgtgaatcatcacgcaaaggagcatgacgtgaactatctggaacatcgccgacagcacaaggacgcgctatgggaacagctacgggaaccacatcaagccccacataggaagcgtaccgataaagcggctgacggcatcgcaggtgcaggccgcgttcaagtcgtacgtaattcctgaagcggaatagccacatcgcacactggttttctctgaattccgagattctttctctgaattcagagataaatctcgggattcagagaaaaccgttcaagaatgatctgcgtatctcattcaacgtactgccgcataccgcacgttgcgtccactgccgaccttcttagcgcgtccttcaaggactagttttcgcaactggtagtacgcctgattcccctcaagatgcagcaattccatcacatcgttttttctcactgatttctgttcatgcattaacttgatgatcagttcgggataccgcaccctatcgatgtctgattggcgaacgtaatccatcgccctaccgctgcgccgatacactttcgcacccaacatatacgtgcggcgagctccaacgccagcgctttcaacaagccccgcctccgtcagctgccccaatacggtgcgcagacgctggtcactcatgtccagggagcccgacaacacatcaaagccacaacgacgttcactcttgagcttgtccaaaataagcagaccatcgagagacatggacttgccgctgcgctcacgttcctcggccagcagttccacaaacgccttgtcgggcacactacgaggcaacagcaccgacactccacgcctgttggacctcgaataatcaggcagaggacgaccatagttcaaagcaccctcgaatatacggtcgatgccgcgccccgtacgttcggcgagaccggttcgcttcaacgcatccatcaggcatggattgcggccatgcggttcggcggtaagcagattatggatgttgatgccctccacgaacccgccgggattggcgatggtaagccccgcatcatccaactgcacgcgcacacgtcccagcagggtgtagtcacgatggccgaaggcgttcaccagcgcctctcggaacgcccgatggtcgaattccggcaccatcattgagaacagaccgatggatagctcgacgcttggattccaaggagagaacatgtcgttgatttgctcgatggtcttcagcaatggtccggcatagtcttggttgactttgatatccgtaccagacatgacttggaaagacgcctgatgagtcggaacgaagcgtttcagagactcccccttgcccagcagcagcaaaccggtcagcgtcggcatggtcttgccatcgacggtcaccgtcaattgcagggatttctccagctcctcatcggtcagttccaacaaattacggtcactggattggtaggtgccgataatccggcgcagacggtcgcgttcaaggggatcgaaatcatcacgggtcgcatccggcaccggctgcgcggaaaagtccaaacgtcccaaatcggacaggcgcgtggcgatctcgtacgggtacatcggcacgctctccggcgtaccatccaccttcatacggcgtcgcaacaccttgcccgacttggtcgagaccacgctgcgggatttcggcacatcgatctgcatcaccggcgtcttctccgtcccgacgatctgcgcacgagcggaaaccggaggaaccgtacgggagtagggagtagagtggcggcgtcgaccgacgcacgttctcgccataatttcaatcccgaaaaggagcctcgtcgcaaccatgacatcacatcttgccgaagcaggacgcacgttggttccccgcaaggaagacagatacggtctgctctcccccgccttggtggtgctgacgttcgtcgccgggctggtggacgcgctgagctacctgtcgctggggcatgtgttcgtggccaacgtgaccggcaacatcgtgtttcttgggttttcgatcgcccatgcccaaggcttcgtctggtggacgtcggcgctgacgctcgtctccttcatggtcggcgcgcttatcggcgggcgcatcatccggcgattcgaggagaaccgggccaagcatctgttggtttctacctgcgtgcaggcgtcgttcgtactcgccgcgctaatcggtgtctatcttttgaaccagctcatcaccggccccgcagacgatgcgcccggcgtctcctcgattgcacggcttgcacagaccacccaggcctcacaggcctcacaggcctcacagccgagcctgaacttccccaccgcacggcacatcgacctgcacatcatcctgctgatcgtgctgctcgccccggcaatgggcatccagaactccaccgcccgcaagctgtcggtgccggacctgcccaccaccgtgctcacgatgacgctgaccggcgtcgtcgcagacgcttcggcacacggccaccagcagtcgaagctcgggcggcgcgcggtcgtaatgctggcgctggcgtctggcgcgctgaccggcgcgcttctgcaggcgcacggacacgagaacatcatcttgatggtgatgctcgggtgtctgctggcggtcatcgcgatgatgattccgcacgtccattcggatgcgccgtgggtcaccggccggcaatagcctctggcgcatactttcgccatatgagacaaaaacggccacgccacagcgcaaccagtaggaaacgcccggcaatctcggctctcctcgatatgttggatacccgttgtttgaaacaggccctccgcaagatacaaacaggggcagtgagaagtagaggtaaatatgactgacgcacagcaggcgaacggcaaccagccagaatcccagaaccaagcagaagcgacggcacagccgcacaacaagcgagtgacgaagtgggtcgctatagtgattgccatcgtggcggtggcgattatcgccgcggtcgcggtgttcggcgcccgcgcatacagcgcgtctcagtacgatagcgcagtggccgcctgcgccgccgcctcggaagacgtacgtaacaccaccaacgactacaacaacttggtcaatggcgatgctgcagaagccgccgctctgaccaaggcagacgtctcggacgcctccgctctcgacgcgctgtccaaggaactgaccgtggaactgccgacgtacgaaggctgcgtggccgacgacaccaagggctaccaggccgcgaccaagaaactcgaacagcaggtcacgtggtaccacgagcacaccacgtcgctgcagaaggctgttgacgccgtcaacgcggtcaagaagtaagacgaggtcggtctccctcacgttttcaggatcggacagcgctcaagtcgcggcaacgcgcgatgtcggccggtcctgcacggcccgaaacggcagaaatcccgcgccccttacgttcggacgcgggatttctgccgtttttgagtcacggattgggactatagcccagtctttgccccagagttgtctattcaggattaccctctcggccgtatctcatgagcaggacgtgtaaaaacaaaaaaccctcgctaatccgcgagggttattggctggggtgcctggactcgaaccaagaatggctgaaccagaatcagctgtgttgccaattacaccacaccccaatttggcttggcgtagcaactccgaagagttgttcgtcgtacccccaaccggatttgaaccggtgttggcgccgtgagagggcgtagtcctagaccgctagacgatgggggcatattcagtttttcaaccggctgcgaggcgaaccgcgcaacagatagatatattacgcgctaccctgctctcacgcaaatcccggcgtgtcgcgccattttccgccgttctgcgggaacaccccatgcaacgcgaaagcgggcatccgtatgtacggatgcccgccatgcgtcacgctcccatcatccgccggcgtgcggtggacgacgcatcacagatgcgcccgcaggcccttgagacgggcgacggtgatcggcttgccaacgatctccatcgattcgaacagcggcggggagacacggcgtccggacatggccacacggaccgggccgaaggcgagacgcggcttgtagccgccctcctcaaccagagccttgttcagggtctcatgcaggttgtcggtcttccaatcgacctcatccacgccctcgagagcggcgatggcggcatccagcacttcgccggcggaatccttgagctgcttcttggcgtcgtccgcaggctccagatactcctcggtggacagcagggagccgaccatgccggcgacctcgcccagcaggcgcacgcgcggctggaccagcggagcggcggcggtcagcacctcacgctcacggtcggtcagggcatcccagttgtcggcggaaaccacaccatcgcggtgcaggtacagcaccgagcggcgcaggaagtcctcgggctcgagcatacggatgtgctcggcgttgatggagatggccttgtcgatgtcgaaacgggccgggttggccttgacgtcacgcacatcgaacttctcgaccatctcgtccatggagaacacgtcgcgatccggcgcgatcgaccagccgagcagggccaggtagttgagcaggccctcgcggatgaagccgttgtcgcggtggttgaacaggttggattccggatcgcgcttggagagcttcttgttgccctgtcccatcacgtacggcatgtggccgaacaacggcatctccttggcgatgcccagctccatgaggtaacggtagagcacgatctggcgcggggtggagctcaggaggtcctcgccacgcagcacgacgttgacttccatcatcgcgtcgtcgaccgggttggtcagcgtgtacagcgggtcgccgttcgggcgcacgatcacgtagtccggcacggagccggccttgaactcgatggtgccgcgaatcagatcgtcgaaggcgatgtcttcatcaggcatcttgatacgtagcgcaggcttgcggccctcggcgcggaaggcggccttctgctcatcggtcaggttgcggtcgtagccatcgtagccgaactcggccggacggccggcggcaaggttgcgctccttgatttcctcgggagtggagaaggactcgtaggcgtagccggcttcgagcagcttggcggcaacatccttgtagatggcggtacgctcggactggcggtacgggccgtgagggccacccacatcgatgccctcgtcccagtcgatacccagccaacgcagggattcgagaatctggttgtagctttcttcggagtcgcgcacggcgtcggtgtcttcgatacggaagatcagcgtgccgccggtggcgcgagcttccgcccagttgaacagggcggtacgaatcatgccgacgtgcggggtgccggtcggcgacgggcagaagcggacgcggacgttcgcggggagttcgggtttggtgttttcagcatcagtcataatcccctattgtgccgcgcgcgccggacgcggagagcagcgctcctcgctcttttgcttcgttattgacatttcgggccaacaccatcccaaaacggccattttccaacgaaatctcttttgcctgtctttggtagtgcccgatatcttgatgcctgtcttcacacctgttttgacacctactttggcgccatccacacgcccgcacgcaaggcttcgacaccatttggcgcaactgttgagttttttacccaaacgatggaagaataggagtcgacgcaatcgtcttatgaaaggggaatcaatgaccgatcccaacaacgtgccgttgccgcagatgcccgcgcccaacggtaccccggcccagcagaatcccagcacgccgcaatacggcgcacctgctccagcccccgcacagccagattatgggcaattcaacgctccggcccccgcacagccggcctacggccagcccgcatacgggcagcccgctcccgattcttccgcacccggcgcagcgcccggtgcaactcccgcctatggtcagcccgccgccgacccgtacgcggcgaatgcggctccgcaattccccgctcccggcgcggctcctacctacggccagcccggaccggacgccaacgcttacggtcaggtgccacccgcatacaaccagtacgccgctcccactgccacagcagccgtgccgttgaacaagccgtattacgactgccccttccccgaggcattcctgcgtttttggaagaagtacgtggtgttcaagggccgcgcatcccgcagcgaattctggtggtggatgctggccagctttgccattcaagtcgtgctgtcaaccctcgtggatgtctccaatgaccacctgtcattcctctcttcgctgtggagcctggccatactcgtcccgagcatcgcactatccgttcgccgtctccacgacatcaacaagcccggctggtggcttgccatcttctatggagccgtgtttgctggcgcaatcctcatgattgttggcggcggcgctgcactcttcggcgtcctcagagtctggggaagcccctctgacagcggctactatgccacagccgcagcgggtagccttggcatcctgttcatcggcgcgataatcgcggccgcagcgggcattgtctacattgtgttcatggctatgcccagcaagccggaaggcgcacgtttcgacgatgacgcagtagctgccccgatgcctcagggtgcttacggcgcaccgtacggcgctcccgcaaccccggacttcaaccaggccgctccgaacttcgccgctccgaacgcacccgctcctgacttcaaccagccagccccggcctatggtcagccgaccgcaccggctcctgactacggccagcccgctgtgcctacgcccgattacggtcaggtaccggttccgcagtacggccagccggagaccccggccccgcagtacggccagcc

SEQ ID NO: 38 - DNA, 5804 bp, Unknown
  R30_18m  MAG No. k141_13133
ccgccatcttccacttcaagtggtcgaatcgcggaatcagccggcggatatcatgtgccgcgtcgttaccagtcaagccgggaaattcgttgcagacggtcagtcgaccagcgaattgatctggatgacatggtcgcgctgtgggccggtgccgatcacggagatacggcagccggacagatcctcaagacgcttgacgtaatcctgacaggtcttcggcagatcattgaagtcgtggatttgggaaatatcctcgtcccaacctggcatggattcgtagattggtttcgccgccgcgaattcggactgatcagtaggcatatcgtcgcggcgttcgccgttgacatcataggccacgcacaacgggatttccttcaggccggtaagcacgtcgagcttggtgagcacgatgtcggtcaggccgttgacctgagccgcataacggttcaccaccgcatcgaaccagccgcaacgacgcggacggccggtggtcacaccatactcatgaccctgcgcacgcagccactcgccatcctcgccaaacagctcagtcgggaacggtccttcgcccacgcgggtcacgtacgctttggaaacaccaatcacacggctgatcttggtcgggccgacaccagtaccggtgcatgcgccgccggcggtcgggttggaggatgtgacgaacggatacgtgccgtgatccacgtcgagcatggtggcctggccgccttcgaacagcacggtcttgccttcgtcaagtgccttattgagcaccagcgaggtgttggccacatatggcttcagacgttcgccgagcttgagcagctcgtcggtagtctcgtccacgtcgatcggacgacggttgtacagcttgacgagcatctgattcttctgatgcaggctcgcctcgaccttgtcatgcagatgttcggcgttgaacaggtcgtgtacgcggatgccgacgcggttgatcttgtccgcgtaggccggaccgatgccgcggccggtggtgccgatcttatgcttgccaaggaagcgttcggtcaccttgtcgagcgtgcgatggtacggcgcgatcacgtgcgcggcttcgcttaccagcagtcgggagcagtccacgccacggctttcaagaccgtcgatctcctcgaacagcacttcgggatcgacgacgacgccgttgccgatcacgggggtcacgttcgggctgatgatgccggagggcagcaggtgcaacgcatacgattcgtcaccaacgaccacggtatggcccgcattgttgccgccattgaaacgcgcaacatagtcgaccttggtgccgataagatcggtcgccttgcccttaccttcgtcgccccactgggcaccgatcaaaacaattccaggcatgttgttgcacctccgcgcgtatgcgatttcgcctcaaagccttacccaaggccttacaaagactaccccgcgccctctaccggatatctgccggatatgcaccgatcagccgttgaaactagtcagttccatcgttttcgtctcatacaacgcgacacacccaccgtgccgcacacgccgcatgcattacacggcgcgtgcggcatcacactacttcaacgccttgcccgcgctgccaagctgcctgcaagcctccaccacgcgtgcggccatggcgctttccgcttcgcgcccccacgaacgcgggtcgtacatcttcttgttgcccacctcgccatcgattttgagcaccgaatcatagttggagaacatgtgaccggccaccgcacggctgaatgcgtactgcgtatcggtgtcgatgttcatcttcaccacgccgtagctcacggcctgcgcgatctcctccggcgcggagccggaaccgccgtggaacaccagggcgaacggcttaccgggagcgacatccagcgagtgcgcggggtcgggcatttcgccggccttaatcgcgagcgcgaccgtggtctggatttcgtcgagcagttcggggcgcagtttcaccacgcccggtttgtatgcgccgtgcacgttgccgaaggtgaaggcggccatgtagcgtccgcgctcaccaaggccgagtcgttgcgcgacggcgatgccttgtgcgggcgtggaatacagtttgtcattgatttcggcgctgtgtccgtcttcttcgccgccgaccgcgccgatttcgatttccagcacggtgtgcgcggcttgggatttgtcgagcagttcttctgcgatgtcgaggttttcacccagcggcactgtggaaccgtcccacatgtgtgactggaaggtcggttcctgaccgtgcttcacctgttcgacttcatggtcgagcagggggcgcacccattcgtccaaatactgtttggcgcagtggtcggtgtgcagggcgatggtgatgttggggtatttcgccgcgacttcgtgcgcgaaggctgcgaaggcaagcgagccggtgacgcggtcgttgacgcgttgcccggagaagtaggcggcgccgcctacggagacttggatgatgccatcggattccgcctcggagaaaccctggagtgcggcgttcagggtctgtgtgctggtcacattgatcgcgggataggcgtaaccgccgcggcgtgcggcgtccagcatttgcgcataacgttccggcgttgcaatagtcatgcctccattatcgcccgaccctatcccacttgtcatgtgacaacattcgccatctttccttccgttttcccgaccgtccgctccatatccaggtcacccgccccactagggccatataccaagcgttctcgtctcatatcccgacacttgcgggaccgaccaataaacatggcgaaaccattgcgatcgttccatcggaagtcatagaatatccaccggattgcgcgacgaagagcccaaccgggtgttcccgcacgggcatgccgccgcacgtagatgttgcgaccaatacccgcgaggaggcttgatgcaccaggttttcgccatcttccttcgagacgtgaaacgcattctgaagaaccctgtggcgctcgtcgtcacgctgggtgtggccatcatcccatcactgtacgcatggtgcaatatcctcgccaactgggacccgtacgcgaacacgggcaacatccaagtcgctgtggcgaacgaggacaagggcacaacctccacgctggtcggccatctcgacgctggccagcagaccgtcaaccagcttaagaagaaccatcagctcggctggcgtttcgttcccaagcagcaagccatcgaaggcgtggaatccggcaaatactatgcggcgatcgtactgccggaagacttcagctccagactaatcggcaccgtcaccggtaaaggcgaccgaccgtcgatcacgtactacatcaacgaaaagctgaacgcgatcgcgccgaaaatcaccgatacgggcgcgaccacgatcgacgagcaaatcaacaccactttcgtttccagcgtggccgacgccgtggcgaaggaagtgaaggaggcagcgggagaaaccaccggcagcatgaaaagcgcgcaaagcgacgtcatcaacgatctgaccgacaccatcaaccagctcgaaaccgtccaacagcagctgcgcgacacccgttccacgctcgacaaggccctcaccaccatcgattcggccaaacagtccaacatcgcgctcgcctcggaaatcaccaactcgcttgacaccgtcggcaaggcgtccgacttgctgagcgagacgcgcacacaaaccgaacgattctcgaacacgctggtcggagcgctcgacaacggcagcacgcaactgtccggcctgcaggtcaacgtgagcaatgccaccggcaccgtgctcagcggactgaacaccacgcaggacgcgctcgaccaagtgtccagcaccatgcatcacgtcaacaccaccaccggcaatgtgctcgacggcgtggagaaggcgttgcaggccagccagctggatccgaacagccaaacgtataaggatctttccgcgcagctcgccgaagcccgcaaacagctgacgttccagcagcagcgcatcgacgccttcgatcaggacaccacggctgcgatcaacgcggggaagaacaccgcgaacgggttcaacgacgatgtcaccacgctggcgaagaacggcacggcgtcgatggcgagcgcacgcacgaccatcaccggcacggtcatgccgaatctcaacaccgggttcgacacactcagcctggccaatgggtcgctgtccggcacgcttaccacgctgcaaagcacgctggaacagggcaacgggctgctagaccagttgtcgcgcaccgtgacccaaacgaacaccaccattgctggcacgcagacgcagctcgccaatctcgccaaacagctcaacaccacgcgcaccgatgtggccgcgttgagcagttcggcgatgttccagcagctttcccaagcgctcggacttgacgcgagcgaggtcggctcgttcgtgggcgagccggtgcatttgaacgaacaggtcctctacccggtcaaaaactatggttccgcggtcacgccgttctacacgaatcttgcgctgtgggtcggcggattcgtgctcgtcgcgatctacaagcttgaagtggaccgcgatgagacaatccgcatgtacacgccacgccaaggctatatgggccgttggctgctgttcgtcacggtcggatttctgcaggcgatcatcgccacaatcggcgatctcgcgctgggcatccaatgcgagcatccgttcctgttcatcctcgccggcattttcgcctcgttcgtctacgtgaacatcatttacgcgctcgccgtggcgttccggcatatcggcaaggccgtcgccgtgattctggtgatcatccagattccgggcgcggcaggcctctaccccatcgagatgatgccggaattcttccgccgtctgaaaccgttcctaccgttcacttacggcatcaacgcgatgcgcgggccgatcggcggcatgtatgccaaccattattggatcgacatgctctcgctgttctggtatctgcctgtggcgctgttcatcggcttggtggtccgcaagctggcgttgaacctcaaccgcctgttcgacaaccgtctggcggacactgatctgatgatcaccgaacataacgaaggcacggtggaaccgttgcggctcaccgagaccgcgcagcagatcgccgaggagttccccgaactcgtccgcagacgggcgattcatttcttccgcctgtacccgcgcctggtgcgttggggattcctcgcgctggcggtgctgccgttcgtgttcctgctgttgctattcatcacgcgcatgaagctcgccatgctgctcggttggatcatttcgatcatcgccatcgacacgtatcttatcgtggtggagtatctgcgcgaacggtatgcgaattatctgggcgaggaagcgatgagtgcggaagagttccgcagcgcgatcctgcacgagaacctgctgttccggccgggcatgcattacaagccgatgcatgccgtacgcacgaggctgtatgaggctgcgcatggtggttcggccggacatgcgcctgaacatgcggctggaaacgcggacggaaatgctggcaggagtctgcgtgaggaggaggacgaacagtgaaaataatctggggcatcttcaagcgggacatgtgccacgccacccgcaacgtgatcgccgtgatcgtctcgatgggcctggtggtggtaccggcactgtacgcctggttcaacatcgcggccagctgggaccc

SEQ ID NO: 39 - DNA, 14054 bp, Unknown
  R30_18m  MAG No. k141_13827
aaggagcccgcaaggccagtacgagacgttcggcatccccgcaagatacggcaccggcatcgactggaacgagttccacacacgggtcgaatggcagtcgaacgactagaccgccggacacacattttggcctataacccatggcccatgtcttagcccatggcgaacgcatattgaacgatgattgcccccatatatgacatgtggcaccgtgcgatatacacacgatgccacattgttcatgcacgaggcatgcgaatcacagtccggtgacccacagcaaggcgcaggtgaacggtgcactcatcaaaatggaatccacacgatccatcacaccgccgtgtcccttgagcagatggcccatgtctttgatgccgatatcgcgcttgagcatggaagcacacaaatcaccgaacgtgcccacggcgccgatgagaatacccgccacgatcggcacccaccaacgagtggcccatttcgaggcatcatacgtgcatgcgaatacggcgaatgcgccagccatggcgaagagcatcgagccgatcaggccctcaacggacttcttcggcgagatacgcgggctgagcttgtgcttgccgagccaggcaccggcaaacaaaccacccgtatcggagagggcgggcaggaacaccagcatgatggcgtgtgcaatcggatgcccattgaaagtcagcgagatgatgatgcagctggccagcaacggaatgtacaacacggtaagcacggacacagccacatggctgagccgggaatgatgctgttccccgccctcatgattgaacgaggattcgaggcgcgcgctggcatccgtgttggacagtttgccggcaaccgccagagataggcggttgccgacgctgatttttgcgctggccgcgatggcgaccagaataatcgacacgatgatactcagcgacatcgtgatgagatggtacggggaataataggtggcgatgagggtgaaggacgcgcacagccacagcatgaacaccgggatgtgcaggcctacggtggcgaagtccaccctgagctcccacagcgccagaatcatgaacacgactaccagcagcacgaagaggtcgacgctgagcagcaggcacgcgacaataaggatgaccagtgccgcgcctgtggcgatggcctgcggcatgttgcggccggtcttcttgttgatccggtcgagcgtctcctcggcctcttcatggagttgttcgttgcgttccataattctccggacctggtctgaatcagacctccatgatctccttctgcttggtctccagcagagtatcgatctcgtcggtaacggacttggtgaccttgtcaagatccttcagcaggcgatcgccttcgtcctcacccatctcgccgtccttgacggccttgtcgatggtttccttggtcttacgacgaatgttgcgcacggcgaccttgccgtcctcggccttgcccttggcgagcttgacatattccttacgacggtcctcggtgagttccggcatggtcaggcggatgacgttgccatcacggttcgggctgatgccgaggtcggagttgcgcagggccttttcgacggcaccggcctgggaagcgtcaaacggggtgacggacagggtgcgcggttcgggaacgccgatggaggcgacggccttaatcggggtgggggcaccatagtagtccacggtgatgccgttgagcagggccgggtttgcgcgaccggtgcggatgccggagaagttttccttggtgttttccacggtcctggccatctgttccttggcctggtcgataagagacatattcactccttgtgtgttggtgttcgtctgtgttgttcgtctatgaacgcttgattcgattgtaggcgtttgcggcttactcggccacgcgcgattcggcggtggagaccagcgtaccgatttcatcgccgacgagggcgcgggtcacgttgcccggctcttcgaggccgaagacgcggatgcgtttcttgttgtcgcgggccatggacagtgcggaggcgtccatgacggccagattgtccacgagggcgcgattgtagctcagggtttcaaaacgcttggcgttctcgtccctgcgcgggtcggcggtatagacgccgtcgacgccattcttacccataagcacttcgtcgcaatggatttcgagggaacgctggatggaaaccgtgtcggtggagaagtacggcatgccggcaccggcgccgaaaatcaccacgcgacccttttcaaggtgacggatggccttgagcggaatatacggctcggcgacctgtcccatggtgatggcggtctgcacgcgggtggcctgcccctcctgctccaggaagtcctgtagagcgaggcagttcatcaccgtgccgagcatacccatgtagtcgccacgggaacgatcaataccggcctgctgcagttcggcaccgcggaagaagttgccgccgccgaccacgatggccacctgcacaccctgttgtacagccggaacgatttcctcggcaatgcgacgaatcacatgggtatctatgccgaccttgccaccaccgaatgcttcgccggacaacttgagcagaactctgcgcggcttgtcgctatcagtcatattgtgcctttctcaaaaccgaaagtgcgaaattatccgtagacaagcgtatcggtttacgacgacaccccctagcaacgacacccttggaatagcgaaacgccatccgattattgaataaccggatggcgtttcgttgaaattacgctaagcgcgtggagtaagccttaggctcactcctcttcgcccttgccgacctcgacacgagcgaatgcggtggcgttgccaccgacttccttgaacaggtcgccgacggtcttggacggatccttgacgaacggctgctcgagcagcacgacttccttgaagaaagcgttgagacggccttcgacgatcttcggaacgatcttctccggcttgccctcggccagggacttctcggtggccacgcgacgctcggactcgaccacatcggccggaacgtcctcgcgggtcagccacttggcgcccatggcggagatctgcagagcagcttcgtgagccacggcggcgccggccttgtcggtggcgatcatggcgacgatgctcggcggcatctcggcggacttcttgtgagcgtagacttcgacgtgctcgccggagatcttggcgaactggccgaccttgacgtgctcaccgaacagggcggcggcctcctcgacagccagcttgacggtggtgtcgccagccttggcctcgagcagctcgtcagcggagttggcgtcggcgtccacggcgtagccgagaacttcctcggtgaactcgacgaacttcggggtcttggccacgaagtcggtctcggagttcagctcgacggcgtagccggtctcgccattggcggtctcgacgaccttggaggcgatggtgccttcctgagccttgcggccttcacgcttgccggctgcggcgatacccttggctcggatgatttccttggcgcgggcgacgtcgccttcggcttcggtcagagccttcttgacgtcgagcatgccggcgccggtgtcttcacgaacctgcttgatcagtgcggcggtaattgctgccattgattattctccttgagaaattttgcttacccatgaacgatgggaagcgcttattcaggcacttcccatcgtagagcatcactcggccttgggggcctcggcggtttcgccctcggcggcagccggagcggcggcttcagcggaagcctcggcaggagcctcgttggtcaggagttccttctcccaagcggccatcggctgctcggcggcttcgccctcggccttgttggcgccggagcgctccagcagaccttcggcgacggcgtcagccatcaggctggtcagcagttcgatgccgcggatggcgtcatcgttggccgggatcggatactcaacggtgtccgggtcggcgttggtgtcgacgatggcgacaaccgggatacccagcttgtgagcttcctcaacagccagggcctccttggtgatgtcgacgacgaacatcgcggacggggtgcggttcatgttgcggataccgcccagctgcctgttgagcttgtccttctcgcgctcgagcaggaggagctccttcttggtcaggccggagccgtgcacgtcggtgaagtccatttcctcaagttccttgaggcggttgacgcgcttggagacggtctggaagttggtcagcatgccgccgagccaacgctcggagacgtaaggcatgttcacgcgggtggcctggttggcgatagcttcctgagcctgcttcttggtgccgacgaagagcacggtgccgttgtgggccacggtggtcttgatgaagtcgtacgccttgtcgatcatgtcgagcgacttgaacaggttgatgatgtggatgccgttgcgctgggtgaggatgaactgcttcatcttcgggttccaacgacgggtctggtggccgaagtgcaggccagccttcagcatatcgctcatagtgatctgagccatggtattactacctttcattgtcggttcttgcctggccatgcgcacctgcgtgcagctgctccccccggtttcacgagttgtgcagccgaccgacacaggccgtcgcgagcatgacgcgaatttgttgtgtgccggttgacaatattgggtggttccggacgccagcgactgcgtccgttgccgggtggcacacaagtttcaaggatagcacggagccggtactaagaaaaacaggctcccctctctgaggggagcctgtcgccataggcgactgaggggagttacgggcggtaccggcagaaccaccctcagtctcactacgttcggcggctcccgccagcgggagccgggtatggactacttcgcctgacgattgcgcatgtaccgcagggcttcgcggcgttcttccttttccaggcgatccaaatacacgtggccgtcgagatggtcgcattcgtgctgaagcatacggcccatcagcccggagccctcgagcacgacctcgttgccgtccaggtcgatgccacgcacgcgagcgtagtcggcccgacgggtcttgtaccacaagccgggcacggacagacaaccttcatcgccatactgctcgccggacttctcctcgagtacggggttcagaacgtagccgaccttgccgtcgatgttgtaggagaaggccctcaggctcacgccgatctggttggcggacaggcccgctcggcccggatcgtccacggtttccagcaggtcgtcaaccaggcggcgcacggccggggtgatttccttgatctcatcgcagggggtgcgtaggactgggtcgggcacgaccctgatctcacggatggccacttctcgttactcctcgttcttctcgtcagccggccggtccggcttgctgccggtgtcagcggcattgtcggcattgtcggcggaatcgccggtctcgccctcttcgggttcggccttcgacttcttgatcttctccgacacgctagcaatcgaatcagacacgctggttttcatctgttccgaggcctgtttgacctgttcggacgcctgcttgaccgattcggaggatttcttgacggtctccagcgtgctgtcgatgatcttggctgtggcgggcagcggtttgttggatggcttgggcgcatacagatcctcttcgatgacggtggcgtagcgctgcaataccttgggacgcaccactttcatgctcggggtgagcgtgccgtgctcctgactgaattcctcatccagcaccgcgaatttgcgcacggactcagcgcgggagacattggcgttggcctggtcgatgtactgctggataaaggcacgcaccgcgtcgttgtcgctggcctcggcgagtgtcatgtcggcattgaggccctgaccttccagccaggaatgcagcatttcggggtcgagctcgataagtgcggacacgaacggcttgccgtcgccgactactactgcatgagccacgatcgggcaggtgtcgatgacatcctccatcggggcggggctgatgttcttgccgccggcggtgatgatgatgtccttcttgcgtccggtaatgaaggtgaagccgcggtcgtcgatacgacccagatcgccggttttgatccagccgtcggcagtcatcgtctgtgcggtgagttcgggctgcttgtagtagccaaggaacacgttcgggccggtcagctcaatttcatcgtcttcgccaagacgcacgcccatgccaggcccaggcttgccgaccgaaccgacctcgttgtcgtcctcccaattgacgagcatcggagcggcggtttcggtcatgccataaccctggatgaaggtgatgtcatccatgccgttgaagaagtgggccaaatccacgttgagcggcgcaccaccgcaggccagccatttgaggttcggtccgagagcggaacgaatggatttgcccaccgtggccatgtagaacgaatggcgcatgcgctcgatgaacgaatggccgcggccggcctgctcatccttgctccacttgacgaagtgcttgaccgactgggcgaagatatgcccctggatgccggcaccagccttctgcgaggccgcgttatacaccttctcgaacacacgtggcacgcccagcaggtaggtgggcttgaagctgcggatatcggcgagcagtcgcttggcgtcgggaatgtatccgaccacgccgcagccaccgatgcacacgtactggatgtagcgggcgaagcagtgcgccagtggcaggaacagcagcagacggttgtcgtcgtacagcatgccacgcagaatctcgtagccgttaagcacgatgtgcgtgtaattgcggttggagagcatcgcgcccttgggcttgccggtggaaccggaggtgtagaccacggtaagcagatcatcggctttgatacgagcgatagccgcatccaacgtctcatcggatacgccatgcccgaagtcagcgacagcgtcaaggccatcggccttgaaattgaacacgtatttcatgcccggatgattgacacggatctgctcaagcgtctgtgcgcgctggaagtcgccggcaaaggcgatggcgggatcgacttcctcgacgatgcccgcggtctgacgggcggaatcggtctcatagacgggcacaaccacagcgccgattgccgcgcaagcgaaatcagccacaccccactcatagcaggtaggcgagtaaatcagcaccatggtgccggctttgacgccaagtcccaacaggcccttggccacctcgcgtacgcgggacagcatttcagtagctgtggcgccgcgccattggtgggtgttgtcatcctgccattccgcgatgatgtcatccggcgtgcgagctgctcgtttggccagcagcgagtagacggtgtcgtcatcggtggtgacatatctgggttcttctacatgttcacgcatggtcactactataggcgaaccagcctatgacacggcagaaccgtcttccgctgccagcgtaggaatcggtgtgcgggcggggccgtctggtcagcccagatcggcatagatgcacatccatcgagaaccgatgaacttcagtttgaggttgactcgcagattttcctggccgatggtcatgaataccgccatttccagcgtgtccttgccggtgatcatgccgtcgatcaatgtggggacagtgggcagatagcagaatttcgctttgagctccggatgagtgaccatgtgggtgccgagcaggtattgcatggtttgcagccgttccaggcatggttttgtcatggctctgttgagatgtgcgacgctgagtctgccacgtatcgcgtccgccgatgtgcaggcgatgcggcatgcagccatggccatggaatgacattccttcgcattcagcccgcctatgaatgtgggttggatatgataccgcaccgggcgatccgacagctccacaacgatgaatccgtcataactcggcaacggcccgtactgatatgtgccgtggaaaaatcccgaatactccatgatgaccccttcaagcccccttgcaactcaccatcatcggcgagcgtttgtactacaacatcacgaaaggcgcgccaagtcaaacgacttgagcgcgccttagggcaagctaagcctcctgcatggagggcaaacccccattttcagggggggtaatcgggattatcgtgcggaatacgggttgaccaccatgccgcaacgctggaagttcttcacgtcgacgtagccggtggaggccatcgcgcgcttgagggcgccgatgaagttggtcttgccgtccgcctggtggctcggtccgaacagcacctgttcgagcgggccgaccgtgccgaccgtggtgcggtagccgcgcggcagcgtctggtggcgggcttcggaaccccagtgggtgcccttgccgggggcctcggtggcgcgggccagcggcgcgccgagcatgaccgcgtcggcgccgagggccagggccttgacgaagctgccggagtcgcccatgccgccgtcggcgatgacctgcacgtagcggccgccggattcgtccatgtagtcgcggcgggcctcggccacgtcggcgatggcggtggccatcggggcctgcacgccgatggtctggcgggtggcggagaccgcgccgccgccgaagccgacgagcacgccggccgcgccggtgcgcatcaggtgcagggcagcggtgtagttggatgcgccgccgacgatgacgggcacgtcaaggtcgtagatgaacttcttgaggttcagcggttcctgaccggaggagatgtgctcggcggagaccacagtgccgcggatcacgaacaggtccacgcccgcgtccaccacggtggagtagaactgctgggtgcgctgcggggagagcgcgccggccacggtgacaccggcggcgcgaatctcgtgcagacgttgcgtgatgagctccggcttgaccggctcggcatagatctgctggatacgctcggtggcctgatcggccggcagcccggcgatttcgtccagcagcggggtcgggtcctcgtaacgggtccacagaccttccaaatcgagcacgccgagcgcgcccatcttacccatggcgatggcggtggccgggctggtcaccgaatccataggggcgccgatcaccggcacatcgaactcataggcgtcgatctgccaagaggtggagacgtcctcggggtcgcgggtgcgacgggaggggacgatcgccacatcgtcgagtgcgtagccgagacggccctttttgcccaaaccgatttcaatttcctgagacatggttgtaagcctattgcccgggtgggacgccaacaaggtcgtttcccacggaccggacgattgcttcaagtcgttacaaacatgcgctatgactaaatcatcttcacaccatctatcaggaggaagcatggccaaaatcaaggtcgaaggcactgtcgtcgaactcgacggcgacgagatgacccgcgtgatctggaaggacatcaaggatcgcctgatcctgccgtacctcgacgtgaacctcgactactacgatctgggcatcgagcaccgcgacgagaccgatgaccaggtgaccatcgacgccgcccacgccatccagaagcaccatgtcggcgtcaagtgcgccaccatcacccccgatgaggcccgagtcaaggaattcggtctcaagaagatgtggaagtcccccaacggcaccattcgcaacatcctgggcggcacgatcttccgcgagcctatcgtgatgagcaacgtgcctcgtctggtgcccggctggaccaagccgatcgtcgtggcccgtcacgcattcggcgaccagtacaaggccaccgatttcaaggttccgggcgccggccagctgaccgtcaccttcactccggacgatggctccgagccgattcagcacgtggtctacaactacggcgaagacggaggcgtggcccaggtgcagtacaacgtcaacgattcgatccgcggtttcgctcgtgcctgcttcaactacggcctgatgcgtcattacccggtgtacctgtccaccaagaacacgattttgaaggcctacgacggccaattcaaggacatcttcgctgaggtgttcgagaccgaatacaaggacaagtacgccgaggccggcctgacttacgagcaccgcctgatcgacgacatggtggccagctccctgaagtggcacggcggttacatctgggcctgcaagaactacgatggcgatgtgcagtccgactccgtggcccagggcttcggttcgctgggcctcatgacctccgtgctcatgaccccggacggccagaccgtcgaggccgaagcggcgcacggcaccgtgacccgtcactaccgccgctggaagaagggcgagaagacctccaccaacccgatcgcctccatcttcgcgtggaccggcggcctcaagcaccgcgccgatctggacggcacgcccgaagtccgtcacttcgccgagacgctggaaaaggtcatcgtcgacaccgttgaaggtggtcagatgaccaaggatctggccatgctcatcggcccggacgaaccgtggctcgacaccgacggcttcatgaacgcgctggacgagaacctggccaaggctctggccgagtaaatcatcgaacacatcgtgcggacctacatgggtcatgtcatgtcgccaactgtcatgattgtcgtgcttcatctggaatgttcctcagcacgacaatcatgacagttgttcgatacacgcgcgaaatacccctaattgttcccggatatgtggcgatttgtccactggtccgggactttttcgtatacggcctactagaatcgtgattcagtttgttttcacgcccgcttgaggaggtttcgccgcttatggtgttcgcacgccgctcaaccaccctgctcgccgccattgtcgcatcctgcgcgatggtgctgtcactgaccgcgtgcacctcagacaataagaccgttgtagatggtcaaaccacggtgacgtccaattctgccggcggcgtggccgtgttcacgccttcggacggcattacgctgaatcagcagacgccactgaacaaatgggcgaagctggtgcccgacctaaccaaggccctggtcgacgccggtttcaagaaaggcgatatcgatcatacgacgtccgactcgttggacaagcaaagccgcgccatccaagactttgtggtcgatcatctttcgaataacaccacggacgattccggcattgccatcgcgcccgacaacatgacattgctcgtggctccagtagtcgaggccgacgcttccactcgccaatacggcgattacgtcagccagaacctgagcaccaacgatgccacggatgagggagctacttctgacggtgattcttccgaagacagctcttccaaagatgactcgtccaacactgagagcgacggcactgcatcggacgagcaggcgcaggccgtggaccggctggtctcatcgctcaagctggccaaggaatccggcatgcatgtggtattgctcggcaacagcatcgaggggtataggccggacgccttcgtcaagttctcggacgcccagaccatcggcaagctacaggcggaaaagatggtgtccaaactcaagttggataaggccagtaaagacaaccccaaatacattgaggtgctgctgccatacaccgccgtggacgaaaaaggcaacgccaacgattccacgttcgcccaagaggcgttccgtggtatctggcaggtactgggctcctactatcagaagggcgttgtggaaagcccttcaggcaccttggacggcaaatccacggaaaacgattggcaagccgtggcctacgatgccgccaaggaaggctccactgcgaaagtgcttgacaagcgtctggcaaaaaccgacgggcagtccacactcacccgtattgatggcatcatcacgatgaacgactatatcgcctccgaggtcgtcaaggaattggacgatctgggatacaccggctctgccgccgatatcaatccgcagatcaccatctcgggcattgtcggcaatatcaccggcaagaaggatctcagccgcgacgcagtgccggacccgatcaaatcccctgaaaacgacaacgcaaacgactcatccagttccgatgacgatgcggataaggacacctccgcttccgacaaggaccgtgactcgcaatggcctctggtgaccggatacggcgcgtacgtctcgaacatcccatccatcgtcaatggcaagcaatggatgaccggcatggaagacagacagaccatcgccacggatatcgctcaggcctgcgccaggctcaacaagaacgaagcgctgaattccatgccttcaatcaggaactccgaggtaggcggcgtgaagaagatcccgaccatcaacgaaccgttgctggctgtcagcgccagcaatctcaagtccgcgctgatcgcccccggatatatctccttggccgatgccggtctgtgattcatactcgtcacgccgctagccgcctgcgatgcctcttccgtacggccctgttccggccgacaaacattgctgaatcatgacggcttcagtacgatttttcgactccccgcatattgctgtgggtcaagatagtcggccgttcctcgcttgaggccccaatgcaggcaacggtcttcgcaatggtccgagttgccctcaacgatgcctacgggctgtctgcgggagatcgtatcccccaccgagagctcggtaacagccggttcgaatgtcgacgtgacacctccacgatgccgtacactcaccgcatctttgccagctactttgccagcaaaactcacggtccctgcctgtggtgacagaatcacggtaccttgctccgcagcaagatccacgccacgatgacctggtgcccacgggttgatcggccgctcgaactgttgctcgacccgtggatcgtcgaccggccagtcgaaccgggattcgcactgattgccattgcgccacgccagatcagacatatcggtgaaatcctccaccgtgtatgccgcatctccggtcaccgcagtatccgcatgcgcaacatgctgaggcgtggatgccagtcccactcccaaggcaagcagcaggccgataacggcggccaacgcgattatggcatccatacgccgttgccgttcctgagcccgctgacgcgcctgctgacgccgcctgctggcacgtcgggcttcgtcgcgacgccaatcaaacaacagtggtgcattcatgagattcctccccatagtgtgagtgtgatgcgattccggcttctttgccggtgatacccaccttgaggggtccgaaacaggatgtccagccagaacgacctatgtggttccagcttccgaagttatccacaatgaaatttcgcgtgacagtatcgccgcatcgtcatcatgttgtatgagtgggtattcgatgagtccgattctgcggaattcagcgcgacatgccctacacgcatgtaatttgctttttcgtggcaagcatgtaagatatgtgacttgtgcgcgagagaaatctcaaacacagcagatattcctgcgtagctcagttggcagagcatccgactgttaatcggacggtcgctggttcaagcccagccgcaggagctcacctgaagccaccggcgtgtcgccggtggcttttctgttactcattccctgaagctgcttcattcacgtgagaaaataccggtcggcggtaccacgatgcgcgccgatcgccattcaaacgaggacagtcatggaccgtcacgggttcgcccgctacgagcccttcacgattcagaaaccctacattattctacggaatctgtcacttctgcagattcggcattccggccttataccagagcaccgcgataccaacacgttctttgac

SEQ ID NO: 40 - DNA, 22313 bp, Unknown
  R30_18m  MAG No. k141_15565
accaccacgacaggcaatcaggcgaggaatgaactggcaatcattgactataaagaagtagtacaaacacgctcttgagttctcaaaccaccaccacaccagcaagacaggaaaccaaccagaagaaggaacccgccgcgccgagcggcaacaggtgaataacttacacgcatgtttggattcgcgcaaatcgaggtgcgcaaaagcctcaggaatcgttgcaatcacacggttccttcggcgtgtcgcaaacagcctatttgcgctgttctgataccagaataatccgttttgcattgccgatgcgtaacaaattcatgcgttcaccggcgtgttgcaagaattcgattgcgtgaccatccaggttcaccttctcgcaaccggtcatcgcatatgcaaaaagggacttccctttacgggaagtccctttcagtagctattgaagctcgctagcctcaggccagggtgttcgggtcaaccggaacgcccgggttcatcgtggaggtgatggtcgccttggtcaggtaacggcccttcacggtggacggcttcagacgcttgacttcgtcggccacagccttgaagttctcgtccagagcggactcatcgaagctcatcttaccgatgaggaagctcaggttgccgttcttgtcgacacggaactcgatcttgccgcccttgatgtccttgacagccttggtgacatccatggtcacggtgccggtcttggggttcggcatcaggccacgcggaccgagcacacggcccagacggccgaccttgcccatcatgtccggagtagcaaccacggcgtcgaagtcgaggaagccgccctgaacctttgcgatcaggtcgtcatcaccgacgatgtcggcgccagcctcggtggcctcggtggccttcgggccacgggcgaacacgaggaccttggcggtcttaccagtgccgtgaggcaggttgacggtaccgcgcacgagctggtcggccttacgcgggtcgacgctcagacggaacacggcctcgacggtctggtcgaagttgtaggcaggcatgctcttgagcagagcgatggcctcgttggcggtgtagaggttgttgcgatcgacgcgctcagcggcttcgcggtacttcttggaacgctttaccatctgtccttctccttatcagtccgtaaccgtgatgcccatcgagcgagcggtgccctcgatgatcttcatgccggcctcgatatcgcgagcagacagatcttccatcttggtctcagcgatttcgcgaacctgcgccttggtgacagagccgaccttgtgggtcagcgggttctcggtacccttctcaatgccagcagccttcttcagcagagctgcagccggcggggtcttgagaacgaaggtgaaggaacgatcttcgtaaacggtgatctcgacagggatgacctgacccatcttgtcctgcgtctgggcattgtatgccttgcagaagtccatgatgttcacgccatgcgaacccagagccgggcccagcggcggggccgggttggccttgccagcctggatctggagcttgatcagcgccgagactttcttcttgggagccatattatggttcttctttctataacgcggttcgaatggtcgccgtcctcaggttcggctgtctgccatcatgctcggtcttgactcgttatttatccgtgcatgctgtaggcaatcggcctgtggtcggtctcctcccgcaacttatattgctgtgctgtgctagcgggtcttccctccagacacaagctttcctattatgcaaatccacccggacaacgcaaaaagcccgaccacgatggtcgggctctgcaaagtttggggttaatccagcttctgaacctggtggaagccaagctccaccggcgtatcgcggccgaagatggacacgagcacggtgagcttttgggtggtgggctccacgtcggaaacaacggcggccatggtggcgaaaggtccatcggtgacggtgacctgatcaccaacggcgtaggagacttcgaccttgcgcttcttggcggcggcaggcttgtcgccagcggccttgagtgcctcggaagcgatcatcggagccatcattgccacgacttccttgcgggagagcggggctggatccttggtcgggccgacgaagccggtcacgccttcggtttcgcgaacgatacggcgagcgttctcatccggccacatacgaatcagcacatagccaggaacacgtacgcgggtgatgatcttcttacccttttcggtgtgcttctcgacttcttccatcggcacctcgacctggaagatctgatcttccatgccgaaggaggcgacgcgggactcgatgttggtcttcacacgcttctcatagccagagtaggtgtgcagcacataccacttgccatcaagggaacgcagggacttggagaattcgtcaacggcctgctgaccggcatcggtttcctcggcctgctcggattcgttgacttcttcctcgtcctcatccagagaaacggtctcggtctgagtggaagcaacagaagcggattcagtcacggccggagcggcggactcaacatctgcattgtcgacggatgcgtcagattctgcggaaaggtcagcaaccggttcagccggggcagctgcctcatcggcagcagcttcggaagcctcgacaacaggctcctcagccggcacggcgtcgagattctcgagattcagttcatcactcatgcgttgttattcaccttaggttgtgcggatcagccgaacacccacagcacgagcttgcccagaccgaagtccatgcccgtgacgagggccatcagcagcagcacgaagataaacacagccagagaccagaagaacagttccttggcagtaggggttacgaccttgcgaagctcgtcgatgatctgcttgataaacagaccgatacgcatgaagacattcggcttgactaccttttcgctgttgttcgtcttagccattctgtacctcgcgtcagctgcttgattattgaaaacttggcagggaaggcgggactcgaacccacaacctacggttttggagaccgttgcgctaccaattgcgccacttccctaggtgaaaatccacctcggcgtgcattccgtagagaacgcttcgccacggcgaaaccgccaagttgttatagtaacggctccggtggattatcgcaaatcgcgtgtcgcgcgcgtggcatgtgcgcggcacacgactcttctcagttagcccattccttgaatcgacgcatgccttcggctaggtcttcgtcggccagtgcgtaggagaaacgcaggtaaccgggagcaccgaaggcctcaccagggacggcggccacgtgggcctcatccaacagtgcggcggcaaaatcagcggacgtatcggacacagtgccgttgggccccagcggcttgccaagcaaagcggtgatgtccgcaaaagcgtagaacgcaccggtcggagtcgggcagttgacgccctcgatatcgttcagagcagccacgatcgcgcggcgacgtgcatcgaacgccttgcgcatctcatgcacctcgtccagcgggccagccacggcggccagagccgcacgctgggagatgttggccacattggaggtcatatgcccctgcagcttggtggcggccttggccacctcaagcggcgcgaccatccagcccacgcgccagccaggcatcgcataggtcttggccacgccgttcagcaccagcagctgcccgcggcattccggcacggcggcaccaatgtaggtggtgcgcgcgtcgtcgtagttcaggtgctcgtagatctcgtcggagataacccagatgtggtgctcgacggcccaacgaccgatcgcttccacggtttccggcttccagacggctccggtcgggttgttcggggagttgacgatgattgccttcgtacgctcggtacgggccgcttccagcgcctcaagcgagggctcgaagttcacgtcggcaccggcgaatacttcgaccggcacgccacccgccaatttgacggcttcaggatagctggtccagtacggagcggggatgatgacctcatcgccatcgttgagcaagatctggaaggattcatacacggcctgcttgccaccgttggtcaccacaacctggtcggcggacacctcgtagccggaatcgcgcagcaccttagccgcaatcgcttcgcgcagctcgggcaggcccggcgtaggcgtgtacttgtaattctttgggtcaaggcaggcatctgccgcagccttgaccacgtttgcgggggtcgggaaattcggttcacctgcgccgaagccgataacgtcaagtccggcggccttcatggccttggccttggaatcgacggcgagcgtagcgctcggtgccacagtgttgatacggtcggaaagagtctgccattgcgccatagtcatggcttccatgctaaacctacagcacgaaaaatcgccagagccgcactatggtgatgggatctgtcgtgtgacagatcccatcagtcacacaagtacaagattgtcgcgatgaaccagtgggtgggcgtactgggggccgaggaaacgcttgagttgggcggtgttacgcccgagcatctgcggaatttcttcggaatcgaagccggcgaggcctcgggccaggtgttcgccgctttcggcatcgatccagaccggatcgccggcggaaaaatcgccatgcacttcgagcgcgccggccgccagcagcgaggcacgcccgccgcgaatcgcctggccggcacccgcatcgaccacaatagcgccgcgcgggtcggcggcgaagccaatccacagacgacgcgacgaaccgcgggccttaaccggtgcgaacacggtgcccaccggatcgcccatcatcgcagggcccgcgttcgaggcgcaagtgagcaccgtggggatgccggagacggccgccacgcgcgcggcctcaagcttggtgaccatgccaccggtgccgaccttggagccggagccggaaacctggatgtcgccagatgcatcgataacgttgggcacatattccacacggcgggagccgggctgggaaggcggtgccgtgtatagcgcgtccacgtcggtcagtagcaccaaggcttcggcccgcaccagattggctaccaaggcggagagtcgatcgttatcgccgaaacgaatctcgttggacgccagcgaatcgttttcgttgataatggggaccacaccaaggtccagcaatcggtccagcgtgcgttccacattgcggtactgggtggcacgaatcgtatcttcggcagtgatcagaatctggccgacgcgaataccgaaacggccaaaagcagtctcgtagcgagccataagcaaaccttggccgaccgctgcggtggcctgctgagtagccacgtcggccgggcgttcgtcaaagcccagcgggccgaagccggccgcaatagcaccagaggaaaccagtactacacgcccgcccatcagtcgtatttgggcaagggcagcggccagagcgtcgagcttgtccgggtcgaggtgaccgctcggctgggtcagcgagctggagccgactttcacgacaatggttccggctgctgcgaccatgcgccgcacctcggcctgactcggagtgctcatttattcctcggtttcaccatcttcgctggactcaccgtggccgaacagactggtttcgtcatggcgatcgtcgtcaacggtcgggtcggcccagtggccggccttgcgttcggccatcatcgcgtcgcgcacggcggcacgggcgtccatcatctcgtggtattgggcacgacgttcggcgttggagcggcggtgcgtgcgcgggtcctgttcctcaagacgcagatccttgcctcgggcaccgaggttggagccatcgagcatttcagcaccggcggagatggtcggatcccaatcgaattcgaccatacgggcaccacgaccgatgcgcacttcgtcgccggggtgagcacccttgcggcgcagctcgtcctccacgcccagcttggccaagcggtcggccagatagcccacggcctcgtcgttgtcgaagttggtctgcatgacccagcgctccggcttgacgccacgcacctcgaagaacacttcgccattgccgagttcgcggcgctcgaccgtgaactcaagcgcactgccgccctcatcagcgcgacgcggacggcggcccttggtctccaatggcttgataaccacgcgcgtctcctcttcggcctgctcgcggttggccacttcctcacgcatctcatgcaccagcgcagacaacgcgaagttgagctccttcagcccctcatgagaggcggtggagatctcaaagaccttcagcccgagtttctcgaactccggacgcacgaactcggccaattccttggcctcgggcacatcgatcttgttcagaatcacgatgcgcgggcgttcgggaatcgggatggcgcccaatggcagttcgagcttgtcggcgtagagtgccaactcgttttccagcgcgtggtagtcggacatcgggtcgcggtccggttcaagcgtggcgcaatcaatcacgtgggcgatgatttcggtacgttcgatgtggcgcaggaactccagtcccaggcccttgccttcagaggcgccaggaatcaggcccggcacgtcggcgatggtgtatcgagagtcgccggcgatgacgacgccgagattcggcaccagcgtggtgaatgggtagtcggcgatcttcggcttggcggaactcatcgccgcaatcagggacgactttccggccgaggggaaaccgaccaacgccacgtcggcgatggacttcagttccagaatcacgtcgcgttcctcgccgagttcgccgagcagggcgaagccgggggcgcgtcgggtcttgttggccagggcgatgttgccgaggccgccggcaccgccctgggcgacaacgcagcggtcgccctcgtggcgcaagtcggcgagctgtgcgccgggatgcttggctttgccctgttcgccgcgcgcctcaaagacgacggtgccgcagggcacgggcagaatcaggtcctcgcccttggagccgtccttattgtcgcccaaacccatggtgccgctgccggcgacacgatgcggcatgaaacgatagtcgagcaggctggtggcgttacggtcggccacgaacaccacggaaccaccgtcgccgccattgccgccgttcggaccggccaacggcttgtatttctcacgacggatgccggccgaaccgttgcccccatcgccgcccttgacatggacggttactcgatccacaaaatcactcatattgattaccttacaaaaaagccgcgtccttacgggcgcggcttgaaaaagcttgacgctatatcgctcaggcgatgacgtcgacaaccttgcggtcgcgacgcacaccgaacttcacggagccatcggtgagggcgaacagcgtgtggtccttgcccatgccgacgttgtggcccgggtggaagttggtgccacgctggcgaacgatgatgttgccggccacgacggcttcgccgccgaacttcttcacgccgaggtattgcgggttagaatcgcgaccgttgcgagagctggacgcacccttcttatgtgccatgattcatggtcctttctataactcaggcaatcgccgtgatcttgacgatagtcagcttctggcgatgacccttacggcgagcaacaccagtcttgttcttgtacttctggatgtcaatcttcgggcccttggcttcatcgttcacaacctcagccttgacggacaccttggccagatcggcggcggcgagggtgaccttgtcaccatcgacaacgagggagaccgggaattccacggtatcgcccttcttggcgtcgagacggttcacgaggatgacgtcgccaacctcgaccttttcctgatggccaccggccttcacaatcgcgtacattatcgttccttttatgttttggaaagctaccttgcctaacacgcaccgagcctgcggtcagacaccgagtttcaaatctacaccaccatgcggactaaatcaaatgatttttgcccgcgtgtcaagcacgacacacctgttactcttccgccgtattgttggcggcgacggcagcggcggcaatctgagccagtttggctttgacgtcggcgctggaaccagccggttcgggagcgggagcggtgccgcgaccgtgcttgttggttttgacgaacgggtcgccaccgcgaagcgcgtagggatcgtcgtagtcggccgaaacggtcggctgatcatgcaggatgaaaccacggcccttgcaggtcgggcattcctcggagaacgcctcgaccagaccctggccgatgcgcttgcgggtcatctgcaccaaaccgagcgaggtgacttcggccacctgatgcttggtgcggtcgcgtgccaggcattcgaccaagcggcgcagcaccagatcgcggttggcgggcatgaccatatccacatagtcgatcatcaccatgccgccgatatcgcgcaggcgcagctggcgggcgatctcttcagacgcctccaagttgcagcgcgtcaccgtttcttccaaggacttgcccttgccgataaagcggccggtgttcacgtcgatggtggtcatggcctcggtgcgatcgatgacaatcgagccgccggacggcaggtagacctgacgttccatgcccttacgcagctgggagtcgatggaccatttgtcgaacacgtccttgccttcgtgctcggccgggtcccacttctccagcttgtccttcaggtcgggggccatggtgtcaaggtattcctcgatacggtcgtagaccttgtcaccttccacgatgagcttgctaaagtcgtcgttgaagatgtcgcgcaccacgcggatggccacgtcgggctcgccctgcaggagtttcgggcgcttgccgtgccagaattcctcgcgcttggcgttgatgcgctcccactggcggaccagtgattcgagatccttgacgatggcgtcttcggatgcgccttcggccgcggtgcggataatcacgcccatgtctttcggggcgatcttggagacgatgttcttcagacggctgcgttcgcgctccgaaagcttgcggctcacgccggtcatgccaccggagggcacgagcaccaggaagcggccggcaagcgtgacctgagaggtcaggcgggcacccttgtggccgatcgggtccttagtgacctgcacgagcaccgggtcgccggacttgaacgccagctcgatgcggcgcggctgaccttcgagacgagcggcatcccagttgacctcgccggcgtagagcacaccgttgcgggactggccgatatccacgaatgcggcctccatgctgggcagcacgttctgcacgcggccaagatagatgttgccgacggtctgtacttcctgaatgtcggagacataatgctcgaccagaacattgtcttccaccacggaaatctgggtgtggtgttccttctcgcgcaccaccatcaggcggtccacgttctcgcggcgtgcaaggaagtcctgttccataagctggctctggcggctgcgctcacggcggttgtcacggcggcgctgcttcttggcctcgagacgagtggagccttccacatcggtgatttcgtcgatgtactgctgcttgcgggagcggcggaccagcggctgttcgctgttctgactctggtcgtcggtgccctcgccgttcttgccgccacgacggcggcggcgacggcgagtgacggtctgctcctcatcgtcctcatcacgatcacggtcatgatcatcgcgatcgtcacgacggcgggaacgcgtatcctcggcatcgttctcggcggtatcgtgctcgccgttggcaccggtttcgccgcgtgagccacgacggcggcgacggcgcgaacgggtgcgggtgacgtcggattcctcgtcgccctcctcctcggcaatcggcgagtaggcgatatcgtccagctcgaggtcttcctcaatctgctcgacttcggcggctgcacggcgctcctgggcgttcagacggcgggagcggcgcgaacggcgggagtccgaggtgtcgtcggcgtcgaaatcgtcgtgatcggcgttggtatcgccggacgcggcatcacgggaagcgtcacggtcggcggaggcgcggccgcggtcgtcgcgatcgtcgcggcgacggctgcgcggctgggcatcgtcatcgtcgtggctgcgcgagcggcgggagcgacgagacgggcgttcgtcggcgtcaacatcgtcatcacgagtgtcagcggtatcgtgcgcatccacggcggcgggcagcaccggttcctggaacagcagggacgtcatcggcttgccacggcgcacggtctcgtggccagagggcagggattcgaccgcgtcgaacaggcgctcatccggggtgtcctcgtgcgtatccgcaactgcacggcgagaacgacggcgaaccgtacggtcttcgtcatcatcatccatatccataggcgcacggcggaggcgggagcgaaccgggcgatcctcgtagtcatcatcgtcggactggcgggagcgagagcggcggcgaaccgaacggtcctcgtcgtaatcgtcatcgtccacgactgaacggcggcgggaacgcggggcggcatcgtcatcgaaatcatcggcactgaccgtgcggcgcgaacggcgcggacgatcatcctcgctatccaagtcggccactgcggaagcggcgcggcgcggacggcgcggagtctcgtcgtcatcatcggtatcgctggaagatgcggcggacgtacgacgggtgcgacgcggcgtttcggcggcatcgtcggccgtggaaacgcggcgcgtacggcggcgggttggacgttcggcggaatccttggaatcgctggattcatcggaatcgccggaatcggatgacttggaatcggccgcggtgctggcattgggaagcgcgggggcttcgaacagcggggtgcgttcctgcacttgcagttccagggaggcgccggcagcaccggtgccgcggaccacgcggcggccgccacgacgacggcgaacaggttcgacgggctgggaggcggcggcaggcgcagcgttcacggctgcagccgaatcggcattggatacggttgaattatcggttccgtcgttgacgaaaccttcacggttgtcagtgggcacaatgctcctcgcggcgcgctgcatcacgacgcctatttccaggcctatacgcttgactcacaccacgctctcaccgtggccgcgcgaaaacgcgccgcgtaaaggcaacttcgtctcaagtctgtcctgcgggtggcggacaccggcgcttgcgttgtctcattctcgagagccgcaaggggatcgacgccatctcgcacgctgatggttatgcagaaccaccatcctttagtatgccacatattttgtgcgggcgtggcccggcgaggctgacgttctctcggctcccctccctgcggtgacagctcccctcagagaggggagctcgagaggtgtcagaccagccagtcggtaagaattgcggtcatggcggccaggtcggattcgggcacctgctcgtcgtgcttgtgcgccagcagcgggtcgccggcaccgaggttgacggccgggatgccgagctgggagaagcgtgccacgtcggtccagccgagcttggccaacgggtcgcggccggtgcgctccttgaccagtcggaccagatcttgggcgagcggggcgttcaggcccgggcgcgcggaggggctttcgtccttcatttcgatgccgtagccctcgaacacgccgccagtggccacatgctcgccattgccgagttcggcaccggcatccgcgcccatcatcagagccttggcctcggccagcgacttgtccggggcgaagcggtagttgacgtgtacgcggcattcatccggaatgacgttcgtgcctttgccgccggaaatcagcgtggcgttgaggccctcgcgatagtcgagcccgtccacgttcacggtggccggctcgtaagcgttgagtcggctcaggatgtcggccgccttgtggatggcgttctcccccatccacgcgcgggcggagtgcgctgccacgccgtgggtcacgacgtcgaagcgaatcgtaccgttgcaaccgccctcgatgccgctgttggtgggctcgccgatgatggcgaaatcgccggtgatccaatcgggatgggcctcgacgactttgcgaaggccgttcttttcggcgacgacttcctcatggtcgtagaagacataggtgaggtcgaccttcggggtggtttccggcgtgcggccgtcgagcgtggcggcgaggtagagcatcaccgcgtcggaggccttcatatcggtggcaccgcggccccacagcacgcggtcttcgggatgagcgtgggcgatttcttcgcgaatcagcgaatcgccgggctccagccacttcggtgggaaattgtcgatgaccggcacagtatcgaggtgcccggccaagatcacacggttcggctcgccgaagtcggtgccggccaccactgtgtcgccgtgacggcggacggtcaggtgctcttgctcgttaaggaaggcctcgacctcgtcggtgaggggaccctcgtggtcggacacggagaagttctccatgatctgggtgagcaggctgttcagctgctcggcagtggatgcggtgcggttcaattcaagcgtcatgtgaacagcgtaccgcgtgggcggcgggcccagcacacccactacatgagattttgcggccgaatacatttttatgtgccacactggggtggcgaaagggaggattatgtcaggtctgatcagcgccatgcaaggcttctgcgttatcggcatcgtgattgcggtgggatatgtcgccgcacgaatgcgaatcggcgggccgtccgctcagatggtgctcaaccggttctccttcttcgtatcgagcccgtgcctgatgttcgccatcctctccaaggaaccgatcttcgacatcttccatccctcgattatcgtggcgttcttctccgccgtgctggtaggcgtggtgttcctggtgctcaaccgcatgttcttccacctgaacgccccggacgccaccatcggcgccctgaattcgctgtacctcaattccaataacatcggcctgccaatcgccacctacattctgggcaatccggctctggtggcaccgattctggtcatgcagcaggccatcttcacaccggtgggcctgacagtgctggacgtgaccaccaagggcaaggtctccatcaaggaaatcgccaagcagccactgcatcaaccgctgcttatcggttcgctgctgggcattgtggtctctgcgatttccgctaaaagcggctggttcccagtgccgaaattcattttcgacccgatcgacatgatcggcgattcagcggtgccaatgatcctgatggcgttcggcatgtccctacacggcaccaagccgctgcagcagaagggcgatcgcccggccatcttcacggtcgcggtcctcaagaacatcatcatgccaatcatcgcgttcctgctcgcctatttcgtgatgggcttccgcggctccgagctgtacgcctgcgtggtactcgccgctctgcccaccggccagaacgtgtacaactacgcggcccgctacaacgtgggcctcaccttcgcgcgcgacggcattctgatgagcaccatgaccagcccggtgtttatcgcgatcatcgcggcgctgctgagctgagccggcaactgtaatcaccgtaaaaaaacttccgcgaaatccaccgtaggattccgcggaagcctgagatatacactacttgagaatcgccttaatcgcctcatactgctgagcagtgagttgcaccgctggctcacggatcagggtggaaatgttcagtcccttggccttgaccgcacccttgatggcggagatgaacaggtcggtctgatcgtacagcgccatcaggtggctgatgcgttcggcggcctcaattgcggtgccatagtcgccggcctcatatgcacggtgcagcgtaacgaaggtctccggctccacattggtcatgccgcagatcacgccatcaccgccggagacgcggttgacgagatagtactcgtcgaaaccggagaacaccgcaaaccgtggattcacggccttgaccgcgcgaatcaccttgcgggtgtggctgattgtgtcgaccgtgtccttgatgccgacgatgttcgggtgcgcggcggcaagctcggccacgagctccggggtcaagtcgctgccggtgcgcggtgggaaattatagaggatcaccggaagattcgtcgcttcagcgaccgcgccgaagtacgccttcgcgcctcccgcagtagggccgaagtaatacggcgaaacgaccacgagcgcatccactccacttgcttcgactgcccgcgcgaagtcgatcacattgttcaagttggtatcgcccacgcccgcgaacaccttgatgcgcccggcgacatgcttggccacgaagtcgaccgcctgcttcttgacgtccagagggaaggcatagaactcgccgatgctgccaaacaccagcacgccgttgataccggcctcgatcagatgatcgagatgctgcccccaacgttcatagtcgatgtcaccgtcgtccttggtgatggtgatggatgggcagatgatgcctgagaattcggcgctgcttgtcatgattgttcctttcgtcacggaataggggtgccgcacaagcggcaccgggtttgcggcctctcccccagtcgtcctgcggacgatagccccctcatcagagggggcttgggtttagtcgatgttgtaagcgcggcgggcgttgttttcgaagaagtcctcgtcctcgccgaacgtgtccagcatgagttggaagtgcgtggcaaaggtcgagttgagttccacgaccggccagttggagctgtacagcaccttcttcgggccgaatgtgtcccgcacgtatttcacgatgtccgggtccaccgggttgtcgccggaaaccttgatatacgaattcggcagttcggccaacgctgcgagtgcggcgcacgattcctcatcaagcccgggcacgttgccgagatgatcgatgatgaccgtcacttcgggaacctgcgagaacgccttggccatgtcgcccaactccgggccacggttgcacagctcgaatggcaatcccttggcggccatcgcgcgtagaccggcgatgaattcgggttcgagcgcacggccccgcggctcggaatccacatgcagcggttccctgatgccatcggcattaatcgggacacgcatccaagggcttacccgtccttgcaacatgcgcttcaagatcagaggacttgcattctcgtacagcagccggtcctcaagctcatggtcggccgcgtcgacctccacgtatacgccgccgaggaaattcacgccaaacttggcgtactgtgcggctaggtcttcaatcgtgtacttgtgttgcagcgagggcaatcctgccagccatggcagatcctgcacatccggatcccagatatggaagtgggaatcgattacgttgagtgtcatgtcaggcctccttcagaccgatcttggaaccccagaatgcgtaccatgccacgaacaggaagcccgggaccatcaccaggatggcgatctcgatgcctgccgcatcctgaatcacaccgagcagcagcggaatcaacgcggcgcccacaatgctcatcaccaaagccgaggaaccggtcttcgccgcggaacccttgatacctttcagcgtcagggagaatatggtcgggtatccgatggaaatgaacagatacgccaccatgaacgcgatgacggagaccttgcccaggccaaggaataccacgaacatcagcacggctgaaatggtcatgtatacgccaagaatcttcgcgggatcgaatttggccatcaatggggtggtggcgaagcgtccgatggtgaacagcagggaaagcacggaaagcatcatcgccgcggtgccggctgtgatgcccgcgccccagtgcttgagcgcgtaggcggagaagaccgccatgccggccacttgcaggccgatgaaaatgaactcggcaagcacgcccaatgcgaagtgcgggcgcttgagcaggccgaagaaggagctgttcttggaggaggcgccgcccgcggcctcctcttcgtctcccggaggcgtgggcagcttgaacagcgcgaacacggcgagcaccacgaccagcacaacgccgatcacaatgtatatcgtgcgggtatcattcaggaactgcgtcttagcggcgtcgaagccggactcgcctgatgcgacggtggtgccgagaatctggccaagaatcagcgggccaacgatgttgccgacgccgttgaaactctgcgccatgttgatacggaacgattcgcccttttcatcacccagcttggtgatatacggattgcagttggtctccagcgatgccgcgccgagcgcgataacgaacatggcgaacaggaacaggccgtagctggccatgctggtggcagggatcaccatgaacgcgcccagagcgaacaggaacagaccggagatgacgccgcccttataaccgaaacgcttggcgatcaagccggccggaatggccatgacgaagtatgcgccgtaataggccacctgcagtaatgacgcttcggcgctgctgagttctatgtagtttgcgaacggcgagttcaacgcgttcacgaggttcatggtcaggccccagataaagaacagtgaggtcaccagtacaatggcgatggtcgccttggaaccggttgtgtttttggatgtcatcattgactccttagtgatacgagtttccccgatattgcctagcgagaagtggaccaccctgggccatgttggtaaacggatgacccagggcgcgggtgatacgggcggcatacgcggatacggcgtacggatggagcaatgatcaaagctccggaattgccgcgcgaatattcgggaaagggctgcttgtcagctcagcgcacggtcaaggtggacatagccgccatcgacgtacacccactgaccggtggtgtggctggagcggtcggagagcaggaatgccgcttcattaccgatctcttcggtggtggtcatacgatgttccagcggaatcttgtcggtgatcaccgacaggcgcgcctgctgggccgcttcatcgccaaaggtcttgatccaatcggcatagagcggggtccagcactcggagacgactatggcgttgacacgcacgctatcgtgcaccaatgcggcggcccattcacgggtcaggcccaggatcgcgcccttggcggccgcataggcgctggtcttgccttggccggtaagcgcggtcttggacgagatgttcacgatggatccgcggctttccttgagatacggcacggccgcgtggaccagctcgtaatagtgagtcaggttgccgtgaagcgattcctcgaactcacgccaagtagtggtctcgagatccttgttgtcgttctttccggcgttattcacaatgccatcgatatggccgtacttcttgtatgttgcttcgacgacgccggcgatcttgtcggtgtcgttgaggtcaagcaagtgcacatcataggtggtggtgtactgctcgatatccttcttgaactcctcgagcgcgctgtcgggtcgattaatcaccaccgggatggccccctcctgggccagttgcagcgtgatgcctttgccgatgcctttgaaaccgccggtgatgatgatgactttgccttcgagatgcagatccatgggaactccttcgtccatccttattctgcgtttcatgggtgttccatgtcacgcccggccggggcttcggcaccccagccggagtggttgtgtgttgttgtgttgagttgtgttgttcagttatgaatttccagttgcggtcagccgcgatacaggtacttctcggccgtctccagcgtcatttcggtaccgttgcccggagcggtcggagcgacgtagttgccgtccttgatctcggtcgggtggacgaaatgttcatgctggttatcgacatattcgatcatgcggccgtccatcgtgccggacacggccacgtaatcgaacatcgcgaagtggcatacggcctcgcacaggcccacgccgccggcgtgcgggcagacgggcttgttgaacttcttcgcgagcaggtattcgagcacgatctcctgcggaccggccactcgggtggcgtcgatctgcatgatgccgaaggcgttggcctgcaggtactgcttgtacaggatgcggctctgcatctgttcgccggtggccaccttgatggggttgatggcgcgggcgatggtggcgtggccgatcacgtcgtcggggctggtcggctcctccacccaagccagatcgaagtcgtggaacttgttgatccagtcgatggcggtgggaacatcccacacctggttggcgtccacggcaagacgcacgtcggggccgatggcttcgcgggccttggccaggcgacgcagatcgtcgtcgatgttctggccgaccttaagcttaatctgcttgaagcccttgacctgggtctcctccttggcgagggccaccatcttctcatccgagtagccgagccagccgggagcggttgaatagccggggtaaccgacctccagcagatgcttgatacgctcggccttgcccttctgaccctctttgagaatcgcaacggcttcctcagggcgcagggcgtcggtcatgtagcggaaatcgagcgtggagaccagctcctccggctccatctcgcccagcagcagccacaacggcttgcccgcacgcttggccttgatatcccacaacgcggagagcaccgcgccgatggccatatgctccacgcccttttcagggccaagccaacgcagctgggaatcatgcacgaacaggtcccatgcaatgcgcatgttgtcgagcagttcctcggtgttgcgcccaatcagcacctgcgacatcgattcgatggccttgcaaaccacgtcgttgccacggccgatggtgaacacgaatcccacacccgtgatgccgtcgtcggcgctggtggaaatctccacgtacgcagaggaataatccggatcggggttcattgcatccgagccggaaagcgtcgttgaagtggggaatcggaagtcatacgtcttgactttggtgatggtactcatgtgttcgggctccttcgcctggtgtgaaccaacggctatatcgtacgtccgaataaagaaatttgcaagcctatttgcgaaaatttttattcaaggccggacaaagggcaagaaaacacggaattgttacggcacaatgcgtcataatggtgggaacaacgacgaaatcgtctcagtaattgaacggcgaatatccaagagggaaacaccgatggttaacgatacatccacccacaagctcaaggtcggcgagctcgcaaaaatcgccggcgtatccgcatccactgtttccaaagtcatcaatggcaggacaggcatttccgacgagacgcggagacaagtcgagcaaatcctcaaagatcacggttactcaaggcctctggtcaacaccaaactctcccccaccatagagctcgtcgtcgaatacattgagcacaacggcacgatggaactcatcaaatacgcctcatactgggcgcagcaggcgggcctcgccatcacggtcacccagaccaaccatggcgatgccacggaagactgtttccgcggcatcatcgatagaaatccccaaggtgtgattatgcagcagatgggcggtctgaccactcaagcgaagtctttgttgaaatcgcgcagtattcccgtggtcatcatcgacccaatcgataccgtcgattcggatgtgatgagcgtgtccatcgataactggaccgcaggataccaggccggcaaacacctgctgtcgctcggccatcgacgcatcgccgttatccgggggccggcgaacctacagaccagcatcgcacgctatagcggattcaccgccgctctgcaacaggccggggtggatctgccggagtcctatatcgaacagggcgactacttccccgccgaaacaagctatgaagcagcctgccggctgctggaactcaccgaccgacccaccgcgattttttgctgcaacgacttatctgcagtaagcacgtatcgtgccgcacgagagcataagatcgcgttgccaaagcaattgtccgtcatggggttcgacgacattttccccgccggccaactcatgccctccctgaccagcgtgcatcagccgttcagcgaaatagcccaacgcgccgtgcagatgatcatcgacagccgcaagggcaatcagggtgatatgcacgtcatcctccccaccagtgtcgtcacccgggaaagtaccgtaccgcctcagtcatcggcccgataatcggccagattcaagctggcggccacccgattggacgcgaacgcacccaccgaaaccagcgcatagcacagcgcaagcccgccgaagaagctggccagcgtggccggttcggtcatcgaagcggcgaacagaggggccataagcagcatggaacagccgccggccacgatcaccacgatgttgagcggggtgagtacctcgatgaatcgcgcacggttcaaggtcttgacatcagtgccctccaacaccagcatgcgatattcgccggcctgatcgtacacgctgccggcctgcatcacaccggagctgaccgcggcaagcacagcggcgaacactagcgtcaggatgccgccggtgccgatgtcgcgaatgaacacggtggacgggtcgttggcgtcaccgaccacggcggccgagccaaagaatccgcagatcgaggtgatgccggcgatgaacacggccagtgcaatgccggacacattgcgccacgcgcgcttcggattgtcgagaatacggcgcatggcaatcatcgtggccgcgtccttgggccgtttggccttggctttggcgcgggcggtgaccacccaggagcccacgaggttcaccagcgcgaagcacagcagcatgaaaccgatgatcacgccgtacatcactacttcaccggcctgagccagcaccatcggattcttgaacagaagaacggcaatcaccatgatgacggcgaacaccaccacacgccagccggacggcagcgtagtcgcaacgcgtgaagtgacgccgagtggcgtgatggccacgcgccgaagcgtgaccagcgaagagatcagcgccaacacggtcacgccaacaagcgtaatgatcaaggcaatcggccccacccacagttgctcgaacgtaaacgtctgattctggaaatgcagcaacatgattagggggatcaacacgcagtaccccgcgatgccaatcagcgcccccaccaaggcctgcccagccgcatcaagcgccgtaaggcgaataacttgccccgtggtcgcgcctgccaagcgcagggatgcgagccgagcgtcacgacgggacgcagccaatcgcgcggcggaaccggcaagcgccacgaacggcacaatcagcagcaggcaggcaaagaacgccagcacgacgtatgccgtggcgtattgatccaggctgtggggattggcgatacgctgcttccagatttccgctgttccgggtttgcaagcgtcgagattgattgcgcatccaatggtgtggtcggcggaggcgcgccacatgaacccatgcacgccgcccaaaacggtgagaaagatagtggtggctgcggcaaaagcaatgatggccaacaccgaagtatgacccgcactgccacgcgagccggggcgatggaacaatcgccacaatgcgaaagcgctcatcgtacgcctcccagctggccgtcctgcatggtcacggtgcgcgagcagaacgaagcgacgttggggtcgtgggtgacgacgaccacagcggaaccgttgtcccgcgcggcggccatgagaatgcccatgacctcgcggccggtggcttggtcgagcgcgccggtcggctcgtcggcgaagaccacggcaggtttgacggcgagcgcacgggcgatggcgatgcgctgcatctg

SEQ ID NO: 41 - DNA, 76956 bp, Unknown
  R30_18m  MAG No. k141_15865
agatttgcggcggccatggcccaggagagacgcccggtcccattccgaacccggaagctaaggcctggcacggcgatggtactgcacccgacagggtgtgggagagtagcacgccgccgcaccacacgtacaggaagcccctcggagcacacgccccaaggggctttccctatatccgaaaccaacaagacataggctctcgcacctagggtgtggccgaatcgaaagcatatagaagagggaaccctcaaatgacggagagttccctctttgcgtatctggacctataaaggtctagaaattgaaattgtcaggatcagcaccgttgcgcttgccggtgttgatggcggagatggcggtcatatcatcgactgataggttgaagtcgaagacctcgaagttctgcttgatacgctcggcatgagtggatttcggcagcacgacgataccgcgctggatgtgccagcgaatcaccacttgggcaggtgacttgccgtacttggcactgatctcggccaatactgggttgctcagcaggttgccgccggtaccgccgagcggactccaagcctcggttgcgatgcccttggcacgcagctggccaatgagctcttgattggtgaattgtggggaagactcaatctggtctacggcaggtaccatatcgctgtgggtcagcagctcatcaatatgatgcttttggaagttactgacgccaatggccttggcacggccagaggcataaatctcctgcaagtcatcccaggcctgctgccagccgtctgccggccagtgaatcagatacagatccacataatccacgcccaagcggtcgaggctttcttggaatgcatccttgccgtggcgtgcgcgaacatcgtcattccacagcttggtggtcaagaagaaatcgctgcgcggcacaccagcacggcgaataccttcacctactgaggcttcgttgcggtaaatcattgcggtatcgatatggcggtagccattctccagagccgtctgcaccgcgttcactgtagtatcaccatccggtgtctggaatacgcccaagcccacctgcgggatgacagtgccgttgttcagcataattgtcgattgaattgccataatgcctcactattcgtagtgttcattcaatttcctattttagaaacaagacgatgcaatgagccgcgtttcgcgggcaaagaattgcgtaatgatggcgtgattctcgttcattaggtcattattgcattcattaggtcaatgggcccagggtcttcggcatcagaacccagtcattacgccattcctgaagagccgtcttacggcataccgacctaatgaacgtgaaatcgacctaatgaatgcaacgagtaagcggctacgataataaccagtagaatcacaacccagattgaaggggagagcacgtggcagaggaatatgtggctgcattcgatgcagggaccacggcgttgaagggtgccttggttgataggcaaggccgtatcgtagccagtgcgagtagtgagcttaaccttattatcaacggcgactatcgggaacagagccccgatcaatggtggcaagctttctgcgcggcctccaggcacatgattgagcagacgcggcaatccgagtcagaattcaatgtgactcgcattcgtggcatcattttcagcggtcagatgcaggatgttattgctttgaacggcgagctcaatcccgtccgcaatgccattctgtattcggatggccgagccgaggaacaggccaagcaactcgccaagacatatcagggtggagtagaacgtttcctgaacaccgttggcaaccggctcgaaggctgcttgccgttgcccaagttgatgtggctgcgtgaacacgagccggaaacgtacgcgcgcattcgtcatgtattgatcagttccaaggactacttgatcgcccaattgaccggcgaatgcgtgggcgatgtggcggcttgttccacagccggtgccatgaatatccgtaatggccaatgggatgccgaattgtgcgaggccgcaggaatcgacatggccatgttgccacacctgcacaatccgcaagacaacattggcacagtgacggaatccgctgcacaacgcaccggtttctccgccggaactgcggtatacgcgggcattggcgatgcgggtgccaccacgctggccagcggtgtcagccgccctggtcaatacaacatcaatatcggcacctcaggttggatcgccaccgtttcgcccgaaccgttcaccgacaagccaggtgctgcgaatctggcatctggtgtggaagaagtcttcgtgaatgccgtgccattcctcaacgccggtgacgtgcataaatgggttaccggcgtattcgctgatggcgattacgcggaagcacatcagcttatcgaaacatccaaacccggctccaacggtgtgatgtgcctgccatatctggtgggggagcggttccccgtaatgaacccgaatattcgcggggcctatgtaggcctcgatccagacaccaccaaggcagacatgatgcgtgccgcgcttgagggcgtggccttctccattcgtcaaggtatggaaagttttgacgccaaacccagcgagatttccctgattggcggcggagccagagaaaatgcgtggtgccagattctggccgatgtgttggagcatcccatcgaagtgttcgccaatgccgatattctgccagcagtggcaatggcctcgttggtattcaatgtaccagacctgctgcaatcagtatgcgaatgcactgtataccagccgaatcctgacaccgcacgcacatatgccgacgcataccggcgattcctgagcctctacccgatgctgcgaacgatggattaggaactgagcatcatgaggcaatcagcgaatttggtccgcaaacatatagcggtcaccggactggtgcaaggcgtgggattccgttattttacggtgactcaggcacgtcgacttggtgtacagggctgggtgcgcaattgccgcgatggctcggttgagctggaagcacaaggcagtagcgacgcagtgcaagccttggttgagcaattagccattggtccgcgatggtccgaagtgagtcacgtcgccgtacatgacatgccgattatcgatgagaccgctcgggcatttggcgtgcgtcaataacctgcatcacgaatccacatcacgcacgataatctcacgatacgggtgaacatgggcgttcctcgacgcttaggccccgcacgttggtacgatggggcgttatgagtgagaacatgatgcaaatcattgacctgcgtggtcagaacctgtcccgtgccgaactgctcgccgcgatgccgcgtgctgcaatgggcacttccgaagccaccgatctggtgcgtccgattctggacgatgtcaaggagcgcggcgccgctgccctgcgcgacttcgaggagaagttcgaccacgttcgtccgaagaacctgcgcgtgccggccgaagcgatccagaatgccctgaccacgctcgaccccgaagtgcgcgccgccatcgaggaatccgtgcgccgcgcccgcgccgtggcggccaaccaggtgccgaaggacttctacaccgatctggccgaaggcgctcgcgtcgccgaacgttggattccgatccagcgcgtcggcctgtatgtgcccggcggcaaggccgtctacccgagctccgtcatcatgaacgctgtgccggcccaggccgccggcgtcgaatcgttggccatcgccaccccgcccgcccgcgacaatgaggaaggcctgccgaacaagaccatcctcgccacctgcgccatcctcggtgttgacgaggtatacgcggtcggcggcgcccaggccatcgccatgttcgcatacggcgccaagggcagcgagccgcaggacggcgacatcctgtgcgatccggttgacaagatcaccggcccgggcaacatcttcgtggccaccgccaagtcactggtctccgcattcgtgggcatcgacgcggtcgccggccccactgaaatcggcatcatcgccgatgaaaccgccaacccgagcctgttggccgccgacctcatcggccaggccgagcatgatgagctcgccggttccgtgctgttcaccgactccaccgagattgccgacaaggtgcaggagaacctcaagtaccgcgtgccgcgtaccgagcacgccgagcgcgtccacacgtcgctgtccggcacccagtctgccatcgtgctgaccgacggtcttgaccagtccatcgacgcggccaacgcctacgccgccgaacaccttgagattcagaccaaggatgccgatgctgtcgtcaagcgcatcaagaacgccggtgccatcttccgcggcccgtactccccggtgccgctgggcgactacatgtccggttccaaccacgtgctgcccaccggcggcaccgcccgcttcgccgcaggcctcggcgtgcacacgttcatgaagccggtcgaagtcatcgaatacgacgaggaaggcctcaaggctctcgccgcccgcatcaacgccttcgcggtgtccgaggacctgcccgcccacggcgagtgcgtgctctcccgcttcgtcaaggatccgtatgacaaggccaccctgcgcgagcaggagaagggagccggtctgcgatgagctcgattcccgaaaacctgccgctgcgcaacgacctgatcggtgaggagccgtacggcgctccccagctggacgtgccggtgtgcctgaacgtcaacgagaacccgtatgcgccggacccggccgtatgcgacaccatcgccaagcgtgtgcgtgaaatcgcccccacactcaaccgatacccggaccgtgagcacattgaattgcgtcaggcattctccgattacctggcccgtgaatccggtacccgtctggacgtggacgagctgtggggcgcgaacggctccaacgagatcatgctccagctgttccaggctttcggcggcccgggccgcaccgcactcggtgccgacccgacgtactccatgtacccggagtacgctcgcgacaccttcaccggttggaagctcgcccaccgcaacgccgacttcacgttgaacgtcgacaaggtgcttgaggccatcgccgaggtcaagccctcgatggtgctgctcaccagtccgaacaacccgaccggcaccccgttgccgatggaggatatcgagcgtattctcgccgcctgcgaaaccgccgaagtggccggcgcgggtgagggcgtgcacccgattctcgtcatcgatgaagcgtacgtggaattccgcaagcccggcaccccgagcgccgtgagcctgatcaaggaccacccgaacctggccgtaagccgcaccatgagcaaggcctttgccttcgccggcgcgcgagtcggctacctagccgcatccaagggcatcatcgactgcgtgcgcatcgtacgtatgccgtaccacctgtccgccgtgacccaggccgccgcactggccgccttcgaacacaccgatgaacagctgagccgtgtcgagcatctgcgcgaaacccgcgaggccaccgccgcatggctcaaggaacagacctacaaggaccagccgcttgaagtggccgaatccggctcgaacttcctgctgttcggcgggcacttcgacaagcgcgaagccatcttcgacgagctcctgaagcgcggcgtactcatccgcgtggtcggaccggacggttggctgcgcgtgtgcatgggtaccgacgaggagatggaaaccttccgtaacgcccttgttgaagcgcttcgtatagtggaagcagcataagggacgtttctttccgattgcggcgagacccgaagcgattcgagtcccgccgcaatccaatatgacgaatcacacaggagacatgatggcaagaaccgcgcacatcgtccgcgaaaccagcgaatcacacatcgacctcgaactgaacctcgacggcaccggcaaaaccgatatcgatacatccgtgccgttctacaaccatatgatgaccgcgctcggcaagcattcgctgatcgacctgaccatccacgcccacggcgacaccgacatcgacgtgcaccacaccgtggaagatacggccatcgtgttcggcgaagctctgaagcgggccctcggcgacaagaaaggcatccgccgcttcgccgacgccaccgtgccgctcgacgaggcgctggccaaggccgtggtcgacatttccggccgcccgtactgcgtgtgcagcggcgagcccgaaggctacgaattctgcatgatcggcggccacttcaccggctctctggtccgccacgtcatggaatccatcgctttccacgccggcatctgcctgcacatgcaggtgctcgccggccgtgatccgcatcacatcgccgaagccgaattcaaggcgctggcccgtgcgctgcgcttcgccgtggaaatcgacccgcgtgtagacggcgtgcccagcaccaagggagccctgtgatggccgacgacaagttcgatccggacgaatcgcacttctccgacgaggagcttgaggccgcgctcgccggattcgagaaagaattcgcggacgattcggcatccggcgatgccagtgataccagtgatgccgataaaacggcggacgctgcttcagcgaagtccgattccgacgcgaatgatgatacggctgataaggcttccgctgattccggccagcctatgaccgacgacgtcaccggatcggtcgctgatgcggtgaatgaggccatggccgacgtggtcgacccctcgctcggcttcgacaacgaactcgctggactgttgggtaacaaggcgaaggtggcgctgatcgtcacccgtcttgcctccgctgaactgttggccgcgttctgccagctgtcggacatctccgccgcatgcgtcggtgccaatcagggggccgtcgcggtgctgaagaatctggacggcgacggcccggaagccgcagccaaggacctgaccaccgtggtatccggcatggccgtgattcttgcagtcaatcgtgccgacaagctcgaagtggccatgtacgtgcagggagaggccggacagagtttcgcgccgcccgtgctgttcacctccacaccgcgcttcgtcgaggacctgatgctcggcatcgtaaccctgaaccaactcaagacccaagggttcgaagtggtggattccgctggactcgaccatgaccaggcgatgcagattctcgccaaccataccaagcgtgggcgtggcggacgcggctcccgcatcgaatagacgccaaccaaccagtaggggataggagagaatatgaccacagcggttgttttcgattacggtttcggcaatgtacgttccatggtgcgtgcgctcgccaatcttggcgtcgacaccaccctcacctccgactaccggcagtcgttggaggccgacggtctggtcgtgccgggcgtgggcgcgttcgccgcatgcatggaaggactgaagaaggtcgacggcgaccgtgtgatctatgatcgcatccgcgccggccgcccggtgcttggcgtgtgcgtgggcgagcagatcatgttcgaacacggtctggagcacggagcccatgccgcgggcatcgggctgatcggcggaacggtgaacctgctggacgccgacgtggtgcctcacatgggatgggacacgatcgaggccgcccccgattcggtgctgctcaacggcgtggagaatgaacggttttacttcgtgcactcctacgccgcgatggaagtgaagccggcggatacgtcccgcttcgacattgatctgagcggtgcgcccgaacgcgtgagctggtgctcgtacggccggtcgcgtttcgtggccgcctacgaacacggcccgctgtccgccacgcaattccacccggaaaagtccggggacgctggctcccagctcctcaagaactggatcgccacgctgtaaaaagcatgaagctcccctctgacgagagagctcaaattatgtataagtaactgaagaaaggctcttcttatgtcgttgactctgctgcccgccgtcgatgtacgcgatggcaaggccgtgcgcctgcgccaaggcgaatccggttccgaaaccgattacggttcgccgtttgaggccgcccgtacctgggttgaggccggtgccgaatggattcacctggtcgaccttgatgccgctttcggtacgggcaacaatcgcgatcagctgcgtgagatcgttcatgagcttggcgaccgggtgaacatcgaactgtccggcggcgtgcgcgatgacgcttcgttggacgcggcccttgaggccggtgccgcccgagtgaacatcggcaccgccgctttggagaacccggattggaccgcttcggtcatcaagaagtacggcgaccgtgtggctgttggtctggatgtgcgcggtcacacactggcggcgcgcggctggacgcgcgaaggcggcgacctgtttgagaccatgaagttccttgactccgtgggctgctcgcgttacgtggtcaccgacgtggccaaggacggcatgatgtccggcccgaacatccaactgctgcgtgaagtcgccgaacgcaccgacgccaaggtcacggcctccggtggtatctccaagctggacgatttgcgcgccatcaaggaactggccgagatcggcgtcgattccgccatcctcggcaagtcgttatacgcacgtgcgttcacgctccaggaagcgctcgcagtcgcgaagtaggcaaaggactcgccttagcgagactgttaagctacctttgctcagctatcgcttcactcaggcctcgcctacggacagcccattgggctgtccgcttaacggctcagcaaggaaggtcgccggatttgaggagctttttgaagacggtgtagtcttcatcattctgttcggcgtagctgacggcgaacgaggcaatggcctgatcgaattcgtcggtgccacccatgtaattggcgatcgcgatcgaatcgccggttcgctcatagtcactaccatagtgccgtgccggcatgggcccgaaccatgcccgacatgcggactggggcatgttgatgaaatctcgcgactcgcaggtgacaaacagtgagatgttaacgcccctcgtaacacggttatggaacgataggcgactatggataaacagcaggagtttgcgctgcgcacggtcgaagaacgcgacgtgcgctttattcgtctgtggttcacggacgtgttgggaacactgaagtccgtggcgattgctccggccgaactggaagccgcgtttgaggagggtctcggcttcgacggttccgccatcgagggcatgacccgcgtgtccgaagacgacatgatcgttcaacccgatcccgcgacgttccagatcctgccgtggcgcggtggcccgcaaggtaccgcccgcatgttctgcgacattctgaccccagacggcgagccttcgctcggcgatccacgtcacgtgttgaagcgtacgctcgccaaggccaaggacaagggcttcacgttctacgtgcatccggaaatcgagttctacctgttcgaaagccaggacgactggtccaaggccccgaccccgatcgacgagggcggctacttcgaccatgtgccgcgcagcccaggcatggacttccgccgcgccaccgtgaacatgctcgagcaaatgggcatctcggtggaatactcgcaccatgaggcggggccaggccagaacgagatcgatctgcgatacgcggacgcgctcaccatggccgacaacatcatgacattccgtacggtggtcaaggagatttccttggagcgtggcattcacgccagcttcatgcccaagcccctggccgacgcgcctggttccggcatgcacacgcacctgagcctgttcgaaggcgattccaacgccttctacgaggccggtcaggagttcaacatgtccctgaccgcccgccagttcgccgccggcatcctgtaccatgcggccgaaatctgcgcggtcaccgaccagtacgtcaactcgtacaagcgcctgtggggcggcaatgaggcaccaagctacatctgctggggccacaacaaccgttccgcgctgctgcgcatcccgcagtacaagccgggcaagggcaactccgcgcgcatggagttccgtgcgctcgacccggtggccaacccataccttgcctactcggtgctgctggccgccggtctcgatggcatcgataagcagatgcagctgggcgaacccaccagtgatgacgtgtgggagctcaccgacggcgaacgtcaggctatgggcattcagccgctgccgcgctcgctggacgaggcgctgaagatcatggagaaatccgacttcgtggccgacgtgctcggcgaacacgccttcggctacttcctggacaacaagcaccaggaatgggaggagtacaaccagcaggtcacgccttacgagctgaagaagtatctgccgaagctgtaatcgcaagcgttgcacatgtgccgaaccccgtcgatgattggtcatcggcggggttttctatagcgtgtcgtggtggtgggtagcgggcagaggtgggaatagtgttgtcgctgagttgatacgaaaaacgattgacgtaaccgacgaatcagcttgtagtacgagcgagagcactcaagagagcacccatgacgaacacacctgcgaacaccgcgcgcaccgaccgcttcttcaatctgccggtcaccatcctgatcttcgccagcttcatgctgggcatgagcgaattcgtggtagtgggcatcctgccggacatcgcatccggacttaaggtctccgaagtgaccgtgggtaatctggtggccatcttcgcattcgtgtacgcgccctgcacgccgctcggatccgcattatccgcccgattcccgcgctttctcacctatctgacgttgatgggcgtgttcctcgtcggcaatatcctgtgcgccttcgcgccgaactatccggtgctgctcatcgcccgactgctcatcgcctcggtgtccggcacgctggtggccatctccatgaccttcgcgcccgacgtgaccaccgacaaataccgcaccaagttcattgcctgggtattctcgggtttctccatcgcctctgtggtcggcgtaccggccggcacttgggtggccaatactttcggctggcgtgtcacctttgccttggtttcggtgctcaccgccgtgctgatggcatcgatggcagtgtctctgccacgcaactcacatccggcgaagatcggtttcctgaggcaattccgtctgttcttcgaccgccgcatccagctcggcgtggcggatgtggtctttggcgcagccgcctcctacgtcttctacacgtatttctcgccgatcatgcgcgacgaaatcggtgtgcccgaacgctatatcagcgtcggcttggtggtctacggctgtgcctgcctgtggagcaacctgtacggaggcaagctggccgatcggggcaggggggtcgagccgctgacccacattcgaccgatctactgcgtgcaggccgtctgcctgtgcctgctggctttcgcctcgctggtgccggccggcggcgcactgctgctggtggcgcttggcatgctcatgtatctgcagaattccgcttcccaggtgctgtatatggatgtggcctaccaatcccatcccggttcggtgaatctggccgcctccctgaattccatgtcgttcaacatcggcatcgccatcggctccgcggtcggcggcctggtcaacgacctccttggcctgacctggctcggcccggtcggcgcgatttttgcgttgctggcagccggcaccacgacactgctgcgtccgtacgtcagcccggtcggggaatgacgggtggcgtgacgcgcgggaacgaagggtttttcccgcgtgtccccgcggcatgccttatccgccgattgccgtccattgataacctgctatccaaataaccgataaggccacagcatgtcatcctgctgcgaaaccttaatgttaggacaccggctgcagggggacccggctcacgggcgcccacctgcgcggattgatgattatcggcatgttcagcgtgaaaatggggatgacaatatgacggatgcgactgcgaaagccgcgccgaaggcggaaagacggcggcgcgttctccgttccggcgctcgctcatcgatagtggtcggcggcgccatcgtgctgttcttcgtgctgctggcgccgctggccgggccgttgtcggccatcaccggcaacgacccgtacgccgagcatcccgaggccttgggtgccgggtcggtgccggccggattcggcggcggcatcagtgcccggcactggttcggcgtcaccccgctgcgcggcgtcgacctgttctccatcgtggcgtacggctcacggatctcgctgggcatcggcgtcgtctcgtcggtcatctcgctggtcatcggcgtggcgctcgggctgctggccggctatttccccgggttggtcgatgcgctgatctcgcgcacgatggacgtcttcttcggcttcccgttcctgatcttcgcgatcgcgctgtcggcggtggtgccgcagggcttcccgaggccggtgctgctgacgctagtgctcggattcttcggatggcccggcatcgcgcgtcttgtccgggggcagacgctgacgctgagcaagcgcaatttcgccgtcgcgtccaaggtgatgggcgcctcgcctgcccatgtgctgtggcatcagatcctgccgaacctcatgccgctgctcatcgtcaacatcacgctgtcgattcccgggcgcatcggcgccgaggcgggcctgtcgttcctcggcgtcggcatgaacccgccgacgccctcatggggccggtccatctccgacgccgtgcagtgggccctggtcgacccgatgtatctgatcttcccgggcgccgccctgttcctgctgaccttcggcttcaacctgcttggcgatggcctgagcgacgccatcgacccgcgcaagggggtgcgtgcatgagaatcctgcaatacatcggcaagcgcgtggcgagctcgatcgtcgtcatcctgctcatcacgctggcgctgttcctgattttcttcctgctgccgaccaatccggcgcagctgtcgtgcggcaagccgtgcacgcccgagcagctgcagcgggtctccgccttcatgggcaccgataagccgtggtacgagcagatgggcaattacgtggcgggcatcttcgtcgggcgcaccttcggcagcggcggcggcgccgtggtctgctcggcaccatgcctcgggtattcgttccgtctcaacgaatcggtgagccagctgatcctcgaccgcttcccgatcaccgcgtcgatcgcggtcggcgcggccgtgctgtggctggtcatcggcgtggcgaccggcgtgtgggcggccctcaagcgcgatacgctgatcgaccgcacgctgctcgggctgtcgatcgtgggcgtttcggcaccgtcatacctgatcggcctgctgacggtgatcgccttttcgctggtgctgcagatattccccagcggcgggtacgtgaacttccacgacgaccctgtcggctggttcacgcatctgctgctgccgtggctggtgctggccgtgctcagcgccgccggctacaccagggtcacccgcacgcagatgattggcgagctgagccaggactacatccgcaccgcccgctccaagggcgtgcccgaatcggtgatcatcttcaagcacgcgctgcgcaacgcgctgctgcccgtgatgaccatgttcggcctcgatctgggcgggctgctcggcggcgcggtgctcaccgagaaggtgttctcgatgcaggggctcggctcgctgctgctcgattccgtgtcgaacctcgacctgcaggtgctggtcggcgcgacgatgttcgccgccgtgctggtcatcgtcgccaacctgatcgtggacatctgctacagcctgctcgaccccagggtcgcgctcggcacgaagtagtgcggctgcggccgcaacacgcgatacttgccggtctgctccacggaccggcaccgatagagaggaaaaccatcatgaagaacaacgcatggcgcgtattcgcggcgggggcttgtgccgcggtactggcgctgtccggctgcggcgcgtccaacgacaacgccgccaccggctcggcgagcggcaccaccgtcaagggcggcacgctgaacgtgctgctgtccagcacggagatggatctggacccggccaagagccagggtctgccgaccaccacgaacggcaacatcttccgccgcctgaccgcgtggaagatcaccgacaagggcgagacgaaggtcgtgcccgatctggccaccgacaccggcaagtcgagcgacgacggcaagacgtggacgtacacgctcaagaacgggctcaagttctccgacggcacgcccatcacctccaaggacgtcaagtacgggctggagcgttccttcgccgactcgctgaccggcggcctgagctaccacaagacgctgctcgagggcgcgcaggactaccacggcccgttcgacggccaggagctcagctccatcgagacgccgaacgacaagaccatcatcttccacctcaacgcgccgttcggcgactggccgtgggtcgtctcgctcgccgcgttcacccccgtgcccgacggcaagggcccggcgtccggctacggcaagctgccggtggcctccggcccgtacaaggtcgagtcgaacgaggccggcaagcaggccgtcttcgtgcgcaacacctactgggacaagaagaccgatccggtgcgcaccgcgggccccgacaagatcgtgttcaagatgggacaggacacctcggtggccgcccagtcgatcatgcagggcaccggtgaaggcaagaactcgttcctgtccggattcgtgccggccgcgcagctcgcgcaggcgcaggccaacccgaactacaagaagctgctgaccaccagcggcgacggcgcgctggaatacctcgccatcaacacccaacacgtgaagaacgcgaagattcgccaagcgctgcagtacgcggtcgacaagaaggcctaccagacggcttccggcggcgagatcgccggcaacttcgccaccacgctcattacgcccggcatcgagggccgcgaggactacgacctgtacaaggccgatccgaccggcgacgtggacaaggccaagcagctgatcaaggagtcgggcgagcaggccccgaccctcaagctcatcgccacctccgctcaggccgaaaccgcctcctcgatccagacgagcctcaagcgggccggcatcaaggtggacatccagacactcaacgacgatgtgtattccgatacgctgaccaacgacaagggcgactacgatctggccatcagctcgtggcagcccgacttcccgtcgccctacgccaacatctccccgctgttcgactcctcgcagatcggccacggcaactacaacctggcccgttacgcgaacccgaaggtcgacgagctgatcaagaaggccaccgagaccatcgatcagaccgaggccggcaagatctgggccgaggccgacaagacgatcatggccgacgcgccggtcgtgccgctgatctattcgaagaacacgttcatccacggatcgaacgtgaccaacttcgtcatcggcaacttcccggcgtacccggactacacgcaggtctcgctcgccagcgcgaactgagccggcatccgcatccggcgcgcgccggcggcatggtccgctggcgcgcgcgccggacgcattccaacgcttgtgcatccaaggagcttccaatgagtgaaccacgcgcgatcgtgaccgtggacggtctggccgtcagcttcgacgagcgggaggtgacccacggcgtcagcctcaggctgttcccggggcgcatcaccgctctggtcggcgaatccggctccggcaagtcggtgacggcgatggcgctgccccgtctcgatccgtcggtggccagcgtgaagggccacgcgtacctcgacgacgcccttgtggatgacgggccggactccggtccgggcggcgacggcaaggacgccgccggccgcggcatcgatctgctggccgccgacgcgccgctgcaacgcatccgcggcgaatacatcggcacggtgttccaggaaccgtccaccgcgttcaatccggtgttcacgctcggcgtacaggtcgcggaatcgctcaaataccaccagaagcagctcagcgccgccgagcgcaaggccaaggtgctcgaacagctgcgcgaggtcgggctcgacgacgccgaacgcgtgtggtcgtcgtacccgcatgagctgtcgggcggccagctgcagcgcgtgatgatcgccatggcgatcatcaaccgacccaaggtactcatcgccgacgagccgaccaccgcgctcgacgtgaccacgcagaaggcgattctcgccctgatctcctcgctggcggtcgacctcgatctggccgtgctgctcatcacccacgacatgggcgtggtgtggcaggccgcgcaggacgtgtacgtgatgcacaacggcgtgatcgtcgagcaggggagcgtcgcgcaggtcttccgccacccgtccgacgactacacgcggatgctgctcgacgccgtgccgcgcctgcgcatcgacgagcatgcggcagacggcgaacatgcggccggcggcgaacgcatcacggaaagtgacgcgcccggcggcggcaggcgcatcacgcaggtgaacgacgtggccgtgtcgtacaaggccggcagcttcgccgtcaaggacatctcgttcgatctggtggccggcaggacccgcgcgctggtgggcgaatcgggagccggcaagaccacgatcgccaaggtgatctccggccagctcgcgccaacctcgggcacggtgctcatcgagggggaggatctcgccaaggcgcatggcaggcgcaagcgcgagatcctgaagcatatgggctatgtgttccaggacagcggatcggcgctcaacccgcgcaagtccgtggcatggagcatcggcgagccgatgctcgtgcagggcgggctcagcgagacgaaccggcgcaagcgcgtccttgaattgcttgatcaggtggagctgcccgccgatgtggccggccggttcccgcaccagctgtcgggcggccaacgccagcgcgtcggcatcgcgcgcgccttggcgctcaacccgtcgctgctcatcgccgacgagccgacgtcgtcgctggacgtgaccgtgcagcgcaaggtgctcgacctgctgcgccggctgcagcgcgagcacggtttcgcatgcctgttcatcacccatgacctgggcatcgtgcaggagatgtccgacgtgatcacagtgctgcgccacgggcgcgtcgtggagagcggggagaccggccgcgtgctcaaccatcccaaggccgagtacacgcgtaccctgctcgacgcctccccgaagatcgacctgtgagccgtgccgctcgtcatccggccggttctccggccgtgcggcggggcggcgacggcgcggatgacacctagccttaccgtggtttcggttttttgccgtcccgcccctatcggcgcgcggcaccgaaccagttggtgtatatgagggcgaagttgcggttgccgtagctggagcatgagtcgccctcgccgaacccggccgccagcgaggcgtcgttcggctggtagggcgtgtagatgtagagcagcgcggtcgccttgttctcgatgtacacgttggtgccgccgcacccggcatccgggtggtactggatgtagttcagcgcgttggcgtgatagccgtaggcgctttcatgcgccacatagtattggtagcggtgcgccgccccgtacacctgtctgaagaagccggcataggccggatcgcagttcgcgttgtccgggcagctcagccccatggcggccttgtactggaagtccgtcggatcgacggccgtgaccaggtgctgctccttctgcagcacggtgagcagcaccttctggctgatgccgcacgcgcgcgccgacttgtcgacgatcgcggccgcggtctcctttctcgcgccctcgtacgccgcgcaatactcgttcgccgcctggtcctcggtgtcgaaggtcatggttttcaggcaccgggaaccgctgcacgccgcgccctgcttgtcgaggaacgcctggacctcggcctcgctcatcgcattggcgttgaagaactggccgtccgagatgatgtcgccgggattgaagtcgtattgctgcgtcagctgcagctggcgggcctcggcctcctgcacgtcgcgacgccactggacgacccgcacagtgcccacgaccagcgcgaccacgcatgcggccgccaccacggtgaccagcacagccgcgacgcgctgcgccaacccggcccgcttccaccagcgcgccgggctgagcggatacctgcgattgcgcgggcgtttgcccgggcgacgtttgcgattgccgcctgacacgccccgccccgcgacaatcacgttcgccctgccgcgcggattggccggcttgcgccgttgcgtcgtcgccatcgctacgccagtgccttcttgatgcgctgcaggctcaccggcttggcggtgccgagttcctgcgcccacagggacacgtagaattcctcgagcatccagcgggcggcggtcgcctgcttcatcagcgtctcgtggcgggggccggccggctccgccttggccttggccatcgccttgtcgaccagcgtgcgggcctcgtcggcctcccacgcccatcgcacgtcgcggttcttgtcggtcttcgccttggccaggcgcatgagatcggcctgcaggtatcgggagatgttcgccagcgcgtccgggggagcggcgccgacgaatccggggaacaccagcgtggcgatgtgctcgcgcaccgactgcagcaccgacagcatcggcaagtcggccttgccgccagtggccttgtcgacttcggcataagccttgagcacggcgatcacgtcatgcgccacctgatagacggtgtcctcgtacacttcgcgcacatcgagcaccgcattggccaacgcctcatcgtccgagagcctgtcgacattcggcatcagccgtttgaccgtggccagctgcaggtcttcgaccagatccttggtggacttgtacggagcagaagccagcatcaacgcctcggtacccagccagcgcgacgaaatgcgttcggccggcaaccgcagcgcatccaatgcgccacgccagagcatcgtggcccgggactcggtggtggcacccgccttatgcaacaggttcgcctgactgaccagcttgccctgttctccagcctgatcggcctgcttcttgaccatttgacgggccgacgcctccgcctgcgcggcgaacttgcgttgcagcgccttcagatccttggacacacccagcaccttgacggggccgcgtgcatgccggcgtccacgagggtgcttgccggccggcagttgctgctccaccgagaacgtgaccctgagatacggggaaagacgctcgaccagttccggccccaacacttcgggatgaatctgcgcacccttggtggcgatggccgccttggtgaacacatgtgccaaatcaggccagccaacggtcgtgccatcctcatccaccggcggcagattcggcttctgctgcgagcccgagcccggcagatccgggtaatgctcgtcgatccagtcacgaatcgcacgcgcggcatccggggccggcacgaactggacgcgcagctgcttgggcagcgccttgatcatcgacagaatcagctcatccaacaggcccggcacattccatgtgaactggtcgggcgtgatacgcgagagcgccttcaacggcacatgcacggtgacgccgtcggccgggtcggccggatcgtatacgtagctcaaacgcaggtcgatgggttggccgtccgatccggtcgtatgccaatggtcggggtaatcgtccagactcaccgaatcgctggatgccagacgctccaccttggccgggtcgaaatcaagcagattcggctgacggtcatgctcggacttccaccatttcgccagatcggccacgctggtcacatcgttgggaatgaccgcgttgtagaagtcgaacagatcctcgtcggacacggtgtccgccagctggcgggtgcggctcgcgtcatcggcggcatcctcgagaatgtcacggtttttgcccacaaagtcgtcgtaactgaagcgctgctgaatatcgccctcgaccagaccctggcgaatcaggaagtcgcgcgcctcaagcggattgatgcgtccccactgcacggcacggtcctgtacgatcggcagaccatacagcagcacgcgcgcggtggccacagccgagccacgcgaacccgaccagtgcggctccgcatacgtggtgcgggtcaattggccggccaacggttcggcccacgccgggtcgatggccgccgaatagcgggcccacaggcgagaggtctccaccagttcggtgctcatcacccatgacggggtcttcttggccacggcggaggcggggaacagggcgaaacgggtgccgcgcgcgccctgataatcgttcttcgactgcttctgggcgcgtttcatcgcacgggcgcgcgccgcaccggtcagccccgcgaaatcggaggccttgggctcacgcaccacctgcatgcccatcatcgacagcaatccggcgagcatcgacttgtggatgccatccgcatcccacgagcagcacagcgaatgcgcggcctgctgattcaacggcagctggcgaatctccaagcctgggcgggaggcgggcaacgggtcgccgaccttgaacttcagctccttgcacatctggcgtagctgggagacgagatctttccactggcgtatcctcagccagctgagatactcggttttgcagatacggcgcagcgcgttgttgctcgggtcgccgtccgcttggaacacgcgatcccagatgttcagggccgtcaggaaatcggaagtctcatccgcatatcggttgtggatacggtcggcatcctcacgcttgtcgtccgggcgttcacgtgggtcctgcaagctcaggaacgccacgaccacgagcacctgggccagaagattcggcgaaccggttttcgcggcctcgataaccatacgtcccagacgcacgtcgatggggatgcgcgccagctgacggccggtatgggtgagcgtcacctcgccgcgctttcggccgatggccttgagctcggtgagctcattgaaaccgtccgacacggccttcatatccggcggatcgatgaacccgaagttcgtgacgtcctcggccgtgcgggccacgcccaccgacagcatgtgaagcaccacggcacccagcgaggtacgcaggatttccggctcggtgaagcgcggtcgggtctcgtaatcctcacgcgaatacaggcggatcgcgatgccgtcggccacgcggccgcatcggccggacctctggtcggcactggcctggctgatcggctcgatcggcagacgctggacctttgcggtcttcgaataccgggagatacgggcggaaccggggtccaccacgtagcggataccgggcacggtcagcgaggtctcagccacattggtggcgatgacgatgcgctgatgcaaatgcgattcgaacaccttgtgctggtcggcggcggacaatcgcgcgaacagcggcatgatctcgatggcgtccggtcggcgcatgtcgtcggcgcgcggaccgtaatgatgccgcagtgcggcctcgaactcgtggatgtcgcgctcgccggaagcgaagaccagaatatcgcggggaccgcgctcatgggaggagtggatcaccagttcggcgcaggctcgagccacggccgtgggcatatcggtgatgccgtcatcggcataggagtcgccggaccggccgcggggccggtcggaatcggattccgcgatggcgctggccagctcgtcgtaatcggcgtcgccggggcgggcgcccaccgcgaatcccggcacttcgcgcatcaacgcgggcgcggtgccaagcggctcatagaccacctgcacggggaaggtgcggccggaaacctcgattaccggcaccttctcatgcaaggcgtgctcgaaatgctcctggaacttgaccgaatcgatggtcgcggaggtgatgatgagcttcagatcgcggcgctgaggcagcagtgccgtcagatagccgagcagaaagtcgatgttaagactgcgctcatgcgcctcgtcgatgatgatcgtatcgtattgggtgagtttcggatcgcgctggatctgggcgagcagaataccgtcggtcacgactctcaatcgcgtgctgggcgagctttcgtcggtgaaacgcacctgatagccgacctcgtcaccgagcttcacgcccatctccgaggcgatacgttcggccaccgtgcgcgcggcgatacggcgaggctgggtgtgcacgatctgcttgccgtgcgcgccacggccaagctcaagcaggatcttcggcagctgtgtggttttgcccgaaccggtctggccggacacaataacgacttgggaacgtttgaccgcgctggctatctcatcacgcgcggcagatacgggaagttctgcaggatactcatatttcatgacggacttcaatgatacggaagcccttggagctcgcgtatttgctcgcagtgaacccctcgccgagcgcatcgtccagccaggggatcagcgaatcggagccgagattcttctgcactacgagataggcggcgccgcccaccttgagcttcggcagccaagccataagcaatgtatgcagcgcttccttgccgacacggatcggtggattcgaccaaatcgcatcaaacgtgaggtcgcccggcaccgtctcgcagaacgccggctggttctcggcgggcaggggagtgctggactcgtccacctgagccgcatgaatgttcgtgcggccgttcgcctgtgcgttggcatgggtcaggtccagcgcgcgctcgttgacatccaccgcccacacgttcgcttcgggcgactcaaacgccaatgtcagggcgatagggccccagccgcagcccaaatccaggaaatcgccggtaagcggcggctcgggcgcatgcttcagcaataccgatgtaccgaggtccacgcgcgagccggagaacacgccgttcgacacctgagcggtcgcctcatggccgcgcaacgttacgttcaatgtgcggcgcacgtccttcgacgcgggttccgcagagaaatactgttctgccatggtcgctccatttctgcgggattcgccgctctcgtatgccgacctgtatcagccggcctatgccggtacgtgccgatctatgccagcatgtcacctcatgtgatgataataaaggaccatagaagaatcgtgaaccattccaaccaaacgaggcgcacttgaccgacaacacccagtacaccgacatcgaccgcggcaacaacgacgttacccctgaaggtgtgctggccgggcagtccgaagtgctgctcgacgacagccagcgcgcgaccggctggcacgaggacgccaaccaggaatgggaggagcgcgaggcccgcaacgagctcaagcatgtcgctggtctcggcgagctgcaggacgtcaccgaagtcgaataccgcaaggtgcgtctggaacgtgtggtgctcgtcggcgtctggtcgtccgccgtcaccacgcaagccaaggccgaggaatcgttgagggagttggcggcgctcgccgaaaccgccggtgcggtggtatgcgatggtttgctgcagcatcgctccaagccggatgcagccacgtacgttggttccggcaaagccaaggagattgccgacatcgtggcgcgtgaggaagccgatacgattatcgtggacgacgacctgccgccgtcacagcgccgtgcattggaggacgcagccaaagtcaaggtggtggatcgcaccgcggtgattctggacatcttcgcccagcacgccacctcgcgtgaaggtaaggcgcaggtggagttggcgcagctcgaatacatgctgccccgactgcgtggttggggtggttcgctgtcccgtcaggccggcggtcgcgcggcaggcgcggatgcgggcatcggatcgcgaggcccgggcgagaccaaaatcgaaatggaccgtcgtgtaattcgcacgcgtatcgccagactgcgccgtcagattcgtgagatggctccggcacgtgaggtcaagcgcggttcacgccgtcgcttcggcctgcccacagtggccgtggtcggctacacgaacgccggcaaatcctcgttgaccaaccgtctgaccggttcggccgaactggtggaaaacgcgctgttcgccacattggacacggccgtgcgccgcgccaaaacccgcgacggacgcgcttacgcctacgtggacacggtcggcttcgtgcgccgcctgcccacccagctgatcgaggcgttcaaatccaccctggaagaggtggccgaggccgacgtgatcctgcacgtggtcgatggctcccaccctgacccgttctctcaggtcgacgcggtcaatgacgtgttggcggacatcgaaggcacggcctcgattccgcgtattctcgtattcaacaaggccgatcaggcggacgaggcgacacgtgaacgactcgccgcactgcagccggatgcgttcatcgtctccgcctataccggtgagggattggacgagctgcgtaccgcggtcgaaagtctgctgccggtcccgcatgtgcatgtcaacgctctgctgccgtataccgctggctccctgatctctcgtgtacgcgaatacggcaaggtggacaaggtggagtaccgcgatgatggcatacagcttgaagcggacgttgacgcccatcttgccgctcaggtggtcgaacagtccattgactaacgtgataaacatcacagtttgtttgtgagcgctaacaaccgttggaaacattaccataccgttatcagacagggtggtgtgctggtagcaaaacgtcttagcgggtttatagagtgaaaaccgttagttacaaggcctgccattcatcagcagaccgcctttgaagagaggttcatccatcatggcggaaactaccgttaagcccacgaagcttgctgttattggtgccggtgccgttggctccaccctcgccttcgccgctgcccagcgtggcgtcgctcgcgagatcgtgcttgaagacatcgccaaggagcgcgtggaagccgaagtgctcgacatgcagcacggctccagcttctacccgaccgtgtccatcgacggttccgacgatcctgagatctgccgcgacgccgacatggtcgtcatcaccgctggtccgcgtcagaagccgggtcagtctcgtcttgagctcgttggcgctaccgtcaacatcctcaaggccatcatgccgaacttggtcaaggtggctccgaacgccatctacatgctcatcaccaacccggtcgacatcgctacccacgtggctcagaagctcaccggtctgcccgagaaccaggtcttcggttccggcaccaacctggactccgctcgtctgcgcttcctgattgcccagcagaccggcgtcaacgtcaagaacgtgcacgcctacatcgccggcgagcacggcgactccgaagtcccgctgtgggagtccgccaccatcggtggtgtccccatgtgcgactggaccccgctgcccggccacgatccgctcgacgccgccaagcgcgaggagatccaccaggaagtcaagaacgccgcttacaagatcatcaacggtaagggtgccaccaactacgccatcggcatgtccggcgtcgacatcatcgaagccgtcctgcacgacaccaaccgcatcctgcccgtgagctccatgctcaaggacttccacggcatctccgacatctgcatgtccgtgccgaccctcctcaaccgtcagggcgtcaacaacaccatcaacaccccggtctccgacaaggagctcgccgctctgaagcgctccgccgagacgctgaaggaaaccgccgcccagttcggcttctgataaaaaatcgctgtacggagcgcctttcacaccgcacaaggttcgaactacctttgtaggccttcaccttgtgcggcacgaaaaatcgcacacgtacagcgattttttataccctgctgaatgcttccagagggagcattttttattcgtggaattcgttggaggagggggagctatagccctcgggctcaagctggaaggtggtgtgggggaccgagaccgggaagtgctcgcgcaggcaatcctgcagttgggtgaggattgtggcggcatcttccatggtgaggtctttgtcgactaccacgtgggccataagaatcggcatgtcggtggacaccgtgctggcatggaggtcatgcacggcaagcacatgcggcacgtcttccagatgctcgcgtaccttatcgagatcaagaccatccggtgtttcctccagcagcaccttgaccgcgttgtgcagcagcttgatggcgcgcggaatcatcatcagtgcgatgacggcaccggccacggcgtcgaagccattccatccggtggagatcattaccagggcagaggccaccacagacaccgagccaagtgcgtcgttcattacctcgaggaacgcggccttcatgttcatgttgtcttcgcgctgcgaggcaaggatgaagatcgagatgatatttgcgacaagacccagaatgcctacgaacagcagcaagccgatatcgtcgatttccgctttggagccgccgaacagacgcatgccggcctctaccaacgcatagatgccgacgataagcaatactacggcgcccgcggcagcggtgagcacctcaagcctggcccagccccaagtacgagtgttgttgggcttgcggcgcatcagtatggcggtgattgtggatgccaccagcacggacatatcggtgagcatatgaccggcatccaccagcagggccagtgagccggttaagacggccgacaccacttcgatgaggaagaccgaaccagtgacggtcaacgtggcaatcagcctgcgctggtgcgcggcagggtttacggatgtggatggtgcgggtgtatgggtatgggccatgtgtactccttcgctctatcgagttgaaaccgcttctcaataccatttgcgatatggtctgaatacgacgaaaccccggcgcgaggccggggtttcgtaagcagtgtgcgactatagcacgaccagcgcgattcagcgcacgctgatcagctggtggcgaacaggctataatttgcgcagtacggtgaccaccttgcccataatcgtggcatgtgtgccgtcgatgggcgagtatgcggggttgtgcggcatcagccagacatggccgttttccttgcggaaggtcttcaccgtggcctcgtcatccaacagagcggcgacgatatctccgttgacggcggaattctgttcgcgcaccaccacatagtcgccatcgcagatagcggcatccaccatggaatcaccgtggacttccagcatgaacagggtgccggagccggtcagccgttcaggcagacgcatgacgtcgtccacatgctgttcggcggtaatcggcacgccggcggcaatacggccaacgagcggtacgtcatgtgattcggcaatggcttcggcggggaattggtatatctccgccacattgctggcgctggttgcctcttcgctggcttgtgatggcttttcggcattcggggcggatcctgccatcacctcgatggcgcgacccttgttcgcgttcatgcgaatgaagcccttgtcttccaaaacttgtagctgatgcttgaccgaagacggacttttgagcccggcggcatttccgatctcccggaaagagggagcaaagccttgttcgtcgatatgcgtgcgaatggcgtccaacactttgcgctggcggtcggtcagggtggactcgtccggcttctgcttgggggagaggggaatggtgctcacgtcagggctcctttcgttatgtcaccagcataacgtgttgttcgtgtgaaatcaaacatctgttcgagtttcgacttgaccgtgtcgaacatttgtgccattataagaacagttgttcgatagaacatctgttcgagagaggtggtcgtgatgactggttcaatggtgatggccccggcccgtagcgcacgtgtagctatgcagcatgctggaacgtcccgccggaatgtgcgtgggcggattatcgcagtgatgatcgccttggcgctggcctggtgtggtttcggcgcgcttaccgctcagcgggcccaatcagatacgggtgccacgcaggtgaccagctatatcgtgcggccgggggatacgctctggtcatatgcttcggctattacacctgctggccatgatgtatcggaaacagtggatgagctgattacgctgaacaatctcgagtccggaacattgcaggccgggcagcgcattattgttccggttgagtaaatgaaacccgagcggcatggtttttccgcccgtacacgttattctggagagcatgcattgccctttttgccagaaccccgacaccaaagttattgatacgcgcattagcgatgacggtcattccatccgtcggcgtcgcgtatgcccgaaatgcaacaagcgttttaccacggtggaaaccagtatgctgctggtcactaaacgttcgggtggcgtggagccattcagcagagacaaagtgatttccggcgtacgtaaagcctgccaggggcggccggtcagagaagaggatctgaagctgctgggacagaaagtcgaagaggatcttcgctcccgaggccttgccgaagtcacctcagatgaagtgggcaaagccatcctgaaaccgttgcgtgacttggatgtggtggcgtaccttcgattcgcgagtgtgtaccagaactttgcaggtctggaggatttccaaagcgccattgatggtttgcgtgaataatatgcgaatgccgtgcaccgtgatatgcgagtgattcgcaaaccatggtgcgaaccaatcatgaagccctgcacttatgaaagagacccgtcagcgacgggtctctttcatatcaatcgaggatgagctgcgtcagctgatgacacgcatgcgaacggtgccctcgatgttgcgtagtgcttcaagcgtggcggcgctgggcttctgagccacgtcggtgaccacatagccaagttcgccttcggtggccaacgactggaaggaaacgttgatgttctcttcgccgagcacgcgattgacatgagccagcacaccaggaagattgtcgtgcagatgggcgatacggcacacgcccttgcgttcacctaggttgatctgcggtaggttcacggacaatgaggtagaacccttgaaccagtaatcctcaagacgctgagagacgaaatggccgatggattcctgagcctccaaggtggagccgccaatatgaggagtcagaatcatattgtcttcgttggccagtgaggtctcgaacggatctccgctcttcttcggctcaacggggaacacgtcgaccgccgcgccagacagatggccggaatcgaggtgctgcttcagagctcccagatcggcgacgaaaccgcgcgaaaggttaatgaaaatcgcgtcctgcttcatgtgggcgaattggtcttcgccgaagaagccggtgttcgacttgcggccatccacgtgcagggtcacggcatcggactgttccagcagttcgttgagggtatcgcaacggtgggcgttgcccagtgccagtttctcctcgatgtcgtagaacaccacgcgcatgccgagggcctcggccagtaccgacagctgggagccgatgttgccgtagccgatgatgccaagggtcttgccgcgcacttcatgcgagccggaagcggacttgtcccacaggccatgcttgatgtgatgcgtgtgtgcgggaatgcggcgcatcaagcagatgatgtcgcaaatcaccaattccaccacggaacgggtgttggagtagggggcgttgaacacggcgatgccacgcttgccggcatgtgccagatcgacctgattggtgccgatgcagaagcagccgatggcgcttagcgtaggacgcgcatccagcacgcgggctgtgacgttggtcttggagcgtacgcccaccaagtccacgccatccagcgcgtcgatgagttcgtcctcgctcagggctcccttcatggtctcgacttcgaaaccgtgatcacgcagcgatttggccgcgtcggggtgaatgttttccaataacagtgctttgggcatgcttcataccttagatgttcagggacttttcgtccgttcttgtccgaactataaccagtttctgggtcggcctggtcattgccacgtacaggtccgaggcggcgaccaggcggctcggcgcgtcatcctcgatgagaccgggctcgaccaccacgacgacatcgaactccagacccttgaccgtttcggtgccgcagacgctgatttgctcatcccattcgggctgctcgatgagccttgcgtattcggccgggtcaagaacggcggccagtttgcggcgcacggcgtcgcgcaccggggcgatgagatcatccggacagatgacggcgatgcggccggtgccgtctgccgaaacgaattgttcggcaagctgcgccgcctgctcggccgtcgtttccagcaaggacgacatgtcgggcaccacattgcgggacaccgaatcggggatggtgcgcaccgcattgaccgtggagatgtagaggccttccttctcggcaaagcgtgaggcgagttcggaaacttcctgcggattacggtagttgatggtcaactcgttcagatcccagtggctttcgccgaacaggcggttcatcgatttgctccagcgtcgggtgccacccagcgccgaggtctgcgccacatcgcccacgatggtgaacgagcgggaggggcaacggcggatcaacatacgccagtccatggcggtcagttcctgcgcttcgtcgaccacgatgtgcccgtaggtccattcacggtcggccgcggcccgctgcgcggtcagctcggcgtcgtccccgttcatctggtcgagcagcatctgactggagacgatgcctccacccagaccggtcgcggccagcgtgtctttggcatactgctcttcggcggcacgacgtgcgtcggcggcggactggcgggccaccgtcttgggatcggggcccagcatatccatcgcttcgtcgagcagcggaatatcggagcgggtcagcggggagcccttggggcgggcaagtgccgcgatgtcgttgtcggtcagccaaccagccagagacttcagacgttcgggatgggcgaacagctgatcgatgagccatggggcggtcatcggcagccagcacaggttcagggtcttgcgcacctgctcgttcatacgcagcaacgacatcgcgcggttcagctccgcctgatccggcgtgtaatcaagctgttcggcataacggttctgcatgctggtcagcatcgaacggataaaggtctcgcgggccttgttatgaggttgccgggtgcgcttcgcgtccgcctgcgcctgctcgatatcagtggccagcattggtacctgaatgccgctaatggttactgtcggcagaacagcgggaacacgcacgcgcgcggcgatggcattggccactacggaggtcatgcgtcgatcgcccttgagcttggctgcataaggggagtcgaccgccgtggcggtgatgccgggaatcagatcgctgatggtgcgtgagaccacgccggtctcgcccaaggagggcagcacctgatcgatgtagtgcaggaacgccgagctggggccaacaaccagcacgccggaacgttccagcgtgcgccggtgcgtgtacagcaggtaggcggcgcgatggagcgccacggccgtcttgccggtgccgggaccgccctgcaccaccacggcacgattcatgtcggagcggatgatgcggtcctgctcggcctgaatggtggccacgatatcggtcatcttgccggtgcggcgtgagctcagcgaagccagcagcgcaccctcgccggtcaacgtgccggcggaagacgcctggccgacttggtcggaatgcacgtcgagcacctcatcctcaacgcccacgacttcgcggaaactcaaggtgatatgcctgcgcatcacgatgtcgccgtgattggagggggtcgcctcatagaaaggacgtgcggcttcggcacgccagtcggtcagaatcggctcatggtccgggctcgacaggccgatgcggccgatgtaatgacggtcgccgttcttggcgtcgagacgaccaaacaccagccgatcctcaacgctgcgcaattgcgtgaggcggttttcgtacattgtggcaaaggagtctcgttcgctgcgttgcgtgggggatccgtgggagccggcggcgcgtacggtgtccaggcgttgccacatttcggctcgcagatcatccaatcgtccataggcgcgatcgacggcctgctgctcctcatgcagctgggaggcgtaactcgacatgctgttctcttcgttccatttccgtggggcagaaaaaacttaaggcattcaaatttaccgcacaccccctacgtcagtgatgcggacaacccggaataggtgaattcagcgtgaattcgccatgctgctcggtcggtggagtgcgcaacgtggattggatgtgcggagcgcccattcgtgcgacagtcgtggccgacacgcgcaatccatcggtaattgccctaaaagggtgagcaaatcgtgcatgagtggggagaaatggggaatcgtggggtagagtggtgaaccagttggccgaagtgtatcccacgtaacgatgaaggaggtggagccatggttgccgatcagacgattcgcgacgctgatgccaacgcacaaggctccaccactatggctgatctcatggctggtctgccgccgctgcttctcggcacatatacgccgaagatcgacgccaaaggccgtatggcgctcccggccaaattccgctcccagctggggcagggcctggtcatggcccgaggccaggaacggtgcgtgtacctgctgccgttcgatgaatttcgccgtatcgcctcgcagattcagcgtgtgtcggtgggaaacaaagccgcccgcgaatacctgcgtgtgttcctttccggtgccgtcgatcagcagccggacaagcagggccgcgtgctggtgccgcagatgctgcgcgattacgccaatctgggttccgacgtcgtggtgatcggcgttggcacccgtgccgaactgtggaataaggacacgtgggagtcctacctcgccgagaaggaagagggatattccgatattgctgacgatgtgttgccggaggtggaattctgatggttgatgtggcgaatattcatctgccggtattgctggacgattgcgtgaacctgatggcgcctgccctggaacatgagaacgccatcgcagtggattgcaccctgggccttgccggccattccatcgccttcctcaaagccgcgccgcaggctcggctcatcggcattgaccgtgacagtgaagcgctggggctggccaccgaacgcatggaacgggaggggctcgccgatcgattcatcccggtgcatgccgccttcgatcagctcgatcaggtgttgacggaccgaggcatagaacgtgtggacgccgtattcatggatctgggattatccagcctgcagatcgacgaaaccgatcgtggcttctcctattcgcatgatgcgccgctggatatgcgcatggacgtcagccagccgttgacggccgaacggattcttgccacctatgatgcggcggaactggtccgtatattcaaggaatacggtgaagaacgtttctcgcgtcagatcgcccgcgccatcgtggcacgtcgagacaaggagccgtttaccaccaccgcacagctcaaccgtctggtcgatgaagtggtgccgcaagcccaccgcccggcgggcaatcccgccaaacgcgtcttccaggcgttgcgcattgaagtcaacggcgaattggacaagctcgcctccacattgccgcaagccgcgaaccgactgcatgtcgggggacgactggtggtggagtcctatcattcgctcgaagacaaaaccgtcaaatcgttcatggcacaagggctgcgagtggatgttccggctggtctgcctgtcataccgccggatgcccaaccgtttttcacggatctcacgcgaggtgccatcaaggccggcgaacatgaaatcgcagccaacccgagatcggcttcggtgcggttgcgggcggtggaagtcagccgtgatattccgtcacgatggaggaaacgctttacgcaaaccgcgcagggcctgaatgacgtcaagatacaaggctccgcgtctccgggcagagccaaaaacacagcgcgaattcgtacaaggaggggataacggcatatggcaaccacacgtaacattcgatcgaacgcggctccggcctcgaaccgaccgcacaccaagcatcagtcctcctcccgacctgagctgcgggtggtctccaacccgcgtggagacgagcggggcaatgtcgtcggacgggtcatcgaatggaccagaacaagaagcgcaccgctggtgcacgtggccatcgcagtgatcttcctcgtcggcaccttgttcggtgcgctgatgttgcgtacccagatggtgcagaactcgtttgaggcggcacagatcgaaaccaatatcaacagacttacccaagatgtcgaaggcgatcaggccaaactcgatcaattagtcgcgaacctgcccgacaaggccagcgacatgggcatggtcccgcagcaaggatcagtgtccatcgacttaagcggataccagtccaacaaaggcggaacccagtgaacaccattcgtcgcatcgtagagttcgccaaggtcaagaccttcgcgttcaaatgcattgccatcggcgccgcattggcgttggtggcgtcggcatgcgtgattcagctggcctccacccagctcatcggcggccgtcaaaccgcacaagcggccacggctaaccgcaccctgaccgtgacgttgagcgccaagcgtgggcgtatcctcgacgccaacggctccgtgctcgctcaaagcgtggagcgttatactatcgtcgccaatccggaggctgcacaggagttcgagccgattacttgcaatgacagcacccgtgattactgccacgaaattgacggcaaacccgtgggtgctaccggagcggcggccgtgggccgactgctggccaaagtcctggatatgaacgccatggaactgggagctgatctgtccggtaccgggcagtatgtgattctgaagaaagacgtgaccccacaggtcaagcgcagcatcgaggcgttgcacctgggcggtattgtctggggtgagctgagcagtgaaagactgtatgcggatggcgatctcatgggcgcgctgcttggcggcgtgaacgacaacggcgatggcgtcgccggcatcgagcaggtcgagaacaagacgcttaccggaaccgatggccatgaaacctaccagcgtggtaatggcggcgaagagattcccggcaccatgaccgaatcggtggcggccaaaaatggcgacgatgtcaccctgaccattgaccgtgatgtgcaatggtatgtcaaaaaggccttgaaggaggccgaatccaagtatggcgcagcgtgggcgatcgccgtggtgcaggatgtccagagcggggagattctcgcactggccgatagcgatgaagtacaggctggtaccgatgcggcgaagatgagcccgtctcgggccgtgtccgaaaccttcgagcctggttcggtgggcaaggtcatctccatgtccggctatctgcagacgggactgcataagatgagcgatcaattgtcggtcccggaccacatcacacagaagggccagacctacaaggactcattcgaccatggcactgagcgctggacgctcgccggtattctgcagaactcatcgaacgtcggcatgattatggccggggagaactatccggatgagcaacgctacgagtacctgaccaaattcggcatcggacaaccgaccggactgaacctgcccggtgaatcgagcggtctgctcaccagcccttcggcatgggatctgcgtacgcgcaacaccatcctgtttggtcagggctacgccgtcaacgccctgcagctcaacaacgtggtggccaccatcgcgaacaagggcgtcaagcagcagcagtcgatcatcagatcaaccaccgatgccaatggcaagaccactgagaccaagaagggcgaagccacccgcgtggtggatgaaaaggtcgcatcggacatgatgaatgcgatggaatcagtggcggagagctacaacaagttcgtcaaggtcgatggttaccgcatggccgccaagtccggtaccgcagaggtgcagggttcggatggcgcgctctcgtccattctctccgattattccgtggtgattcccgcggacaacccgcgctatgcggtcaccgtggtgctgaaggatccgaatggtgtgttcggcggtctgacggccggccctgtttccgcacagatttgtgagttccttatgcagaaatacgaggtgcctgtctccagtccacgaaaaaatgctattccagtcacgtggtaaggatcaggggagaaaggcgatagcccatgagtgcagtgagcgaatccatcgcccagcgggtgaccttgggaatgctggtcgaacggtacggttttgaagtcgatccacccttcgccaccaatgtcaccattacctcactcagcgatgccgtggataccgtgattcccggctcgctgttcatctgcacgcatgagcaggaacccgatgtgctgcatgccgcgcaggcaggtgcctatgcggcgttgctgccacgcgcgtccaaagggcagatcgccaatgccgatataccgttgctctacggcgattgcgacgatcgcgtactcggcgatctggccagcggcctggccggcggaccatccaacgccatggcggtgttcgcggtgaccggtgcggatgagcaggccgttgacgcaggcgtgtcccagctctccgaattcctgcacatgctgggcaatccggtggcggtaatcaccgcatccgggtccacgtcgatgacacgtaccatgaacctgaactatcctctgggcatcctcgatatgcagcgcgcgctgtccgtgtgcgccgaagacggtgtggcggccgtgatcatcgccatggatgaccgcacattggccgagcatgcgttggaatcggtgaacgtggatgtgctgggcacggaagatgtcaacgcaagcgcaagcttggacgaattgaagacacgctacgcattcgttgcggaacatgacatgtccatgacctcgtcgacacccgaatcggatgaaatggctgcggattcaccggcaatgtacgaccgcgtccgactcgggcacatgtccttggccatcgccatggtactggccgccggcgtgaggaaaaacaacatacgcagtgccctgcatgtggccaacaatctcaattaagtccgtggatgcgggacgaagcgtaatcgtaaaggagtttgaaacaccatggttccgatgagtgtggaggagatcgccaaggccgtcgatggtcgattgatcggagacgccgattccgagtctcgagccaccaatacggtcagcgactcgcggcaggccggccccggatcggtgtttgtggccatccgaggcgagcgtgtcgatgggcatgactttgtggcgaaaaccgctgaacagggagccacggtggccatcgtcgaccatgaggtggagtccgatggcctgccgcagatcgtagtgaaagacacggtcgacgcccttggcgagctcgcccgacacaacatcgttcgccgccgcgagctggacggcgacttcgacatcatcggattgaccggttcggtgggcaagaccaccaccaaggatctgctctcctccctgcttgccaccgtaggcccgaccgtggctccggtgggatcgttcaacaatgagatcggcctgccgctcactgcgttgcgggtcgatgagcacacccggttcttcgtggctgagatgggtgccagccatatcggcgaaatcgcgcgactgacccgtatcgcaccgccgaacacggcaatcgtattgaaggtcggcgtcgctcaccttggagaattcggctcccgcgaacgcatcgcacaggcgaaaagcgaaatcgtgcagggactgcttcccggaggcaccgcggtactgaacgccgatgacgaacacgtggttcccatggccggcctggccagcggcgatgtgctgtggttcggcttgggatcgtcgcaggagcccgaggtgcgggccattgatgtcactgccgaccggtccgatcatgctgaattcacgttggtcgatgcggacggcaaccatacgccggtgcatctgggcattcctggacgtcacaacgtgatgaacgcgttggccgccgcaaccgtggcgatgcgttacggtatggcacccgaaacggtggcgcggattctggcctcgcagcacaccatcagccctcatcgcatggcattgtccacggtgaatcgcgaggggacttccttcacactgatcgatgattccttcaatgccaatcccgactccatgaaagccggcctgaacgggttgaaggcttggaactcaaatgacggcaaggatccgttccgcgtggcgctgctgggtgccatgctggaactcggcgccgatgagacggcattgcacacctctatcggcacgtatgcggccgaattgggcatcgacgcgatcatcgcggtcggttccgcccaagaccaacatctcgatgcactggcacaggctctggcggacggtgcccgtcagagccaatccgcgtcggtggattgcgtacacgacatcgatgcggccgaacagctggtcatcgacttggcgcgcaaccattccgacgctgtggtactgctcaagggatcgcacgcgtcaggcctgagcgctttggctgaacgctgggcaaagaactgacccgataaccaccccaagaaaccgacaagaaagagaagctgcacgtgattgctctgatcattggaatgctggtgtcgctcatcgtcaccttagtcggcaccccgctgctgattcggctggtccacaagctgcactatggccagtacatccgccaggatgggccgcagtcgcatctggtcaagcgcggcacccccacgttgggcggcgtggtcatcaacttcgcgattctgctcggttgggcatcctccgcactgtaccgatacctgcgttcgggcgacgtgccctcctggtccgcggtgctcgtactgttcgccatgctgtcgatgggtctgctgggctttatcgacgacttcgccaaggtgcgtaagaagcagaacgaaggcctatcggtgggcggcaagttcatcggccagttcatcttcgccaccatctacgcggtacttgcgctgctgattcccaccaaatcgggattccccagtgcgcaggcgggcatcagcttcatcgaacagccgttcttcaacttcgacttcgccggccgtgccgtaaccatcatcctgttcgtcatctgggtgaacttcctgatgaccgcatggactaacgcagtgaatctgacggatgggcttgacggtctggcggcaggttcgtcgatgatcgccttcaccggttttggcatcatcgcattctgggaaagctaccacatcaagggcggcagccatggcggctattcctatgctgtgtccgatcctctcgatctgaccgtcatcgccgtatgcgcggccgtcgcctgcttcggcttcctgtggtacaactcgaaccccgcatcgattttcatgggtgataccgggtccctggccttgggcggcctgttcgcagccctgtccatcgccacgcacaccgaattcctggcggtggttctgggtggactgtacgtcatggaagccatgagcgacgtcatccaggtcgggtacttcaagatgacccacaaacgtgtattcaagatggcaccgatccaccatcatttcgaactgaagggttggaccgaaaccaaggtggtggtgcggttctggatgatcgaactcatcttcgtgctgctcgccctgacgattttctacggcgactgggtcacccgctccggcctgctgttcagctagcggaaatctgggtgggattatgctcacccacggaattcctatatcaggaggaacaatgcaagtagcggataagacagtggtgatcgctggactgggtgtgtccggcacctcgttggcggaggtattgagggaatgcggcgcccacgtgattggcgtcgacgagaggaagcccgaggccggtctccgctcctttgatgacgtggactgggaccatgtggactacgtcatgtcgtccccggtgttcaacccccgcaccccgttcgtgctggaagcccaacgccgtggcatccccgtgatgagcgaggtggaattcgcatggcagctgcgtgtgaataacgagcgcaccggtactccggctccatggatcggcatcaccggcaccaacggcaaaacctccaccaccgagatgacctcggaaatgctcaccgcctgcggactcgacgcgccgaccgccggcaatatcgcctccggagacatgagcatgagcctgtctcgttgcgccaccaatcctcagcacgacgtactgtgcgtggaactgagctccttccaattgcacttcaccgattcgctggcacttgactgcgcggcgatcaccaatatcgccgacgatcacctcgactggcatggcgggcgcgagaattacgccgccgacaaatccaaggtgttccacaacgccaaacgcgccatcgtctacaatgcgcaggacgccaaagtcagcgaactggcggccgaggcccaaaccgccgaaggatgccgcaaggtgggattcacgctcgaggccccccaggccggtcagatcggcattgaagatggctggatcgtggacaggagcggcgtggccggcggcgcagtgggggagccggtcagactggccgccatcaccgatttcacgcatctggcagagccggacggctcactgtacccgcatctggtggccgatgcattgacggcattggcgttggtgctgggacttggcgctgatcgagataccgcgttgaaggcgcttacctcgttcaagccgggcggccatcgcatcgaaaccgtggctgaggccgcagtcgagggcggctccgttcgtttcgtggacgattccaaagccaccaacggtcatgcggcacgcgcctcgctgtccagcttcccggccaagtctgtgatctggattgccggaggtctggccaagggcagtcgattcgaggacctggtcaaggaccaggcacataccatcaaagcggccgtcatcatcggcaaagaccagcagccgatggtcgaagcgtttgccagccaagctccggacatcccggtgaccatcatcgatcccgaagacaacgataccgtcatggatcgtgccgtcgaagcctgcggcacgtatgccgccgccggcgacatcgtgcttatggctccggcctgcgcctccatggaccagttcaagtcctatgcggatcgaggcaatcgattcgccgccgcagccaagacgtggagcgaggtgcatggcctccactgatacccataagcgtaaggcatacagagcccctgacaggcccgcactcgagatcaccgactacacgggttggcgaagcttgctcaacccgctatggtgctaccacggattccgcatggccgtggtggggctgacatgcttcggcctgatcatggtgttctccagctccacggtcaccatggccgcactgggcaagtcgccgttccttcagcttctgaaccagggcgcgttttgcctgatcggcttggtgctgggcttcgtggcattgacgatgccggtgacgttctggaaacggaccggcgtgttctttgtggtgggtgcctgcctgttgcaggcgctgacctttactccgctgggtatcgacgtctacggcaacaaaggttggctgaacctcggcttcaccactatccagccggccgaattcatgaagttcgcgatgtgcatatggctgccctcgtcgttgcatgcctgcagcaagatgtaccacaagaagggaatcaaagcatatgccgcgccgttggtgttgtatgcgataggcgtggcgctggtgatgggcggcaaggacctcggcacggccatgattctggtctccatcggaggcgtggccttcctgatcgtcggattccccggcaaatggatgggaatcggcgtattgggcgcggtggttatggtcggtgcattggcggtttccagcccgaaccgcatgcgtcgtattctggccacatatggtgattgctcggccgctgacgcgcagagcgtatgctaccagtccattcacgccaagtacgccatcgcctccggaggctttctgggattgggcatcggcaattcgcgtgagaaatggaattacctgccggccgcccataacgatttcattttcgcgatcatcggcgaggagaccggattcgtcggttgcgccatcgtattgctgttcttcgcgattctcgcctggtgcatgatcgtcatcgcattgcaggtcaccgatcgttatgttgccatggtgctgatgtgcgtcaccatttggatcgtgggccaggccatggtcaacatcggcgtggtcgtgggtgtgttcccggtattgggcgtgcctatgccgttcgtctccgcaggtggctcatcaatgatcatgtgcttgacggcggccggactggttgtgggacttatgcgttctcaaccgcagataaaacagtcgcgtcagagcgcgtaagtagactcggtaatcatgaatcaaggcacaccacatatcgttcttgctggcggcggtaccgccggacatgtcaatccgctgctcgcggtcgccggagcgattcgcgacatcgaacccacggcacaggtcaccgtcatcggcactgcggtgggtttggagaaggatttggtgcctgaggccggctacgagctcgacaccatcgaaaaagtgccgttcccgcgtcgccctgacctgtacatgcttcgcttcccggcaaaatggaagcgagaaaccgccaaggtgcgctccattcttgaaacgcggcatgcggatgtcgtggccggattcggcgggtatgcttccgcccccgtctacgccaccgcacacaagatgggcattccgattgccatccatgagcagaatgcgcgtgccggcatggccaataaactgggcgctcgttgggccgatttcatcggtaccgtgtacgaaggcaccggtctcaaaccgcgtgccggagccgacgtcgagcgcgtcggtctgccgttgcgcccggccatcgcctccctgaccaaacgcatcggtgacgaccgtgccgccgtacgccgtgaatcggccgcgcagcttggcgtcgatccgaatcgtccgctggtgctggtcactggcggatcgctgggagcgcaaagcctgaaccgcgccatcgcctcctccgccgcagacctgttggcccacgcacaaatcatccacttgaccgggcgaggcaaaatcagcgaagtacgcgaactggtcacggcctcggccggcgtggacgtgcttaccggcatcggccccgaatcggccggacaaggtgactaccataccgccgaatatctggaacgaatcgatctggccttcgcctgtgccgacttggtgatttgccgcgccggagccggatcggtatccgagctggctgcactgggtctgccggccatttacgtgccgctgccaatcggcaacggcgagcagcgtttcaatgccgaaccggtggtgaacgccggcggcggccttctggtcgcagacaaggacctgaccccgcagtgggtgcatgagcatgtgcccgatctgctcgccgatcacgaacgacttgccgaattcggccgcaaggcatgggaatacggcatcagaaacgctgccgaaatcatggcccggcacgttctgcaattagccgaaccatccaaatagtattcagatatcatcccgtgcgcgatacagaccaatcccgtcccgcaacacgagatacggtcataatatagggtgctggaatccccaaaggagttttgaattgtctcaagatcagcccatcgtgcttgaccccacgtatgcctcgttcgatgctgcggcccgccccgcggatctcggcgccacccatttcatcggtatcggcggcgccggtatgagcgttctggccgaaatgctgcacgccgaaggagtcgcggtggacggctccgatcgcgcacacagcgccaaaaccgaccgacttgaaacgctgggcatcaccgttgaattcgggcagcgagccgaaaatgtcgcccaggccgagaccgtggtctactccagcgccatcaaaccggacaatccggaaatcgtcgcagcgcacgcggcaggcaagcgcattgtgcatcgcagtgacatcctcgctctgctcatgaacggcaaacgagccgtcaccgtggccggagcgcatggcaaaaccaccaccagctccatgctgtcccacattctggtgaacgccggtgctgatccaagctacgccatcggcggctttatccaaggcccggacggcaccacgctggacggtggacacgcgggcaaaggcgatattctggtggccgaagccgacgaatcggacggcagcttcgccaaataccatccgaccatcgccattatcaccaactgtgaagccgatcatctcgaccattacggcgacgaagcccactaccgtgccgcgttcgttgcccacgccggccgggccaccggtcacgtgatcatcagtatcgacgaccccgacggacttgccgtgctggaggccatgcccgccgacgtgaaatcccataccgttgcctacggcactaccgcgcgtgaatccctgcccgatttgggcggtgccgcgtatgtctggatcgcttcggaaagcgagaccgcaggcagcggcgtcgaacagctcaccctgcatctgccggccgcggtgacggcgggggagccggtgtctcagagcgttgccctgaaggttcctggcgtgcacaatgcgcgcaatgcggccgccgccatcagcgctgccgtgctgctgggcgtgagccccgcagacgcggccaaggcggccggcacattcctcggtgcggcacgccgctttcaggtgcgcggcacggtcaagcaggtcactgtagtggacgattacgcccaccatcccaccgaaatcgcggccctgctggatgcggcccgacgccggtaccccgattcggccattcgtgtgatcttccagccacacctgttctcccgcaccaagttcttcgcgcaccagttcgccgaatccttggccaaagccgatgacgtcattatcaccggcatcttcccggcccgtgaaaagcagaccgatttcccggacatcagcccctccaccatcgtggacgcggctgagggactcaaggacgcttccgcaggcacgtggattcagccggtcgaggatatgtgcctggccgccaagatgatggccatgcgcgcccaccacggcgacgtgatcttcaccgtgggcgcgggcgacatcaccgacatggatcaggtgctgctcaccgcacttgaggcccatcgggaaagctgcgagtgatgtccgggcgcacggtcagatccgggggcaatgacaacggctcacgtcgttcgtccggaagtccccgcaagccgcgcaccatcggttcacgcggaaacacgggtcactcgtcgaagtctcgcgctccccggtccgtgtcttccgggcatgagatcaacgagccggagatcatcgacgatgtgacggtagccaagggccaggccggtgccttcgtcgatgcacgacggctgcacagcgaggattacgttgccgaaacgctgcaccagaccaccggctccctaggagtcgtatcacgcccgaaagtggtgaatttcaccgaacgcgccaaagaacgcaagcgtgcgaacgtacgtgtcgttgcgttacgcgtgttgattgctgtcgtcagcgtggctgtagtgacggggctaacgtggctgctgctcttctcgtcggtgtttcgtctggaaaccagcgagatcggcgtatccggtgccaacgaatgggtgagcgcgcagaccatccatgccatcgccgataagcaggctggaaagtcgttgttcctggtctccacccatgaggtcacagagcaactcaagtccattcccggcgtcagcgaggccaaggtctccaaacagttccccaagtcgatgagcgtggaagtcaaggcgcaacggcctgcggccatgctgaaaagaggcgataccctgaccgcggtggattcccaggcgcgcgtgttgaactcggtgaagaacgccaacgtggatggcatcccggtgatcgaggtcaaggatatagacgccagtctcaagaaccgttcggtgaaggaggcgctggcgattctgggcgcattgccggaatcgatgcgtaagtccattaccaaggtcaccgctgagacgcaggattcggtgaccaccacgcttaacgacggtgaccgcgtaatcatttggggagactcctcgcaactgaagctgaagctggcggaagtcgaggaaatcgacaagaacatcaccgctggcacggctggctttgccggcaaacatcagattgatgtttccgcatcccagaagcccatcatcaagtgacggcgattcagttggttccgttggttccggggcggcgttcgctccgttggttctgctgacaacgttggtcccgtcaatgccggggcgatgttcgctgccggcgatttgcgcgagtagcgccatagggtgtatgctgaaaagtccggccgaaaagccggaagcttgataactcaagattgggggcgatcggtttcgacggtgacctgttcgctgcagggaagcgtgccgagaacgccgggtccgctcgtggatgaccccggcaaaagaataagtgctaaatctaaccgcactgagttcgctctcgctgcctgatttttagtcaggattaaccagtgagcagccgctccgttcactcctcctcgtctttgggaggatgctgagcgtcgtttagaagacttgctgatgcagttgagcctcagggctgcatcgggactttaactgcggatatgctcgccatcagttgtctgcgacatcgatgggggcagaaaaatcgccaacttggccagcagactacgcacgtagaagactgtgggctcggtcatcggaccggggttcaattccccgcgcctccaccaatccgcctcggcggaaacaagccgcttggctttacgaaagtaaggctgagcggcttttcttattcccgtcgattccctcgtattctctcggtttcacgggataatgtgggcaaaatgtgggcaaaaatcgagcccgcgaagccctctgccacaacgcgagaacggccccgaccggcaagtaggccgactcgggttgagtcgtctgcgatgccggacggggccgaactgtgcgtggtggtcatgcggcgaggtcgaggcgctgtctgatggcgctgacgccgatgagcgcgccggcgaggatgccgagcgcgttgagcgtggtcactatcgcgtccacgtgagtccagccccatgcggggccgaccgtactgacgaacagggcgagtgcgggcaggacgatgaggcccaaccatttgaggatgtcgtagacgcggctggggattgcgcggttggcttcgatccgacgacctgcggttttggagaccgccgctctaccagctgagctacgcgcataggcggtcatgccggttgattgccatggcacatgaccattgggtggatatgagtaaagcccctgaaccggttgattcagaggctttcacactaatcctgatacggagtatgccacggggcggattccccctactcccgcttgtgttttgttttttcaggcggcttggatggtgaggcgtccgccgagggcgtggattaccttggcgatggtctggaagctggggttgccgtccttgctgaggctcttgtagaggctttcgcgccccacgcccgcgtccttggcgatctgggtcatgccccgggccttggcgacgttgccgagcgcggcctgcatgagtgcggggtcgtcgtattcggctatggcgttgaggtaggcgatgatgtcctgttcgttttcgaggtattcgctggtgtcgtagtcggtgaattcggtgctcattgtcgttgttccttgtagtcgttgaggatgtcgtgggcttgtctgatgtcggtctgctgggtgcttttgtcgccgcctgcgagcagcagcatgagcacgttgccctgcatggcgaagtagacgcggtatccggccccggtgtggaaccgcatctcgctgaccgggcctcccacgggtttgatgtcgccgaatggcctgcctgcgagcttgcagacatcgagccgggcttggatggcggccttcgctttgtggtccctgagtttcttgaaccacttgcggtattcggcggattgcttgatttccatacctctattgtatcctacagactacatcatgtcaagccgaatggccgctggagcccatagccaacgcaagaatctcccgtatgttgaactcccggtagccgtcatcgacgggtctcgagctggggagtttgccccggttgagccagttgctgatccgcttacggctgacctcgtacccgtagtttcccttgagccattggctcatgcctgccggtgtcttggtcaggtggattgattcggcctcggcttggctttgctcgcgcagctcggccacgttgacggggtcgccgcatttgcacaggcgcagcgcctcgcccttcgcggccatcacttcgcgtccgcattcggggcagacgccgattatcctgcgggtgcgcggcctgcggtcaaccttggcagagcgtccatggtgcctcgacctgctggctgccgcagtattggcatggttcggtggtgatgactgcacacgttgtactgtagggaaccatgaaagtcgtattgcaacgagtatccgaagcgtccgtggacgtggtcaatgaattgggcacgctggatcccacgttcgagccgcagcagattggcccgggattcatgattctggtgggcgtcaccgatgaggacggcgacaagcagatcgcctggttggcccataagattctgaatctcagggtgttcgaggatgcgcagggcaagatgaaccgttcgatccaggacatcggcggcgagattctctccatctcgcagttcacgctgttcgccgacgtgcacaagggcaatcgcccgagcttcatcaaggccggcaagcccgagcatgccgatttcatgtggatcaagttcgacgaggcgttgcgctccgggggagtgccggtgaaggaaggtcgtttcggtgcgcatatgcgggtcggactggtcaatgacgggccggtgaccatcgtcatcgacaccgagcatgacatgcctgacggaacacgctgaattgcgatagtaatttgacatcatatcccgttccctccaatatgttactaaagcgctttagtcttctgcgggcgagggcgcatgtcgatatgtttcccatgaacgggcagcacaatgatgtggccgcacaagcggcagagataaggggagtgaacagcagatgttcctgaaacctgaacagcaactggagcggtgcaagcgcatagtgcgccagcgcgtggaccctcatatccacccatcgatcgcacagcttgcggtggagtcctttgacattcccggagagccgatgcccactgacgagttcttcgagaagctcaatcgaggtgacatcgacttcaagccgtttacgctcggcggtgaatggggcaccacatggggcacagtctggttccgcctgaccggtaccgtgccggccggctacccgaaaggcaagccgctggagctcatcctcgacctcggctggtacccgcactcctgcggcggccatatcgagggcctcgtctaccgtgccgacggcaccgccatcaaagccgtacacccgctcaactattgggtgccgttcatggatgctgagggcaacgcgcaagtgccggtcgccgaagacggcagcttcaccctgtacctcgaagccgccagcaacccgctgctgctcggcgtgcctccgttcattgagaccgaactgggcgaccatgccaccggcaagccggacgagccgtacgtattcaagtccgccgatctggccgaattcgatgaacgctacgagaactactccgtcgatctcgacgtggtgagctccctgatggaattcgccgacaaacagtcgccgcgttactggcaactcgccaaagcattgcagcgttcgctgaacgcctacgacgagcgcaaccccgaatccgtggaagccgcgcgcgcagcactcgccggcgtactggccaagccggccaatgcctcggccatgaacgtcagcgccatcggccacgcgcatatcgactccgcatggctgtggccggtgcgcgagacccgccgcaaggtggcccgcaccgtatccaacgcattggcgctgatggacgccgaccccgacttcaaatacgcgatgagctccgcccagcagtacgcctggctggaagaggatcatccggacatcttcaagcgcatgaagcggcgcattgaagaaggccggttcatcccggtcggcggcatgtgggtggaagccgatggcatgttgcccgccggtgagtcactgatccgccagattgcaaatggccgcaaatacttcaaggaacatctcggtgtggagcccaagggcgtatggctgccggacagcttcggctacaccggcgcatggccacagatcgcccgccgtgccgggtacgaatggttcctcacgcagaagatctcgtggaacgataccaccaagttcccgcaccactcgttcatgtgggaaggcaccgacggctcgcgcatcttcacccacttcccgccggcggatacttatgctgcttggtgcaaggtccaggaactcgactacgccgagaagaacttccaggacaaggatctctccgaccgctcgcttctgctcttcggtttcggtgatggcggtggcggccccacgcgcaacatgatggagcacctgcaccgctacgagaacctcgaaggcgtctccaaggtgagcatcgaagagccgaatgacttcttcgacaaggcgcatcagcagcttgcagagaacgccggcccagaaatgcccgtctggaagggcgagctgtatctcgaactgcaccgtggcaccttgacctcgcaacaggacatgaaacgcggctgccgccaagaggaatcgctgttgcgcacggtcgaatacctgggcgcagccgccgtgttgtccgatccggagtacgtctacccgcgcgaggagctggaccgcatatggaagacgctgctgctgaaccagttccacgacatcctgcccggctcggccatcgcatgggtgcaccgcgaagcccgcgaggactatcgccgcgacctgaagcgtctcgctgaaatcgcccaagacatgtgcgccgtgctgcgcaaggccaacccgcaggccgacttgctcgccgaggcccgcatcagccagttccgcaatgacggcgcgtcttggcatgccaaccgcatcaacgaaccgaccgacgcgctttccgtactgacccagacattggacaacggccgtgtactgctggccaacggcgtactgtccgtcaccatcgaggccgacggtacaatctcgtcactgcttgacgaggagcatggccgtgaactggttccggccggcacccgattgggccaatacgaactgttgaaggacgaacccgccgtttgggatgcctgggagatcgaacgcgaatccctgctcatggcgaatgccatgaccggatcaatcgaatcggtcgataccgaaaacggtgcggcacgagtccgcgtgcgtaccgccgacgatgacaccgtcatcaccaccaccatcacgctgcacccgggttcacacacgctcgatttccacgccgacattgactggcacgaacgtgaacgcttcctcaaagtcgatctgccgctgggtatcgtggccgaccaagcgacatacgactgccagtatggtctggtccgccgcccaatcgtcaaaaacaccgcatccgacgaagccaagtatgagagcagcacgaaccgtttcgccattatcggcgatgccggttacgccgcggccgtcatcaacggatcggtatacgggtccgatgccacgccgatcgccgggaatgccgccgaaggttgtgactcgggcaccatgttccgactgtcattgctctccgcgccgaccttccccgacccgcgcaccgatatcggctcgcacgagttcgactggtccgtggtggccaacgccacggtgggccgtgcgcttgacgccgcttgcgcactcaacgcaccgacgcttcatgacatgcccgacttagcgccgctcgcctcgatcgagtcagcaaacggcaccgtggtgttggactggataaagctggccgacgatggctccggcgacctgattgtgcgcgcctatgaggcggccggcggcagggccgatgccacgctgcacgtctgcccggcgctcgcaggcgcttcggtgcatgagaccaatgtgctggaaggcgacgatctggccgccgacctgccggtcgcgctgcaagacggcacacagaacgccgaaggcgccacactgcacttcggcccgttccagctcgccaccctgcgcatcacgcgctgaattcccgtctgatgcttctgcctcctcgaaccatgaggaggcagaagtatgtcgtattacggttttcccaattgtcaccacacccatcatttccatcagacacagcaaaggagaactctccatgtttcttctgcccaatcagcagttggagcgctgcgaccgcgtcatgcagcagcgcgtcaaaccgcatatccacaccacactcgccgcatgcgccttgcgttcgttccacaatcccggcgaaccggtgccctccagcgaatttctagccaaagtgcgcaacggccaagtgcccttcgaacctttccgcgttcccggagtctggggcaccacatggggcaccacatggttcgaggtgaacggccatatcgacatggcggcggtcaaaggacgaaaagtcgaactcatggtagacctcggctggctcgatcaccgcggccccggattccaatccgagggacttgtctatcgtgccgacggcaccgccatcaaatccgcgaacccacgcaaccactggattccactcgtctacgcggacggcagcagcaccgtagaactcgatgaacatggcgacttcaccgtctatatcgaagccgccgccaacccattcgtcgaaggccccaccccgttctcacccaccgaactcggcgaagaggccaccggcacctgtgatttcccatacacactgagtcgtatggacgtcaccatcttcaacgaagacgtgttcgcctactacatggatctggaaaccgtctcctcgctgattcgtgagctcaaggacgacgacccgcgctactggcagctcgccaaagcactgcaacgctccctgaacatctacgatgaacgcgacttggaaaccgtgtcggcagcccgtgcggcgctcgccggcgtactcgccgaaccggccgcctccagcgcaatcaaacacatcgccatcggccacgcgcatatcgactccgcatggctgtggccggtgcgcgagacccgccgcaaggtggcccgtaccgtatccaacgtgctggctttgatggacgaagacccggacttcacgtatgcgatgagttccgcccaacagtacgcatggctggaagaggagcatcccgacctgttcgcacgaatgaagcggcgcatcgaagagggccgcttcatcccggtcggcggcatgtgggtggaatccgacaacatgattccttccggcgaatcattggtgcggcagatcacgttcggccgccgatatttcaaggagcatctcggcgtcgcgccgcgcggcgtctggctaccggacagtttcggctacaccggctcttggccgcagatcgcccgccgtgcaggattcgactggttccttacgcagaagatctcgtggaacgacaccaccaagttcccgcaccactcgttcatgtgggagggcatcgatggcacgcgtattctcacgcacttcccgccctcggatacctactgctcgtggatgagcatgcacgagctgatgtattcgcagcgcaacttcctggacaaggacctctcccgtaacgcgattctgctgtacggcttcggcgatggcggtggcggccccacccgtgagatgaccgcgcgcatccgccgcgaccatgatctcgccggcgcgccgaagatcgaattcggtactcccgaccaactgttcgaccgtgtgcgtaaggatatcgtcgacgatgcgcaaggggagaccccggtgttcaagggcgaactgtaccttgaactgcaccgcgccaccctcaccgcccagcaggacatgaagcgcggctgccgccaggaggagtcgatgctgcgcgtcaccgaatacctgtgcgccgcggcccgcatcaagaacccggactatgtctatccgcgcgaagagctggaccgtatttggaagacgctgctcctgaaccagttccacgacattctgcccggttcggccatcgcatgggtacaccgtcaggcgcggaccgaatacgcgcgtgacatcgctcggctgaacgagatcgcccttgaagccgggcgcgcgatcgcagccgtggaacccgatgacgcaaccataaccgacgccgtaatcgccccatattcccgccaagcctgtgagacgtgggtggtacgcccggcttcgagccgagccgaagcgggaaccgcatccatggctcgggtcgccgttacccatgacggcgatacgattgtgctcgacaacggccaactgcacgtgcgcattgaagccgacggcaccgtttcgtcaatcgtcgatcagcgaaccaatcgtgaactggtgcccgccggcacccgactgggccgctacgaaatgctcaaagacgaacccttccactgggacgcctgggatattcaacgcgatgcgttcctcaccgccaacgcgctcagcgaggcatcgattgcaagcgtggacgaaaccgccaacggtggggccgtcgtgcatgctgtcactcgcgcgaagggcgttgaaattcgtacgggcattgccttaaggccgggctccgccacactggacttcaccgccgatgtggactggcatgccgtcgaacagttcctcaaagtggatatgccggtcaccgtgcaagcggtgaacgcgcaatacgaatgccaatacggtctggtcgaacgccccatcaacaagaacacgcgcagcgatgatgccaaattcgaaagctgcacgcaccgcttcgtgcggatcgccgacgccgactatgccgccgctgtggtcaacgcctccacctacggctccgacgtcagccccatccacgccgatgcggcacatggcaccggccgcggcaccatggtgcggctctcgctgctgtccgcaccgctgtaccccgacccacgcaccgaccaaggcgcacactccttcgcgtggtctctggtcgctgacgccgatatgaatgcggtgctggacgaagcggcgcgacttaacagccccgtaataggggagttgcctgatatggcgccgctggtctcgctcgccgacgccaccggcgtcatcgtattggactggatcaagctcgccgatgacggttccagcgatctgatcgtgcgcctgtacgaggccgccggcggcaatgccacggccacactgcgccttgacgccgctctctccgatgccaaggccagcgtgcaggaggtgaatctcatggaggagccggagctggatgccgaactgccgcgcgcgctcgccggtgacgaaccaatgcctgccgacggtgcggtcgtttcgttggcgccattccagctcgccacgctgcgtattcgccgataagggatattgggcctaggctcgatattttgggtcgcgcccaaccgtaacggaaccggaacagaccggctctgccatacggttgggcgcggcccattattgtatgagaagagggagagcgatcccgttgggcaaatatcaatgcgacacgcgacgatgaattcgttgcgtgcatgtttcgattgtgttatgtttttactaaaccgatttagttaacaggttcgcgactggccggaagctaaaacggtttagtctcagcgatgagaactgaataaaggttgtgataccacgtcaatcaccgcgacgggtgactgtgctggagcacaacgattaggtttctccgtccacagcagggcgggatgaaaaaggaatcaaaaggaaaggaaaacatcatgttttctatgaagaagatcctcgccatcgccggtgccggtgcgatgctcgtatcggtggctgcctgtggtagcggaactgcgggggatgacggcggcaagaaggagatctccttccagacctggaacctcaagaacgacaagtacaccccgtatttcgaggcgctgatcaaggcctatgagaaggaccacccggacgtcaccgtcaagtggcttgacgccccgtccgatggttacgaagacaagctgtccagccaggctgcggccggcgaactgccggacatcgtcgacggcggcaactccatcctgtacggtcttgccaaggccggcgcgctgctcgatgtctccaagcaggctccggatgcggaaaaggactactacgaaggcgcatggaagtccgtgaccatgcagggcaatggcatcgagaagggtgcctacggcctgccgtggtatgtcaacgatggcccgacctactggaacaccgagctgatgcagaagtgcggccttgatccgaacaagattccgaccacatgggatgagtacttcgccgccggcgacaccatcgtgcagaactgcaaggatgtctacctgggcaccacgatgggttacaacaccgaagatctgatgaccgcaggcgtcaagtccttcatgaacgatgaccacagcaagtacaccttcaatgatgaggccggtgtcaagcagatcagccgcttcgttgagctgtacaagaagggcggcatcccgccggaggccctcgactcctcctggagccaggccgccgatctcttccagcgtggcaacctggtctccatggccggctccgcctactccgctgacggcttcaagcagaacgctccggacctttacaagaacctcgcagtcggcccgcgtatcagcaacgacggcaagtccgcttccgtggcctacgagatgctcggcatcagcgccaactcgaagcaccccgacgttgccattgacttcgcccgattcgtgaccaacgagaagaaccagatcgagttcgacaagaaggcctccgtgttcccgtccgccaaggggggtctggatgacgactactacaagagcatcgacgaaagcacccttgagggcaaggctctgaagatcacgctcgaccaggtcaaggacggctacggctctcgtccgtccgagttcaccgacaacaacggctccaagaacttccagcagcagatcgccctcgctatgcagggcaagcagaccgccaaggaagcccttgacaagtccgtcgagttcgcaaacgagaagctcgcacagtgagcaacgcggcactcgccgctgacaggtcggaggcccgcacggcctccgaccggcctgaaccgatgaacctcaaccacggcaagaagcagaatcgtagcttcggcaccatcattgccccctacctgtttgttctgccagcgttcgcgattgtgtttgtattcatcgtccttgcggcactcaacactttcaggcttgctttcaccaactccacactgctccgtccgggaaccttcgtcggactcgaaaacttcatcaaactgttccatgacgagtacttcctcacggcactgctgaactccacactctacgtgatctgcgtagtgccgttcatggtgatcctcccgttgatcctggcctatctggtcaagggcaactcccgcatcatgggcttcttccgcaccgccttctacatgccggtggttatgtccgccgttgtggtgggtatgatctggaccaacctgctggattccgccggtctggtcaactccgtgctcaaggcattgaagatcatctccaagccggttccattcctcaccgatcgatggggcgtgctcttcagctcgatgttcgtgacaatctggctgggcctcggctactacatggtcatctacctgaccgccctcgccaacatcgatgaatccctttacgaagccgcctccctcgacggcgctggccctgtccgccagttcatctacgtgacaatgcccggcgtgcgctccacgatgatgctcatcatgatgctgtccaccatcgccgcattccgagtcttcaacgaaatctacgtgttgaccaacggctccgcaggccccggcggcatggatatgacgatgtcgatgcttatcaagcgcgaaggcaccggtatccaggcccgcactggttacgcgagcgccatctccatcgtcgtgctcgtcatcgtcggcgtcatgctcatcgtgcagcagatcgtacaaaaacgaggtgaggactgatgaataccaacacgcataaggtcaccgtcggcaaagtcgtccagtatctgattctgattctgatgttcctgctgctcgtcggcccgttcgtctgggaactgtccctgtcgttcaagggcaagggcgacaacgtctacgccgtgcctccctacctgatgccgaagaccccgacgctggacaactacatttccgtgttcaagcaggtcccggtattccactacatgctcaacacgctggtggtctgcctgatctccatcttcggcaacgtggtcttctccacgatggccggctatgcactgggacgcctgaagtggcgtggccgcggactggtgttcaccatgttcatgggcaccatggtcatcccgatcgaaggcgtgatgatctcccagttcctgatcattcgctccatccacctgcagaacacactgctggcagtcgcactgcctggcctgtgcggcgccatcaacatcctgctcatgaccaacgccttcaaatccattccaatggaactcgaagaggcggccatggtggacggtgccaacctatggcagcggttcttccatatctgtgtaccgcaggtcaaaggcacgatgaccgttgtcggcatcttcgcattcgtcggtgcctggaacgacttcctgtggccgttgatcgcgatctccgatgaaagcaagtacaccttgaccctcggcatgaaccgactcaagggcatgttcatccaagatccgcgactgatcgccgccggtgcgctcgtctcgcttatcccgatcatcgtcttcttctgctgcttccagcgctacttcttccgtggcttggaacagggtggactcaagggctgagcggactggaaaaaggaggtactccaatgaaattcggagtcaactacacgccgtcgcatggctggttccacgcatggctcgacccggactgggacggcatcgacaatgatctcaagcagatcggcgaactgggtatggaccatgtgcgcatcttcccgatctggccgtatctgcaacctaatcgcacctggatcaacaagaagggcgtggcggatgtgcgccgcatggtgcacatcgccggcgagcacggtttggatgcctatgtggacgtgttccaagggcatctgtccagcttcgacttcctgccttcatggctggtcacctggcatgcgggcaacatgttcaccgatgcggacgccgttgcggccgagcgtgaactggtcaagaccatgaccgatgagctgtccaaggaacccgcgttcaagggtctgaccttgggcaacgaggtcaatcagctgtctgacaggccgcatcccacgaagatgagcgccacggaccggcagatcgacgcatggctggacgcgctgcttccgaccgccgccggtgaagggcacaacgcgctgtacagcgtcaacgatggcacctggttcatcgatgggcacccgttcactccggtgcagtccgccaccaagggtgatatgacagtgattcactcctgggtgttcaacggcatcgcgcaaggatacggcgccaccagtgaggagtgctcgtcgtacgcactgtacctggccgagctggccaaggcgttcggcaaggattccgagcgcccggtgtggctccaggaagtcggtgcgccggagaatgtgctggaaaccgactacacgccggaattctgccgcaagaccgttgaacgtgccatggattgccggaacctgtggggtgtgacgtggtggtgctcgcacgatgtgcccgccagcatggaagacttcccgttcttcgagcactctctgggcttgttcgacgagcaaggccagctgaagccgatcggccgtacgttcggggaactcgccgcacagtaccgttccgcattgccggctcagccgaagaccgtcgccgtggtgattgatgtggatgaggccggaaacccggtgaaccgcagtgcgctcggcccgggaggctcggtgtgcgacctgtggatgaagctgcaggtggcgggccagcgcccgaccatcatcacctcgcaggtggcggccaatcaagaggcgctcgcgcagcgtggcattctggaattgcacgctgacgaacacccctatgccgcccgttactacactgcggtttcggacccatcgttcgaaacggctgattaaaccgatatccggttgtggaatcatctactccttgttccacaaccggatattttcaattgcagtgcgcacaattgcagtgcgcagggcaaaacataagatccggtactcgccgaagagcgagaagaacgagaagacaatatacgagaagggggagcgctcaatgagcatcaactgcgccgcagtggaccgactcattgattcgatgagcttcacgcagaaagttggccagttgaaccagcgtctgctcggttggaagtccgtggaacgcaatgctgcgggacggctggtggcctcggacgagctcaagcaggagattgaccgatggggtggactcggcaccctgtacggtctattgcgagccgacccatggtctggtcaacattggggtaacggcatacgccctgaggagcggactgaggcgattgccgtggtgcagcaaactgtgctggaacgtggcgcgcacggcatcggcgtattacttagcgaagaggcgcctcacgggcatcaggcgctgggcggcacggtgctgcccaccaatctgggtttgggcgctacgtttgacccgcagggggtgcaggaagcggaagccgcggttgccgcagaactggccgccagcggcattcatatcgcattggtatccggtttggacatcgcccgtgacccacgctggggccgttgcgaggaatgcttcggcgaggatccgctgatggctgcccgcatgtgcgaggccatcgttaccggcatgcagggtgagcatcgcagcaaggtcggccacgggggagtggccgtggtgctcaagcatctggcggcgcaaggcgaggccgtgggcggccgcaacggacagtccgccgtactgggcccgcacgatcttcatgaaattcatctgccgccggtggccgccggtgtgcgcgccggtgccttgggctttatggcagcctacaacgatatcgattctgtaccttgctgcgccaacccgtggctgctcaaggattatctgcgcgaccagctcggtttcgacggcatcgtgatggccgatggcctggccgtggatcggctcgaagacatggccggctccattcccgcggcagggcgcgccgcactgctcgccggcgtggacgtctccctgtgggatgaaggattcacccgcctcgaagaatatgcggatgacgaacaggtagtggccgctgtcgacacggccttgcgccgggtgctggaactcaaagccatgttcggtctcttgcccgaagacggtgccgataccgccgcaattgccatgccgagcgccgacgccatcgcgcaggccactgcggatgggcgtgagcaggccaagcgcatggcccgcgaggcgataacgctgatcaatgatggccagtctgccgccacgctcgacgatatccgcagcgtcatagctgatgctcaagccggccctgtgattgtcgccggcccgtttgccgacgatttcggctgcttcctgggcgattacaccgcccctctgcccgccgatgaacagtcaagcgtctaccggcaattggtggcacgtctcggggaggaccgggttctcttggccgccaagccgagcgatgcgccggccgatcaatgggcgcgtgcgtcgaccgtggtattcgtatgcggcagcaccagcgaacgcagctatgacagtgaattcgacgacaatggcgcggcgaaggccgtaaccgaatacggtgccacctgcggcgaaggcgtggacttgtctgacatccgcctgccttggcaccaggatgaaatgctggacgaagtcgtggcattgaccaccgctccagttgtttcggtggcggtgtgcggcagggcgcatgtgctgactcatgtaatgggtcaatccgctgtgacgatttgggccggatatgctggccagtatggtccgcaggccgtggctgatgtgctgattgacggtgccggtttgccgggctgccttcctgtaacgctgcctgcgcatcccgcagccattccggttcgatacaacgaccggcaaagtgccgcccatgtatacaaggatgcggcggaaccggtattgcgcgagtttggctacggagccggttctttggctggagtgacgtttagtgggatgcatgccgatgccgaatcccgcacgaatgaggtgttggtgcaggtgacagcatatgccggcgaccataagacggccggttcggtgaacctcttcgcacacgtcagtggcggtcgtcgtatcccacgtttggcagtgctggtcgattccgttgctctgacgcttgaggcgggcgaaagccacgcggtatcgttctcggtaccctttgaacggctgatggacgaagctgatgacaatgtgcgtgtgacgtttgccctgacagccgctttgaatagcgatgatacccgacatacagacgactgcgataccagcgtaagcatcgtgatacatcgctgacgatgtgcatgagacaagtcggagaggggtatgttccgtaagtctcatgacctactcattgcggccgatatggtcggcgggtgagagaaaaagagaatgtgggatatggcgttggtgagatatcgccgtatcccgtggctcaaaccgtcctaccggtttgagccaccgtctacgcaagccgcatagacggttgatttccggcgtgagtcggaggaaatcaaaggagattatagatgagattgtcatcaggcgatcccgctgggcgtgcttctgcttggactcaacacaggaaatggctgcggactggcttggccgcggtgctgtcgatggccacgctggcggcactggctgcaccggcaagcgctaccgacaccatgccgtggggaggccagtatgccgataccagtcatccggagcaggctgcgggagccaaccagccgtatcagcatggttacaccggtctagatattctgaactggaatccggcagtggataaggattcggagtacctgcgttcccgcgtgccgttgcagacccgcatcgccgccaacgccgcgacgcagaaggacccgaaccttccggccgatacggagatgttcaaccttgccggcgactatggcaacgcgttctttgagtcgttccatgacaacaatgtgttctcgcagtacctgttcaactactggcagtacacggattattacggcacctggcatggccagccgaccgcgaacgtgccgaagagcctctacgatgagaaggcccagtctgattggactcagaaatggtttgaattcggtacgctgaacttgccaaatgcagcgtacacgaacgccgcgcataagaatggcgcgaagtcgattgcgacgattttctactcgggcaacgaccgtggtgaacagacctataaggatttgcttcaaggcaagcgtgccgatggcacctatccggtggccgacaagttggtggaaattgccaagtactacggctttgatggttacttcgtcaatcaggaatccaatgtaaactccgatgatgttccagcctatcgggatttcatgaagcagatcgtcaatcagggcatttacatccagtggtatgactctgcaacatacccgggtggtaatatcggctaccagaacagatttaacgagaaaaactcaccgtgggtgcaagatggggccgagggcaaaatctccgattcgatcttcctgaactattggttcagcggaaacatgctgaaagattcggccgaccacgctaagagccttggcattgatccgaagtatgcggtgttcgcaggcatcgaggccggacagcagaaattcggcagtatcggtagcaacgcggattatatgaacgtcaaccttgatgctgacggtaaaccgtatgtgagccttgccgcgctcggcaccgacttcgtctcccatgagctgggtgacgacaagaaggtctatccgaagtatcaaaaccaggtgttcgaccgtgaacgtcgcttgtggactggttcatccaccggagagaagggcacgacggatatctctgatccgtatatcgatgatggtacgagcagcgacggctggaagggcttcgcctcacagatcgccgaacgctccgtcatcggtggcccggtcttctccacggcattcaacaccggtcacggtcttgaatggcgggacaatggcgaacagaccagcaaccagcagtggggcaacatcaacctgcaagacattctgccgacttggcagtggtggattgatgccgattccgacccgctgcaagccgacttcgactatggcaaggactatgagacggcaccgcgcttcaactacaccaaggtcggcggctacgaaggcggcgattcgctggtgctgagcggcaagctctccagcgacaacaccgtccgtctctacaagaccgacttgagcgtcactgccggctccaagatcgaattgacctacaacaagctcaacagtgacgattccaagctgcaactcggcctcatcttcgccgacgacaccaataccgtagtgccggtggacgtggcggatggcgcggcgagcaacggctggaagaccgcaaccgtagacctctcccagtacgcgggcaagaaaatcgctacgctgggcctgatcgtcaaggccggagcgaacccgatcgacaactaccaggtgaacatcggcaagattaccgtcaccgacggtgctgcctacacgccggccgccccgaccggcttcaaggtcgagcgcgcctacgcggattccgacgaattgaccgtcaagtgggatctcgccgactacgccaccaccaagaactacctgctgtacttggacaacaccttcctcggtggccgctacgacgacaccctgtacgtcaagcacctgcctgccaagaccggcacgctgaagttgtacgccgtgggcgcggacggttcgcgctcgatggctgccgaagcgccgctgaacgaagcggcggccgtgtccagcgtgaaggttgagcccggcaaggacggtaacgtcaaggtctcctggaccaacccgcaggtctccggcgagaaaaccgtaaccgttaagtccgacaccggttcgtggcgttacgccggtcagccatactcccagaccgtcaaggtcgctgccgacaagagcgacgtgacgattccgaatgcgccggttgacggttcccgttatgtggtgactgtcgacaacgcaggtggcgctaccaccacggcagcaggtgcattcgccgatgccaccatcgagccatacccggcttgctcagtgatgtggaatggcgacaatgtgtcgctgattcgccccgagactcaggattggcgttacctctacatgaccgagaagtggaccgacgagaacggtaaaaagcaggagaagcagctgggtgccaagtacacctattcgcagaacactccgccgattaccggcattattcgtggccgcaccactccggagtcgtacaccaagtccattcccgacggccatgaactgtgggtgcaggtcgaggactacagcggcaacaagaccgatccggtcaagattccgacctctgacgaactcgccaagtgcacggtcaccgacccgactcagccggatgccaagaagtccacgctgaccgccgttgacggctcagccgtggccgatggcaaggacacgcgcacggttcaggcaacggtcaaggattcgttcggcaatccgctgaccaacgccgaggtggcgtttacgctgcccgagggtgtcacggccgttgacggcaacgccactgtcaagactgatgccgctggcgtggcttcactgaacgtcgtgtccacgaaggtgggcaagtacacggtgaaggccgcactgggcgacaagtccatcggtgagggtgtcaccatcgaattcaccaaggtcgcggtgacgccgaacaagcccggcgaccagaacaagcctggcgataccaagccgaacaagcccagccagaacgacaacaagaacaatgacaagaatggcgcttcgttgagtgccacgggttcgtcggtcattgcgattgtggcggccatggtggtgctgcttgccacgggtgcggtggtacttcgcgctcgtagcaagacggagtagttcgtcgcaatacgggtgttgatactcgtgccataagcgggatttaggggttgcccaatgggtgcccccctaaatcccgtttgttttgtcgcaggacatatgccgagaccagtgactaaaatgctttagttatttgactaaaattattgatatcataagagttagcgcacggttgatgcatatggcccaatgcgggggtgccgtcaaccgtatcgcaatagtcgcaatgcggtcgtaaaaaggagtgttcatgagatctgctcgcgaggcatcgtcatcgtctgacggcacgcagcgtgtgagcctgaaagacatcgcagatgaattaggcatctcgcagaccgcggtatccttcgccatcaatgatcggcccggtgtttccgcggaaaccaaacgtcgggtcaaagaggctgcagccaggctcggctggacgccggtctacgccgcacaagcactgggatcctcgaagaccatgaccataggctttgcccccgcacgatccacgcaggggctcacggatgaaagcttcatgctgcacttcatggcgggtgtgcacgcctcgctcagccccaaaggctatggtttgctgtaccgcccatgccgattcctgaacgaggagatgagcgtatacaaggattgggcgtcgcgcaagcgcgtggatggcgttatcctcgtcgatttgcgagccgatgatccacgcccggaattgttgaagaatctgggtgtgcgcgcagtgcttgccggaggacccgacccgaacaattatgtgccgtcactgtccatcgatgattcacgcacgatgggaaccgtgctcgaacatttgtcgtcattgggacaccgccgaatcgcctatctttccggcgatccgaacctggattattcacaggggcgtgtcgcggcgttccgcgcatttgccaaacggcgaaagctggaatccatcaacatcgaattcaccgattttgttgcggaacaggccgcgatgctcacgttggagatgctgcattcaccgaagccgcctaccgcgttcatctatgaaacggagatcctcgccgcggccagtcttcacgccatggccgaagattattccgctcggcagatggaggcgggggagggccatgcggaagtctatccgaatgggctgcccgccattgtcagttttgaagacagtttcatttgtgaggcggcgtatccgtcaattaccgccgcgcatcgtgatgccagcgaatacggtgccaaagtggccaaactgctgctcaaagtgcttgccggagagcaggtgagcggcaaccggcgaatcctcaccccgaaactggtgattcgggacagcaccgccaagcccatggataccatggcgtagaacggtcattgcatcggcttgcagacaatgacgtgcgaccagtacggcgttggcccccgtattccacgggggccaacgccgttgagaaagaggaagaaaaaaggatatagaggcttagatgctgtcgattattcagcgttcttcacggccgtcgcaatggacacggccgggtccaagaacggaatcagcgtggactggaaggcgtggtacaggtcggacttgcccggccagaccgtgccgatcacgtggttgttcttgtcaagctgatggaaccaggaaccgccctcgtggtcgatgacatgctcatcgacatactgggcgaatgtggcgtaccagttggcgtacatctcctcgccggtggccgcatacagcgtggcggaagtgttcaacgattcggccagcgtccaatgcatgcgatcggtgaccacgggcttgccgttccagtcggtcgtgtaggcgagtcccacggtgccgtcggcgttccatgcgtcggccacggcacgcgcgaacagatgctcggcggcgtcgacgtacggctgtgcgccgtcaaggttggcgaaggagcttaacgcccactgcgtgatcaagcgggcccattcgatgccgtgacccggcgtggcgccgtacggcttgaactgatcatccttcttgtcgacgttgcattcgaggtccagcgaccaatcggacttgaaatgttcggggatgcgccactcgttgtgcttcgcccagccgatcacatgatcgatgatgtgtccggcgcggacgcgataggtgttgttcccggtggcgtcggccacggccaagaacgcctcggtggtgtgcatgttggcgttgagaccacggtacgggtcgagctcggtgaattcggtattccaggtatcgacggccaaaccgatctcgtcgtcccagaaatgcttgtcatacgtggcgagcgcctcgtcaagcagttccttggcacccggacgtccggccagcagggcggaggacgcggcgagaatcacgaaggcatgcgcatagcagaccttgcccggcgcatgggtgccgtccgcgaacacctgcggataccagccgccgtgctcgtcgtcatgcagaatgccggtcaatcccttgagcgccgcgtcggccagctcgcccgcacccgggtatccgagcatggcaccaatcgaatacacatgggccatacggctggtgatccacgtttcgacgccgtgggaggggtcgagggtgccgtcggcgttcagccagccggaaccgccatccggcgctgggaagcccttgccgaacttcagcagctcgtaggtttcggaagccatgaaaatgcggttggcttcggtgccgagcgtataccgtgggttattggtcataatgattgttcctttccttaacgagaacatgcggtgggtgcgcaatgagcattcagcgggcacgtcttagtgtttcacgcgaatgccgaaatagtccatgaccagttcgcagaacatcatattcgaccagctgaaccattcgcgcgtgtacttggtcggatcatccacgtcgacgccttcgtgcatgagatgtgtaccggcgtcggtggctacaagacggtcgaggatatgcgccttgaagtccttgctgtcgctggtcatcgcctcgatagacagcgcgatcggccacacatagcgcggcggggtgtgcggtgagccgatgcccttgagatactcgccctcgtaatagtacgggttttcgtcgctgagcagcgtgcgtcgggtcgccagatacgtcggatcgtccggtgcgcagtaccccaagtaaggggccgccatcaaggagggcacattgctgtcgtccatgatattgacgtgacccaggccgtcggtctcgaacgcgtaaatcgtctcgctattgcggttcgtcgttttggcgtgggcttcgatgccttcggtgatggtgcggcgcagctcgccggcacgggcggcgatatcggcgtcatccagaatctcaccgccgaagatgcgttccagatagcccatcaccacggcggcgaacatgttcgagggtaccagatagtggtaggtgcaggcgtcgtcgctggggcggaagccggaccaggtcatgccggtgtacgccaccggcgaccccttgccgtcattgctcagcgattcggtggggatgtccgtgtcgcggatgaagaaatacggggagcgttcatgatgctgctcggtctcgaagacgtcaagaatcttcttgacgccggcaatgaattcggcatcgaagtgatcggcgttgccggtgttcgcatacagcatccaagccaactggatggggtagcacagcgaatccacctcgtacttgcgctcccaaagccaagggctggagaaatcggaccggtcgtccttgtcccaggaggcgccgttcggttcctcgttgaaggcattcgcatacgggtcgatgatgatgtagcggaactgttgccgtatcagaccggcgatcaggttcgcaatatcgctgtcttcggcggcaagggccagatacgggcgcaattgcgcggtcgaatcacgcagccacatggccgggatatcgccggtaagcaggaatgtggtgccgtcgtcatgccgtttgaccgtggtggtcagggtgtcggcaaagcaggcattgaagttctcggcccaggcggcgtgttcggtgccacacaggtccgtgatgtgctgcatgaaatccgagaccgacttcggtatcgcggtggtcgtcataaattcaacttctttgtttgagggatatacgtatcaagggaacagcattattctaaaccgctttagttcatgacacgcgaaaggatgtgaagagcatgagtgtgagcgcaccatatgaaaaaccggtgagatttcctgttcggagaatctcaccggttgcgatcagtcgattcgtgaagtcgcacgaatggcggataaggggatgggtggattacttgccgatttcagccagatagtcgggcatctcggccgggtactgcggccaggcaccggcctgggtgcagacgtaggcggcggtgttgacggccttgcggtgggcttctgccagcgtgtcgcccagcaggatgcgggcggtgaaggtgccggagaaggagtcacccgcacccacggtgtcgttcacctcgacgtgcggagtatccagcgtggagacctcgcccttgcgggagatgatggtggagtaggcggagccggcggtcagaatcacgtagtcaaggccgaattcctcgatgaaccagcgggaggcgtcttcgccggaggtgccgcggatgtcgaacatgtcgcgcagcagcaggagttcctcgtcgttgatcttgaagacggtggccgccttgaggagttcctcgatgaggtccttggagtagtggtcgccacgcaggttgatgtcgaagaacttcatcgcgcccggcttggtgtgcttgagcagctccgtgatggtggcgtgcgattcgggggagcgcagggccagggtgccgaagcagacggcgtcggccttggagaccacgtcgatgagctggcgggtgtacaggatgtggtcccaagccacgcccttgacgatggtgtactccgggatgccgttcttcagcgcgacctcgacggtggaggtcggccaggcgttgcgctggatgacggtgttgatgccggcctcgttggccttggcaatcagttcgtcgccgagctcatcctcgccgaccgcgctgatagcccagccttcggtgccgttcttcatcgcgtggtaggcgaagttgacgggggcgccgccggctcgcttgccgctcggcagcatatcccacagcagttcaccgaggctcagaacgatcggggtagtcatggttggtttcctttcctttgtttcttttaccgggtgtttcgtatggaacatcttgtgatgtcggcgcttggtttaggagacgtcaaagaacaccgaggggtgttcgaggaattgggtcaccgccactgctgcggcaccggagaccgccgcgtcggcggacagggtggataggctgatggaagtggaggcattgatttcggggatggcccgttcggccaccgtggcgcgcacctcatcgagcagtatcgggccggcttcggacacgatgtcgccgatgatgatgtgctcaggattgtatccattgaagatggtgacgcatccgtagccgacgtatcgggcgacttcgcggacaatggcgattgacgcttcgtcgccgtcgccggctttggcgaacagggcgcgggcggcttcggtgtgggtcatatcggccgcgccgggaaccacggtgccatcggcgatgagcatgtcgtgaatggcgggggtggagcagtagcgttcaaggcagccgacgttgccgcaatcgcaggggcggccgttgacgtcgatggagatgtgtccgatttcggtggcggcaccgaggaagccgttgatgagacgaccgttgtcgatgacgccgaggcccacgccttcgccgaccagataataggcgaggttgccgtcggcgtgcaccgacgggtcgaagagataatgtgcgagggctccggcgcgggcgtcctgttcgatgaacacaggcacgcggaaagcggtggcgaattcgtcgatgaagttgattttgcgccagccctgcatgctggacaccacggcggtgcggcctacgttacgcaggtaggggccgggcaccgccatgccgatggccacaatggacgggtcgttgtcaagcagttgttcgacgcgctggtggatggtgacgatggtgtcgttgatggtgttgccgtacaccgtgggcaggttttcaaagctcagggtgttgccacacaggtcgaacacgccgatctgcaccagcgagcgggcgaatttgatgccgatgatgcggaaccgcgtggtgtcgagtttgagaccgatggaacggcggttcttggaaccttccaaatcgccggtctcttcaatcatgccggcctcgataaggcgtgcggtgattttggtgatggccgcgggggtgagttccagtgccttggcgatttgcgcgcgggagctgatgccgttgtgatacaggtgcttgacgatgcgggagcggttggattcggagacactggcttgggaagtggcatgggtggtgtttgttgccatcggtcttaagtcctccttgtctgtaccgctgcgagttgttccgctcgtctttgaatctgaacttgattaagatattaacgctgttaattgattgacgcaatcaatatgtcattcggtgtgtcgtgcatgtgagtgtcgtcttgggggaatttgttaagatggttgtcaatagtcggatgcacactgatatcaagcgaaacgttcgatgaagaacaggggaggactgatgtctgaaaacactatgaacaatctcaaaatcggtgttgacgtgggcggaacaaaaatcgaagctgtgctggttgacgcaatgggcacggtattgggttccgcccgtattcccgccaggcatggcaacgatgccgtgatcgaagacatcgtcgctgtagcacatcaggcagcgggtgagcgttttgacgaggtgagggccatcggtgtcggtaccccgggcacggtggattcggccagcgggcatgtgggcaatatcgtgaatctcgacgtggtctcgctggatatggggccgttggtctcgcagcgttcgggcgtgccggcccatgtggaaaacgacgtcaatgccgccgccgtcggcgcggccaccgtattgggcggtgcggacggcatggccggtaccattgcgttcctgaacttcggcaccggactggctgcgggcatcgtcgaaaacggcgtgctgatgcatggctatagcggcgcggccggcgaaatcggccatatcccagtcgaacctcatcgcctcaagtgcccttgcgggcaatacggatgcttggaaacagtctgctcgggcgcatccgtggggcgtctgtggcccaacgccgacccgccgatgcccgacctgattcgtcgcgcgaaaaagcgggaggccaaggccgtcgatgtgctggacatggtagtgcgcgccatcggcgacaccatacaaatcctggctcagtccgttgatccgcgactcatcatcttgggcggtggcatggccaaaaccggcgaaccattggtcgaggtgatcacggctgagctgcgccggcgcgaatcgcaatgccgattcctcgaaacgctggacctgtcggcccggctgcgtctggcacctgtcggccaaccagtcggagccatcggtgccgccatggcggcgtagcctggcatagtgccggggcgtgggagatggggcctcagatttgtctccgaggccccatctcccacgcagtcctatatcgctttatgtcgtgctgcgccgcgcttggtcttgcgcgtttcgttgccggggtgaccggcttttatttggccaagtgttggaagaccacggcgatggcctcgccctgtacagtgatgtcaggtccgcattcgcagcgccgaatcaccgtgtgtttgtggaaggacgaggatgtggcggcatccagatattgctgggccgcgccgatgaacgtcgcgttgatgatgttcggctggccatagacgcatacgtctgccatatccaaaaggcccacaggcatggccagggcttggccaagatagcggcccgcccgagcaaggataccctgatgctgctccacgtctgctgcgctgagttgcttcttcaatgcggttccggaaatcatcgtctccaagcaaccgtgcttgccgcaaggacacagcggcccgtcaagatcgatggaaatatggccgagctcgccagccgcgtgcagttcgccgattaccggcgtgtccgagagcagaatcgccgaaccgatgcctctttcgatgcgcacgaaaagcatattcggcccgccttggccaaagaaacgttcggtgagcatggctgcggtggcgtcgttgctgacgtttacttcaagtccgaaatgttcggcgattggcgtggacaggtcgagattgttccagccgcgcatcgtggaggagcggaccacgccgttgtctaccacgccgggggaggcgactccgatgccgatgacctcgccatcggacatgcccagcatcttctcaatgagctcgatgatcacatctacggaaacgaatgagccggtgttcagggtgacttcggcgtgacgcagcggctggccgagcagattggtgactgcgccgtgcagcaggtgctcctgcgtcaggtcgatgctgatgatgcgcagtcgatcgatatcgatgctcagcagtgtgcctcgtttgcctttgccgccgctgggtgcctgaccggtctcgcgcagcaatccttcctccagcatccgaccgaccacatcggaaacggccacgcggctcaatccggtgcgtcggccgagctcggcgcgcgaatactggttggtggggaacaacaacctgaagataagttggcggttcttgcggcgcacatcggcgggggaagccttggccgcatggtcgtcggtcgttgtgttgagaccgagatatgacatgtttcctcctgcctgatggtgagcgagtggacggcgattgttgttccatacacagcttagacggtgaagcgcaatttcgtcgttgaaactgttatgaaacttcactaataaattccagtgtacctgtgtgaagcgtcaggaaacaccgtgagtgttcataaggtccaaaattgttagtatcattaacaaatagcgaatcaccaatcggcgctacgccgaacggtggttggaacgccgcgcggcacccggacgtgacaaggatgttgccattatccgcaagacgggcggcggtacagcgactcgcatcgggcgggccgcacggaactggaggaaaccgatgccggaaatcatcattgtcaagaacgaagccgaggccggcgagatctacggccgttgcgtggcggacctgatcaaagcaaagccggacgccgtgctgggcctggccactggctccagcccgctggccgcctatcaggcgctcgccaagatcgtcaaggacgaggccattgacgtttcgggcgtgcgtggtttcgcgcttgacgaatacatcgggctgccgctgacccatcccgagtcctatcatgcgaccatccat

SEQ ID NO: 42 - DNA, 17387 bp, Unknown
  R30_18m  MAG No. k141_15923
atccgtcacgtcaccgcgaacgaatggtcgacccgccgctatctcgacatgtcccggctcggtgacaacctcgtggaagcgaactgactatcgcgccatggacggccacgatccaaagtgcgcaacttttcgggcactaccccgagcttgcgcaatgcaggcgcaatacagtgcaaacagtacaaagcaacaataatggccggtctgagccagctgctccatgcgagggcagctggctcagaccggccattgtgtctgcaagtacatgcaattagagcatgaacatgtggaagccgttgagcgttactggttgttttgctttgttgttgcgctcagcagtgcgacggacgtccgtccgcagtgtagtgcagcgctccgtgaaccagcgccgatgtgaaatgcatgttgcacatgcccgcttcttctgcttcgtgcgtgcagccggcgatgctgcataggttcataccccgaatcatggtcataccccctctttgggatggcatccgtgccgccatctgccttcagagcatagcggacaattgttgcattgcctaggcggtacaacgctttctgtggcctgtatcacatccttgccggcgttctgcggcgtggttgggcgtgtacatgtgctcttgtgcggttttgttgtgtgtgatttgggtatacggatagagtttcttctctgcagtggcaagggcctctcggccggcgagccggctgatttctcccatgcgttgctcaatgatttccgttttgcgagtctgaacggcaaaatagctctggagaagtgccacttcttctttctttggatcaccgttttgagcaatgagatagcaggcgtatcgggtgagcttgacgtccgcgatggagcgggtggcaccgctgccgagagtcacgtctcgcgtagtgtcacggaaatgggattcaacggatacgccggaattgtcgcaagcttgcttggctcgtgtaatagctttgctgaagttttcccatctgtcgtaccccatataggtcattagctcgcgtgcataccaatactcaactttggagtcctcggtggtgtgtgcgatagtgctgagttcgctggttttgcgtgtgatttcgtcgcggttcatgggtgtgtccttatgtttttcatgaccattttcgtgactccacgaaaatggtcaaagccaataattgcaatggttttgaggtatgggcgcgctccgcccaactggcctgtcttcgtccgccttttcgaccagatacctcatggagcacaatgccaacgtcgctaccgttggcccagcaaatattcttagacgacgccccgaagtgaatatctatgcggctttcagaatatcaaagagcgtggagtgtgtgcattatgcgttccaaaaatagtttctagtaatgaattgtttacggtgtgagatattcttggggtgtttgcggcgctctgccgtgtggcgaatgggaatggatggtgctcttatgggatttgagcaggaagcagttagtgaactgtatgccagcgtgtggggcaatcgttcgacaatgcagagggaattcactcgtggagcccatggtgagcagttcgtgctccgggagctgtccatgaaggggacgcaaacgccatcgcaattggcatcggcgctgcaggccagttccggccgcatctccactgtgctgtcgtctctggagaaaaaaggctgggtcacgcgtgacattgattccaaggatcggcgcattattcgcgtgaatctcactgattccgggcgcgagcagtctcatcggatgatagaggaaatgcgttccgcaatttgctggattttctcgcaaatgggggagcggcgcacgcgcgaattcgttgacctggtgtctgagttcaccacatatatgtcgatttgccatccggggcggcctcggccgacggctgaacaagtgcgtgaggcattcgtggagcgggacaagcgcgtggctgaacacatggcagctaagcgcgcggaggctgagcgagactagcttcctcccgctggcgggtctctccctccgtcactgctgcgcggtgacacctccctcgtcagagggaggtaaaggtaattgaggacgctcacagcgaacatacagaagtgcgtataatatctcacagtgtaagtaatcaaacaatggaaactattaagacatcgtgaaccgataatcaccgataacccagccaacttaagaaccaatcgccaataaccaataaccaacccaaccaacacaaggggaaaccaatgtttcgcatcatgaaatacctctccaaagcggagatcggtcagatgctcatcgccctggtgaccatcgtcgggcaggtctacttcgacctgaaactgcccgactatatgtcagacatcaccacgctggtcgagacgccgggcagcgacatgaaggacatctggatcgcgggcggcaagatgctgctcatctcgctcggatccgtggcgtgtgccatcatcaccggctacatcgctgcgcgcgtggccgcctcgttcacccagcgtctgcgctcgctcgaattccgcaaggtcgagtccttcggcccggccgagatgagcaagttctccaccgccagcctcatcacccgttccaccaacgacgtcacgcaggtgcagatgttcatcaccatgggcctgcagctcatcgtcaagtcgccgatcatggccgtatgggccgtgtgcaagatcgccggcgaaggcttcgaatggacgctcgccaccggcatcgccgtggcggtcctgctggtgtccatcaccgtcatgatggccatggtcatgccgaagttcaaggtcatgcagaccctgaccgacaacatcaacctcgtggcccgcgagaacctcaccggcctgcgcgtggtgcgcgcctacaatgccgaggactaccaggaagccaaattcaccaaggccaacaaggacctcaccgagacccagctgttcaccaaccgcgtcatggcgttcatgatgccgttgatgaacaccgtcctgaacggcctgatgctcgccgtctactggatcggcgcttacctcatcgacgccgccgggctcaaggacaagctcaccgtgttctccaacatggtcgtgttctccaactactccgtgcaggtcatcatgagcttcctgctcatgagcatggtgttcgtgctctggccgcgcgccgacgtgtccgcgcagcgcatcatggaggtgctcgacactgagccaatcgtcgagaacggcaccaaaaccgccgccgacgtggccaaaaccggccagaggggcaccgtggaattccgcaacgtcagcttcacctacccggattcgcgcgaggcgatgctggaaggcatcaacttcaccgccgagcagggccagacggtggcgttcatcggctccaccggctccggcaagtcgtctcttatcaatctcgtgccgcgcttctatgacaccagccaaggccaggtgttggtcgacggcgtggacgtgcgcgactacgacctgaaggccctgcgcgacaagatcggctacgtgccgcagcagtccgtgctgttcaagggcaccgtggcctccaacgtgagctacggcgatcagccgggcgacccggcggaggtcgagatggccgatacctccaccccggccgggcgcaagcgcgaggccgcgttgatcgccgctggcgaggccgcggaaggtgccgatataccggccgagcagctgaatcgcgtcaaggccgccgccgacgtggcgcaggccagcgagttcgtggcgcgcatggacggcgggtattccgccgcgatcgcccaaggcggatcgaacgtgtccggcggccagaagcagcgcctgtcgattgcgcgcgcggtgtaccgtcacccggaaatcctgattttcgacgactcgttctccgcgctcgacttcaagaccgaccgcgaagtgcgcgacgcgctcgcccgcgaggccaaggattccaccaagctcatcgtggcccagcgcatcggcaccatcatgaacgccgaccgcatcgtcgtgctcgacgacggcaaggtcgtgggtcagggcacgcacaaggaactgctcgacaactgcgacgtataccgccagatcgccgaatcccagctcagccagtcggagcttacggcgtaggggggcggcagcggtagctccccatgtcaggggctgagccgtaaagggaacagcccagtgggctgttcccaggcgaagacgagctgataagcgagcgaataaaacagcacagctgactgaggggtagtcgcgtacggcttctctccctccggcgcttcgcgccacctccctcatcagagggaggtcaatacggacttttaaggagtaaaacaaatgccaagaggaccaatgggcggcaggcgtgccgtcgaaaagccccatgatttcggcaaagtcatgggcaaactcgtgaactactgccgcaactatcttcccgtcatcatcatcgcgctcatcctgggcgcggccggcaccgtctgccagatcgtcggcccggacaagctcaaggacatgaccaacgagatcgtcaaaggtctgcccgccatcgttaacggcagaccggtgatgaactcggtagatttcggcacggtgggccacatcgcctggactttggtggccctgtacgtgggctacgccgtgctcggctacgtgcaaagctggatgatggccaacgtcacccagcgcaccgcccagcgactgcgcgagtccatctcggtcaaaatcaacaaactgccgctcaaatacttcgacaaggttagctacggcgacgtgctgtcgcgcatcaccaacgatgtggacgccatcggccagacgctgggccagtcgctcggctcgctgattacctcggtgacgctgttcgtgggcgcgctggtgatgatgttctacaacaacgtgatcatgaccctgtgcgccatcggtgccagcctcatcggcctgatcatcatgatggccatcatgaagtcctcccagaagtacttcgcccggcagcagatggcgctgggtgacgtcaacggccacgtggaggagatgtacgccggtcacctcatcgtcaaggcatacaacggcgaggccgattcgattcgtcgcttcgagaagtacaactcggacctctacgagtccggctggaagtcgcagttcctctccggcctgatgatgccgctcatgaatttcgtgggcaacttcggctacgtggtggtgtgcgtggtgggcgcggcgctcgcgctcgacgggcagatcgagttcggcgtgatcgtggcgttcatgatgtatgtccgcctgttcacccagccgttggcgcagttcgcccaggccttccagaacctgcagcgttgcgcggcggccgccgaacgcgtgttcggcttccttgaggagccggagatggaggacgaatccggcaagtccgctttgcttgggaccaacggccacgaagtgaagggcgacgtggaattcagccacgtacagttcggttacgaaccgggcaagccgatcatccacgacttctccgcctccgtcaaggccgggcagaaggtcgccatcgtcggcccgaccggtgccggcaagaccaccatggtcaacctgctcatgcgcttctatgagatttccggcggctcgattgcgattgacggcgtggacaccaagtccgtgccgcgctggaacgtgcacgaccagttctccatggtgctgcaggatacgtgggtgttccgcggcactgtgcgcgagaacatcgcctactccaagcccggcgtgaccaacaagcagatcgaggatgcgtgcaaggccgtgggcctcgaccacttcatccgctcgctgccggacggctatgacaccgtgctcgacgacaagtcgtcgctctcccagggccagaagcagctgctgaccatcgcccgtgcgatggtgcaggacgcgccgattctgattctcgacgaggccacctcctcggtcgatacccgcaccgaagagctgatccagaaggccatggacgcgctgaccgtggggcgtacgagctttgtgatcgcgcaccgcctctccacgattcgcgacgccgacatgattctcgtcatgaaccacggcgacgtgatcgagcgcggcacgcacgacgagctgctggcggcgggcggtttttacgccgacctctacaacagccagttcgcactcgctgactgacggattgtttcctgcgttagcggattagcggattagctatactcggctcccctctccgaggggagctgtcagcgtagctgactgaggggagcaacccatcggtccacccgagggatgtgatactgatgatttcgtacattagtgtgtgaaaaagccgccgggaaaattgggggattgggcggcggtgcggttggcgttgagaatggcgcattcgaaggggaagtgagcgcgcagctgggtggccggggtggtgaacagggcggtggcgaggccgtcggccagtgtgacagggacgtgtgccgcgacggtgttcgacgaatcgtcggtatcgcggtttgccgttgtcgaggcattgctgccatgcgtcgatgtcttcgtggttatggcgctcgatggcggcgtgacggccacccatgtggcggctacatcgtcaaccggtagtccgtcgatggcgttgagcagatggtgaagttggtgacctgcggcgtcagaccagtggcggcggctgggggagctcgcgcagaatgcgccgtggctgatttcgaccgtacctacggcgttggccggatcggcaggatcttcaagggcgatggtgattggttcgtccgtgtgcactagcaaatcacccccggcgtcgatgacgtattgaatgggttgagggtgacccgcgccatcacccaacatccccgcaagcaaatccaccaaataccccttaccgcacgcgccgaaatcgagcgcgaccggtccgcgcgtcaccagtgttgtgccatgccgctcaacgtcggctgaccaaatggctcgtccgtggatcgcgcctgcatgttcagcggcatctggcgcaggcgtaaacgaatacgactcgtcatagccaagccgaatcaaatcctcgcccacgcatgggtcgatggtcccattagtcgacgcaaacagctggtcgtacaggccaaataaacccaatgcccagtcaggaaaatcgaacgtgccgccatgcgtggccgtgcgcatccggccgaccgtcgaatcatacttgaaccgggacaatgcggcttcataggtgctgatgaacatatcgatgcagttactgagcccgtcatccagcgcgacatcggtatgcagcagcaacccggtgcccagcgcttcggggaaagcggcgacgtgcggtagtcgttcggccagaccagtcatggctctcatcgtagagcctgcggatggctgaggggaaggcggctcggggtgtggattgtggtgtgcggttttgccctgcagggaattgagtgtaaaaccccggtgtatactggtttttgacactgtgtcaatgttgattcggaggttatggggaatgggcaatacgactacagcaagtgtaacgggcgcgcaagttgcaccggcgaaatcagccatcaaagatctccccatcgccaaagtgtgggcgtttgcggtcggccagttcgggtgggcgctgctttccggcatcatctccaactggctcgtgtatttctaccaacctgaccaggagaccatctcccaaggtcagaccgtattcgtgccgcagggcctggtcgttctcggcatcgtgaccgtggtgggcggcatcaccgccttcgcccgattcttcgacgcgttcgtggacccggccgtggcgtccctctccgaccgttgcgacgccaaatccggccgccgtatgccgttcctgaaattcgccgccctgccgctcgcggtggtcaccgtactcgtgttctggagtccgatcaacggcaccggctgggtgaacgcggcgttcctgttcgtcaccgtgatcggctactacatcgtcctcacgttctactgcacgccgtacaacgcgctcatcgccgaactcggccacgactccaagcagcaactcaccatctccaccgccatctccttcacttgggtggccggcacggccatcgcgtacgtggcgccggtgatttggggcgcgttcgtgccgatgatggggcgtatcaccgccatccgcgtgaccttcaccatcatggccgccgtggcgttcgtgtgcatgctggtgccgccgctgggcatccgcgagaaggactacgtcaactcccagcccacctccgaatcggccatcgaatccctgaagcagacgttcggcgacgacgaattccgcaagttcgtgtgttccgacgtggtctactgggtggccatcaccaccttccagaccggtctgccgttcttcgtgaccagcctgctcaagctgccggaaaccaccacgaccatctacttcgtgctcatgaccggcgtctctgtgctgttctatctgccggtcaatatcttggccaataaggtcggcaagaagcgcctgctgctggttgccttcgtgatcttcacctgtgcgttcgcatttgccggcgcccttggttcggccgcgctcggcttcattccggcgatggcccagggtttggcgctctcggtggtcggcgcgattccgatggccgcgttcggcattctgccgcaagccatcgtggcgaatatcgccgacgccagctccaagaccaccggccaggaccgtcagggcatgttctacgcggcccgcacctttgcgatgaagatggggcagtccgtggccatgctgctgttcaccggcgtctccaccatcggcatggcgtccggcgcgggctatcgcatcgccgccgtgtgcgcggccgtgctgtgcggcttgggcggcatcgtattcgcgttctacaacgagaagaaggtgttgagcgtgttggaagcgtgattggggctgccgaagcttgattagcgggtatgcctactccgcctgctcgcccggctcctgctctgttgcgtcctgctgcaagatatccagcgttcgctcgtgcagtagctccttatggttgctgtcatgctgcaggaaatgcgcgtataggatgtccaggtaaatgagaatcggaaattgcggagagatgaccttgcccgcttcgatgttctcccgaagcgccagcagcaccacctcatcgcagtattcatgctgttctggagatttatgggaagtcatcagtactgtccttgctccggactccttggctttgcgcagtgccttgatcaccgccggtgtcttaccgctgatgctgatggcaatcaccaaacaggtgtcatccaacaggacggaattcatcatcatcacatcgctatcggtgatggcggtgatgatactgccgatacgcatgaaccgcagttgcatctcctgcgcggcaaggccggagctgcctcgcccatacacgtagatgcgctgataggtggacagcatgtcgctgagtgcgttgatctggcgctcgttgaccagcgcatagcttttgtccaacagttcctgataagagctgagcgcctgcatcgaccactggtcaggcactgtctgtgcagtgtcctcgcgcagatcttccttgtatttatagatgaattcgcgatacccggcaaatccgatcttcttggcgaaacgggagagcgacgccagggatacgtgcagaatatccgcgatattgggtgccccgaaatccatacgtcggcggttatggatgaagaagtccgcaacgactttctccgtaggcgacagtgtggcgtatacggcttcgatctgcggaatgacgtccttgtcaaaatgagccatgtttccgactttcttgcatgtaccggaaatgatagtacgcaccaagcataccagcgcggttccggtgatgtgcaaaacgaaggcttgtggctcgggccactggtttgcgtaggttatcgtcgagggcgcgcctgatgggaccgcccaaatagtcactttgggccatgatgccgccgccgaggatcacgacctcggggttaagcacatagcagatgttggctatgcccatgcccagataggtggtcatggtgttgatggcttcggcgcagtcggtgtctccctgctgggcaagttcgaatattcgtttgccggacagatcttcggcctgcatattcttgcgcgtggccaccctgcgcacgagggcggtggttgaggccaggtcttggaagtccccgcccggcaggtgaatgtagccgacttcgcaggcgctgccgcccgcgccgtgcagtacgcgcccgtgatcgatgtacgagcctccgataccggtaccaacggtcaggcacagcgctgttttggcgcctcgcgcattgccggcatgatattcggcgagacccgcacaattcacgtcgttttcgacttcgcagggcaggccggtctgctgttcgatcatcgatttcaatggggtcccggtgtagcgcggaatgagttcgctggagtaagcgatgctccccgtggcgcagtcgaccatgcccgctgtggatacgcagatgccgtataatggcgccgttgcagcatgggagaggtcctcgatgagccccaatacggtgattacgatgtgcggaccgccttgatccgcatgggtgggggtggaatcatgccgtacgaattgctgcgaagcgtcgtcgtagattccatatttgatggatgtcccgccgatgtcgatgcagatatagtgcgtcatgatttcacccctttccctctgattgcacagcttacagtgccgcgattgcctcgcggatacgggccgcagcctgctgggcgatgggcaggtcgtcttcggtaaggttctccagcggcttgcgcacgccgccgatgttcacgttttcgttgatgcgcagtacctccttcatcactgcgtacaggttcgcgtggccgctcgccatcagtgcgatgatgtcgttgacttggtactggatttcgcgtgcgcgctcaatctcgcccttgctcaccagctcgttgatcttgagaatcagctccggcataacggcgtaggtgccgccgataccgccatcggcacccatggcacggccgctgaccagctgctcgtcgggaccgttgaacacgatgaagtccttaccgcccatggccttgaagatctggatgtcctgggtgggcatggaggagttcttgacgcccgccactttcgggttcttcagcatagtggtcagcagcgagggcgtgagcgcggtgccggcgagctgcgggatgttgtagatgatgaagtcggtgttcggggcggcggcgctgatgtcgttccagtatccggcgatggaatattccggcaggcggaagtagatcggcgggatggatgcgatggcgtcgacgccctgcgcctcggcgtgcttggcgagttcgacgctgtccttggtgttgttgcatgccacgtgcgcgatgatggtggctttgccgcgcgcgactttcatgacgttctccagcgtgaccttgcggtcctcgacgctctggtagatgcactcgccggatgatccgccgacatacagtcctttgacgcccttgctgatgaggtgttcggtgagagcctgcacacgttcggggctgatctcgccgtcatcgtcatagcaagcatagaaggctgggaagatgccgcggtacttgttcggatcgatggtcatggtgttctcctttgttggtgggttggttgtggtgttggtgttggtaaacagtgttgttggcgtaggggcctattgataggggctacgcgggggcgagagccgcggcgaaccgtttggtgatgagctgcgggcgagtgatggcggaccccaccactacgctgtggcaaccaagctcaatgacgcgtttcgccttgtccggtgtatcgatgttgccttccgcgatgaccggatgcttgactctggctaggatgtcgcggatgatacggaagtcgtcctcatctacgcgatcgccttggctttcctcggtgtagccgatcatggtggtgccgatgaagtcgaaacccagctggtcggcgtgggcggcttcgtccactgtggagcagtccgccatcagtagctgatcggggtaggtgtgtcggatttgcacgacgagatcgtcaaggctttggccggcgggtcgggggcggtcggtggcgtccagggctatgatgtccggtttgactgcttcgagctcgtccacctcttccatcgtgggggtgatgaacaccggggagtccgggtagtcgcgcttgatgatgccgatgatgggcaagttgacgcgcagtttgatttcccgtatatcttccacggagttggcccgtatgcctttggcccctccctgagctgcggcgtaggccatttttcccatgatgtacggggaatgaagtggctcgtctttgagcgcttggcaggatacgatgagttgtcctttgatgttcggtggtggtttcattgcccctcctttcgtgtgccatcatcgtaaagcgctggaaatcgatttgtaaagttcgaccagccaaaaaagagtaaatagaaaatacttaccatgtaggtcgtggtgtagtctggctttaaatggctgtttatgattatttttgggctgatctatgttgttgcagctgaaagttctacccacttcgttagtctaagtggaaattatttgcgctgacggataagctaaccgagtacggacgacatgatcgccgcccacagcacaaccgatgtgcacgcggcgaacataacagccctcgatggtgagggttcccatcacatcacagacgaacaggagggatggcggcatgaggagagaacgaagtgccataatgtccagggatacgcggttcgcgtatttgattaatatcccgttgattatctacttggtctgcatgttggcatggcctatttgctggggcttctacaccagccttaccaacaagaccatcggtggcggcaacggcgcattcgtgggattaaagaactacatcaatctgttgatggacccttcataccggtcatctatcgtgaacaccctggtgttcaccgcgatctccatcagccttaagctggtgctcggtctggcgatggccctcgcgctgaacaccaagttccgtggacgcaacatcgtgcgagcgctgctactcatcccctggaccctgcccaacatcgtggcggtattgaactggcgctggatcttcagctccacgggcggtatagccaactacatattgaccacgttgggcatcgcagaccatgatctggtgtggttcggcagtcccaaactggccatggccaccgtgatcatcgccaacgtgtggcgcggcaccccgttcttcgcgatatccattcttgcaagcctgcagaccatctccgccgacggttacgaggccgcgtccatcgatggcgcgaacatattccagcagttctggcacatcacgcttcccgagatccgtgacaccatcctgttgtcgacgctgatgtcgaccatctggacgctcaacgaattcgaatccgtgtggctgatgaccggcggcggcccaaacggctccaccgaagtcatgaacgtgttcagctaccagaccgcgatgaagagcatgatgctcggtaagggtattgcggtatccattctggcgatgccggtgcttattgcactgatcaccgtactcgcacgacacatggtgcccaaagacgggcgaaggtaaggagattacgatgagagaaaccaaaggcgtcaaaatcatcagccgcatctacatcattatttgtctgatcgtcgctctcggcccgatttactggatgatcaacacctccctgaaagggcagtcggagatttatagccaaaagccgaccttctacccgcataagccgacgttggaatcctacaaatacctcattcaggacaccaacttcctgcaggccgtgcttaacagccttatcatcgccgtggtggtatgtgcgttctccattttcgtggcgtacccggcggcctatgccatcgcccgcgtctcattcaggggcaagcgcacgttctccaaaaccatcctgttcacctacttgctacccacggccgtcatgtacatcccgctgtacctgatgaacgcgcgcatcggcgtgacgaacagcatctggggtcttgcgctgatctatccgaccttcactatcccctatgtggcgtgggtgctgatcccgcacatccaggcgattccctgcgacatcgacgaggcagcactggtggatggctgcggacgactgcgcatcatgtaccgcatcatcttccccctggcgttgcccggaatcatcgccaccacgatcttcgcgttcgccatgtgctggggtgaatacatgtacgcgttggtgaacatcacatccacctcccaacagaccttccccttggtgatagccggactcatattcggcgacatgtatccgtggggccagctgacggccggcgcgattctggcttgcgtgccagtggtcatcatctacatgctggcatcgggatccctggtcggaggccagaccgagggaggcgtcaagggatgatgaataggaaaggcacaaccatgaaaaccatgaagttcgcggccgcgggccttgccgcagccatgctgctgccacttggcgcatgtggttccgcttcggacgccaacacgctcaccatctgggtggagaaagtgttcagcgagaagtcgaacgaggagatgaagcagcgtatcgaaatcttctccaaggaaaccggcataaaagtcaattacgagttcatttccgccacggactatatgaccaagctcaacgccaccatcgaggcggggcgcggcattccggacatcaccacgtccgccgtgtccaaggtagtgaactattaccctggcaacccatacatggatatgaccgacatcgtggagcgcatcaataaggaccggccgtatctgaagtccgtgtacgagggcagcaagattgacggcaagctgtatttcgcgccattccgcagctcgtcgacgatgatgttcatccgcatggacaagctgtacgaggctgggatctacgaggtgcccactacctgggatgagctgttcgaagtagccgagaagatcagcgatccggcacagggcttctatggcctgggctggggctgcggttccacggatgaggacggcgacaacatcttccgcaacatcatgtggaaccaaggtggctacatgttcgataaggacggcaacgtcaccatcgacaacaaggtgagccgcaagctgatgcagcagtacaagacgatgtaccagaacaaggtgataccgccatcagccagcacttgggattccggcggcaacaacacctcgtacctcatgggcgaatccggcatcatcttcaacgcgccgaccctgtactactccatggcctcggacccatcatatgagacgctgctcggcaataccgccgtagtgaacctgcccaagggtgaggacaacgatgtgaagatgtcgttcgtcaccggactgtcgattatgaaggccagcaagaacgtcgacgcggccaccaagctcgtcgaatacctgctggacaaggactggtatgacggcttcctggaggagacggcccccgtgttcgcccccgtattccaggattccgagcaggtggacgtgtggcagaaggacgtcaacgccgaagtgctcaactacgtcaagacgtcggagggctactacggataccccgcacggtctaccgccgatcgcgccgtggcagccaagaacatgttcacctacccagaagcgaagatgctcaaccagatcgtcacggtgaataccagcatcgatgacgcgctgaaagacaacattcgcaagattgacgagcttaagtcgctgtttaccgagcagtgacgacagacgggcggcatcaatagtgccgccaccttgctcgcaccatcattcccatatcaatcatcacaagattcacaatataaaggagcaatcatgtcgaacatcaccatctggctggatctggaccccgacaaggtggacgtcagctacctgcagaacaagttcaaggaagacggctacaacctcatcgccgagcagatcgatttcgccgatgaagacaagaccatcgagatgggtatgaaggccgacgcagtgatcagctcgtccgaaccatggaacgagcgcacactgagcgccgtcaagggacaggtgaagtacatcgtgcgttacggcgccggattggataacatcgatctgccgttcgcggcctccgtgggtatccccgtgggcaatgtgccgggcgccaacgccgcggccgtggccgaaaccgcgctgctgcacatcctcaacctcgggcgtcgtttcaccacatgtgttgacggcgtcagcaacggcgtatggccgtcgaccgtgaccggcaacgagctggacggcaagaccgtgggcctgctgggctatggcaatattggccggcagctggtgcgcatgatgcagggatttgatgtgaacgtgttggtctacgatccttacctacgcgaccgctccgacgcgaacgaccgcctgcatttcgtgggcagcgccgaagaggtctttcgcgccagtgacatcatcagcctgcatatcccgctgaccgacgagacgcacggttccatcaacaaggagaagttcgcgctgatgaagccgactgcttatctggtcaacacatgccgtggtggcgtgattgatgaagctgatctgattgaggcggtcaccagcggcgagattgccggtgctgggcttgacgtgcttgtgcatgagccgcctgagaaggatgatccgctactacacctgccgaacgtgttcgtcacctcgcatatgggcgcggcctcgatggaatcggaatacaggtcccaagtcatcatcgccaagtgcattgaggaatactttgccggcaagatgccgtacaacgtgaaaaacatgtgagttgcgcctgcaccaccggtggtcaggttggcgggaggcctgccgttttgaggggcatcccattgtctgtgccactggtggtggcaggtctggtcggccttttgaggcgggccgtgacggtggatgacagacgactggtgaagatgagatgggtctgattgtggcgggtcgttgctgaagggctcgccacggaagaaaggatatgagcgtgtcggagatcattattgttagggatgaggctgaggccggtgagatctacggccgttgcgtggcggacctgatcaaagcaaagccgaatgcggtgctgggacttgcgacgggttcgagcccgctggccgcctatcaggcgctcgccaagatcgtcaaggacgaggccattgacgtttcgggcgtgcgtggtttcgcgcttgacgaatacatcgggctgccgctgacccatcccgagtcctatcatgcgaccatccat

SEQ ID NO: 43 - DNA, 71947 bp, Unknown
  R30_18m  MAG No. k141_16162
atccttctccagcttgggcagcgcgttttcgatggtctgcaggtcggcgaggatcagctcggtgttgatggtgtcgatgtcgtcggccggatccaccttgccgttgacgtggacgatgtcgtcgtcctcgaaggcgcgcacgacctcgcagatcgcgtccgcctcgcggatgttggccaggaacttgttgcccaggccttcgccttcggaggcgcccttgacgatgccggcgatgtccacgaaggtcaccgtggcgggcacgaccttttcggtgtggaccagcttggccagcacgggcaaacgcttgtccggcaatggtacgatgccggtgttcggctcgatggtggcgaacgggtagttttcggccagcacgttgttgcgggtcagtgcgttgaacatggtggacttgccgacgttgggcagtccgacgattccgatagtaagagacatgattccagtctagggagaagctggacacattgaacgtgcatgtggtgaaccggccatatgcaaaggcctccgagcatacggctcgaaggccttgactgtgatatgcgaatatacgcgaactctgattggcagtcagccgacgatggcgtctacggcgtcgatgaccgagccgcggaacccgtccttttcaagctgggcgacgcccttgatggtggtaccaccgggcgagcagacggcgtccttcatggcaccgggatgggtttcagtggccatgtagagcgcgccgacaccttcgaccatcttggcggcgagccggtaggcggtggctcgctgcagaccgtactgcacgccggcgtcgcccaaggcctcgatgtacatgtcagtgaaggcgggcgcacagccagccaccaccatggcgatgttcatatgcgcggtgtccacgcgctcgatgaggctgatggggccgaatagctgctcgaaggtttcggtttcgtcgtcggtcagggtgttgacggattcggtgacgagcacgcccttgcccacggccatcggagtgttcggaatggtgcactggatatggatgtccggggagtcgacggattcgccgtcttcggtggcgaacaggtcctggtacttcttgagattccagccggcggcgatggagacgacgatcttgcccggcctggcaagttcgtcggccagcggcttgacgacggcggcgatctggtagggcttgatggcgatgatgaccacgtcggcggccgtcaccacttccagcgcattgcgcaacggacgcacgccaagttcggcggtggtcttctcaagcttgtcgtagtgggcggcgcaggcaaccatctggccgccggcgaccacgcccgcgtcaacgaagccttgggcgatggcctgggccatgttgccatatccgataaaaccgatggtgaggttctgagtcatacgttttcctttcgtgcatgtatacagagctccctcatcagagggagcttgcttccttgagtcagaacagttcttcgaggtcgccccggttaagggcttcgtcatagagatgcttgaagacgagcgggccgtgcagaccatcatgctcgaattcgttggtggtccagtagtggctgttacccacgcggctcaaggtgtcgagctgcaggccggaatcgacatacatgtcgtcgaaatagacggcggcctgcaacggcacctcattgcgggccagctgaccttcgtcatagatcacgccgaagtgcgtgtcttccatgagcaggtccatggccggcctgaacggacgtaatgcggcctcctgttcgaacatccacgggaacatggcctcgccagtgaagttgagcgggcgttcatcagcaccgaattcgggcttgccatcgcgcacgcgctgggcggcccaacgaatgggctcgtcaagctcaccgttggcgtagatgaactcctgcagcggccagtacagtgggcgcgacgacgtggcgttcatcactttggtcaaaaattcgtcagacaacggcgagtcggcagaagcggaaccatcgccatcaaggaaggcgtcgtcaagaatccaatggacacgctcgaagctcggcttcatgccaaagtcggatcccaagcactggaagcgttcgacggcgagcgggtcgccgttcggcatcagcgggaagccgtgggcggccatgccggcgatcacgccaagtcgatgctccacatcggtaccagccatcggattcagtacggaatcggtgagtttgccaacgaattcggcgacttccgcagtagtcggcagcttgtcggcgatggcggccacgcgctccttgtcctgtgggtagcgctcgtagaactgagtcgtcttgcgcaccatgcgcgggaaggtatgctcgtacacttcagcggcgtcggccggcacgtgcgggatgccgccggtggtgaagctggcgattacgccggccgggaacagggacagtgtggtcagggtcaggaagccgccgtagctttggcccatcgtcacccacttgcggccaccgaattcggtcaggcgcagatgttcgaagtcacgcacgatggaatcggcaaggaacttcttcaggtagtcggcttgggctcgtgcgccggccgcggcatcatcgtcgtgcgcggcggcgatgcgggccatggcgtgcgtgtccacgcgcgaggagcggccggtgccgcgctggtcgggcaggatcacccggaagtgcctgatggcctcctcgatccatccgtcggaggtcgggctgttgaggcgcgggccggcaccgccgggaccgccttgcaggaaaatcagcaggggcaggtcgtcatgcacgtgttcgggcgcggtgaccacgcgatagaacagtttgatggtttcgccgtcgaacgcttggcctggctcatggccggtccagtcgagcggaacatcgatggaatggtcctctatggccagtccgggcacgtagtatttgctcagcattgtcatggctcaagactctagtccataaatccttctgaagagtgataccggttcgtcgccggacacgctagccttgcgcgttatggagattatggcgcgcgtgagggcatggtgcgcacgggagtcgacccgcacactgctatgggacacgttgctcgccgcagcgctgatcgccggctgcgtgccgttcatcggcgtcaccagccctgattcgacgggcggcatattgtttcccgcaactcaggcgtcgatgacgctgtggtcgctgccggtcttcgtgccgctgatgctgcgcaggtattgcccggagccggcggcctggctgttcgtggcgctgaccatcacgcatcttgtgttcggcccggcgatcatgtatttcgatttctacgccctgatcatggtgtattcggtgattctgtacggcaatccccgacattcctggcggttcatcgtcacggcgttcgtcatgggactggtcgcggcgatggtctggtcggtgtctttcaacgtgggtccgctgttcgacggaccttcctccggttcgcgcgtcatccgcgacggctggctgtccgatgccatcacgatgcccacatgcccggcggtcaccggcgtcgtgggggcaagcggcgccgtcaactgcggggccaagatgctcgctgacttcggcatggaggcggcgttcatcgaatcgagcgtgctgagcgtcatcatcatggccttgtggcagcgagcgcgcaacgccacgctggcggccatgcgcgagcgcaacgcttccattgtggcgaaagaggccgaggagacgcgcatcgcggcgctggccgaacgcgcacgcatcgcccgtgatatgcatgatgtggtggcacatacgctctccacgattattgtgcagtcggatggcggccggtatgcgggtgcgcatgatctggccatcgccaagcacacgatgggtacgattcggcatgaggccgaacgcgcgcagcatgatatgcagcgtctgttcaatgtgttcggtgcgagtggcagtaccggatatgccgacatcgattcgctgtttgacggtcatctggtggtgtcccggcatatgaccggcaaagcgcaacctgaccggctgtccgccgacgcggaaaccgccgtgttccgtcttgtgcaggaagcgctgaccaatacgcgcaaacatgcgggcgagggtgctaaagccaccatcgatgaaatctggtcaaacgatgtgctgtcgattaccgtatccgataacggccgtggcgcgacgtctgcagcagacggccataagcccggatacggattggttggtatgcacgaacgcattgagtcgttgggtggcagcgtgcaggccggcccagggccgaatggtggctttattgtggcggctacgattccgctctcccctgccgccccacagtctggcaccgatacggaggatccggtgctaaccgttatctcgcgtatacgaggattgatggatcgggcgcgccccaaagtactcgaccaaggagatacgcgtgagtcgaactgggtgggtcgatttgcgcagtggaccgagcggcactatcttctgatggacgttatcgccactatcgtgctgattgcgctatttgattccgccacgtatggcgatttgcaaatgatcggcaatgccccgtattcgccgaaccgcgtgccgactataatgctgacgattattatgctctcgcctttggcgttccgtcgccgcttcccagagggcagcgcgctggcgatggcggtgctgtctgctgtgcaactgttgttcttgccatcgattttgaccatcaatatgtttgcgatggtatccgtgtattcggcggtattgtatggacgagagtccgcttggcgctgggtgagcgtggcgctggcagccgattcgtggcttgcgggcatcaaggtgatggctgggtggaatggatacagtcagctgttccatctgtttttgcccgatggtagttccatgctctcaaaatggaggctggttttgtccggcttgctgccgggcgcgggaatcatgttggtcggttttgcctgcattgcgatggctcgatggagccgttcgcgtggcgcaaacgctctggtgctgttgcgacgcgaggaggcgctgcgagccgagcaggagcggcaaaaggtgctggcggccaacttggagcgcaaccgtattagtgcggcgatgcaaaccgaagtactgaccacgctggaatcggtgattgcgcaggctgacgagggactggtgatgctcaacgccgaacctgcgcctgatagtatgcagattgaagcggcttttgccgcgattggtgctcgggggcgcgccgcattggctcatatgcgtcagctgttgagagtgttgcgtgaaaccgggttcagcgacgaggcccatgagggtgtgcagccggatatgcagttgcgaccggcggcttcgttggatagtcagatgcaacacgcgggaacgttaccccggtgagagacttgcccaataagaactcagggaacaatcagggtgtttatggagcggcgctccgataggaaacggatacagtggagagcatgaacgagagcagaagcattcgcgtgattattgcggacgaccaggagctggtacgtgccggttttgccatggtcattggttcgcaaccggatatggaggtggtcgggcaggcgtccgacggcgcccaagccgtggcgttggcggaatccctgcatcccgacgtggtgctgatggatgtgcgcatgcccggcatggatggcattgaggccacgagccgtattacctcactctccgccgcgccggacaacgcggccgattcggccagcccggccgccgacgcgaccgtctcggccgaatcggctgacgaccggccgacgcgcgtaatcattctgacgacgttcgatttggacgagtatgtgatggcggccatcaatgccggcgcctcgggcttcctgctcaaggacaccgaaccggaaacgttgctcaattcgattcgtactgtattccaaggcaatgcgattatcgcgccttccgccaccaagcgactcatcgaaaagatgatgcaggacggttacgcgcagcatggttcgctgaccggcgatgtcgcgcgctccggtgccgtgtacggttccgccgtcggcgtctctggcggtgcggccggcaacggtgccggctcgatgaccggcatcccctcccctgccggggccgcttccgacggttccaatacgtcacgcccagcatacaccgatcccgaactggatctgcttaccgaccgtgaacgcgaggtgctggtggagatcgcccatggtctgagcaatcaggagatcgcggacaagctctttatctcccttcccaccgtcaaaacccacgtggcgcatatcctcgccaaaatcaacgcccgtgaccgcgtacaggctgtagtcttcgcgtacgataacgggctggtgtaacaaaaaagctccctctgatgagggagcttattgctctacgcttcggccaaggcttcaactggtggcgttttgacggcccggcgggcgggtgccacgctggccagcagagcggcgagcgcggcgacgccgagcaccacaccgttggtggcccattcgaacgggaacacggtgtcgccgtacaaactaaacaccatgtaggatccgagccagccgaacagggtacccaataccactcccaccacgccggagacgagcgaaagcagcaacgcctccaccgccagcgagcgccgcagttggccgcgcgtcatgccgatggcacgcaaggtggcggattcgcgtgtgcgttcgatcaccgacagactcagcgtgttcgctacgccgaccaaggcgatgagcacagccaccgcaatcaaaccgaccaacaatgccatcatgccgttgatcatggtctcccattgcgtacgttcggccaccggaccggtcacggtaacgccagcactggcggagaacacattctgcacgttggtgaatacgtcgttcagcgcaacacccgcgccctcggcgtcaatacgcataagcatgatatgcccgtcggccttgattccaccgttggtgaagtggctggcgtccacgaaggcgaccgcggcgtagttggaggcaatgcggcgatagtccaccttccgcggtttgagcgtcagcgtctgtgtgccgccggattgtccattgccgttttcggcgctgccgttcgcatcattaccggacggaccattggcggcatcggcttgtgcttcggccgctccagccgtgaacgtaacgctcttgtccagcggaatatccttgcctgtagcggcggaatacttgggcatcagtacggaatcgccatcaatggtcacaccggacaaatcggagcgcaccaccttgcgcagcgcgtcgacgccatccacgcccacgaccagcacactcaggctcttgccgtcggcatccttcatggtcatcatgcgggtcggcgcgtagatactgctctgaacgcccttgactttggctgcctcgccggcctgtttgccagtcatatcggcgccagcggcaatcatgtcgacgctgtagcgcgtggtcagcgcctcgttcatggtttgcttggcgctggcggcaccggtggcgatggtggagaccagcgtcacgccgataagcagtgcggcaccggtagcggccacgcggcgcgggttcttctgaatgttcgcatgtgccactttggcggacggaccggccagtgcaaccagcgcgcccacgccgcgcatgagcaccggtagccagaacgtggcggaaagcaccagtccaaggaagatcaatgcacatccgatgatggcggcgagcagcaccagcgaatactgcttgtcggccattgaatcacgtccggcgattttctcggacatctgccatacagagaatgcgcacagtgccacgccgcccgcaatcagcagcatggaaatcacggcgcggaccacaccggcccgtcgcgtgtcggtcagttcgatgggtcgcaacgcttccagcggggtgacggcggtagcggaacgcgcggagcctagcgaggcaatcaccgtcataatgatgccgaatgccataggcaccgtgaacaccggaccggatagtaccagtcgcatggtcatgccggtggctttcatcaggcccgactggcatagtgcggccatgagtccgatgcccaggcccactcccagtgcggaggcgatcagtcccagcacaccggcttcaaacagcacggagacatacagctggcttttgttcgcgccgatggtgcgcagcagggcgagtgtgcggcggcgctgtgccacgagcacttggaaggtgttggcgatgacgagtgccgcgaccagcatggcgagcatgccgaagctcagcaggaagatggtggtgatgctggtttcgcccgagctcatgcttttgacggattcctcgacgagcgcggcacgggattgcacgctgaaatgcttagggagcagtgtgctgacctgttttacggtggatgccgcggccgtgtcgctggcatcgtcgatgtcgagatagacgaggtagacaggcaggttgccgaaatcgttgctgccggccattgcggtgatgacgttgtcggaaagcacggaagcgccaccgtagtaggcgtaggcaccgttcgggtcgtcggtgaggccgaccacgcgcacggtcatgccggagtcggcggccgtgtcggtgccgtcggatggggcggacgcgccggacacggcatcggaatcaccgtcgtgcgagctcgtgccatcggcgttctgggccgactcatcaccagcgtcaccggtattaccggccgaatcgccggtcttgcccgcatactgcgccgcctgcgagttgacggtcacacggtcccctaccttgacgccgagctggtcggctacggacttggtcagggcgatctcgttgctgtccgccggctggtctccttgcgtgatggtgaccggcagcagcgtgcgttttgtggcggtggtgatgacgtagctgctgacatgcttgttgccacgggttacggtcacggaacccgcgtagccggcacgtgcgtccttgacgcctttggtggcgcggatgcggtcaagctggaagtcgttaaccgtgcgcgtgtagatgtagtcctggtccttatcggtcaggtccttgccgctatccgggctgatcacgtagttcgcaccgccgagctgggcggtattctgggcggcaagcgcatcgttcatcgcgttgccgaacaggaaggtagcggcgatgaacgcagtgccgatcaggatggcgatgcctgccggaatcagcatcctggcgcttttcttcataagtttcagagtgatggaaaacatgggggtatcctgtctctcgctttccggctcagcgagtgtgctgtgcggcggcgcgggcatggcgtatggtgccggttctcccggctgggggcaatggagcgtcggtgatgggcaggttgggcacatcctctacgccggcaagacgggcgagcgtgtcggcgcgtgtgctggtgacggcagtgcgcgtggcgcgttcgcgttcggccataagcagctcgttcatcgtttcggcagtaggattcgattcatcggccacgatctgtccgtcggcgaatacgatggcacggtcggcgtaggaggcggccaccgcatcgtgcgtgaccatgacgatggtttggccaagctcgttgaccgaacgcttcaggaagccgagcacttcggcgctggaaacggagtcgaggttgccggtcggctcgtcagcgaacaccagcttcggcttggtaatcagcgcgcgggcgatggccacgcgctgctgctggccaccggacagctcgttcggtcggtggttcaggcgctgcttgagtcccaaggtttctacgagcaggtcgaaccaggcacggtcgggcttatcaccggccaaagtcagcggcatgaggatgttctgctctgcggtgaacatgggcaacaggttgaagctttggaagatgaagccgatcttgtggcgacgtagcaaggtgagctgcttgtcgtccatgcgggtcaggtctgccccgccgaaaagaatatgcccggatgtggcggagtcgaggccggcgagcgtgtgcataagcgtggatttgccggagccggacgggcccatgatggcggtgaatttgccgcgttcgaaactcacgttcacgccacgcagggcgtgaaccatattgctgccggtgccgtagttcttgaccaagtcgacggcctgaatagcgatgccgcgcgatgcggacgggttctgcacgttcataatgcctctccatatttggccggaccttatgcccggatgacgattccaacttatgaagaaataacggcgcgccccatcgtgcgccagactgaattgggctaggggccacgcgccggccctcatccttgaggattatgtcgtctcaggtctcacactattcatgcctctgtgcaaacagtgtgaggcatacagacgcaagaaagcccgcactgcatgacgtcagtgcgagctttctactccttgggtcaagcgatcaggcggaaggcaccccatgcggctcgatgattcgcgatgcaccccattagcatcgcgccccttctcatcgggccgtcaaccctcctgtcgacctcacttggccaagccggaagcgcgaagggcttcgaagccgcccttcaggtcatcgagaatgtcctcgatgttctcggtgccgatggacaggcggatggtgccctggtgaatgccttggtcctcgagctcttccaaggtctcctgggagtgcgtagtggaagccgggtggatgacgagggactttgcgtcggccacattggcaagcagagagaacaggtgcagattgtcgatgaagacgcgagccgcatcctttccgcccttgatatcgaaggtgaagatggagcctgctccgttcgggaagtacttctcgtacaggtcgtgatccggacggcccgggatggacgggtgggagacggactcgacttccggcacggtctgcaggtactcgacgaccttcagcgcgttctggacgtggcgctcgacgcgcagggacagggtttcggtgccctgcagcagcaggaaggcggcgaacggggacagggtggcgccggtgtcgcgcagcaggatggcgcggatacgggtcacgaaggcggtgccgtcgagagcctcgtagaagttcaggccgtggtaggaggggtccggctcggtcagggtcgggaacttgcccggcacctcggcccagttgaacttgccgccttcgacgatcacaccgccgagggtggtgccgtggccgccgatgaacttggtggcggactcgaccaccacgtcggcgccgtgctccagcgggcggaacaggtacggagtggcgaaggtgttgtccacgatcaccggcaggtgatgcttgtgggcgatttcggagatggcctcgaagtccggcaggtcggcgttcgggttgccgaaggtctcgaagtagacgagcttggtgttctcctggatggcgtcctcgaactcctgcgggttctcggcggaaacgaaggtggtggtgatgccgtcacgcggcagggtgtggcgcagcaggttgaaggttccaccgtagatgttcttggcggcgacgatgtggtcaccggactgggtgatattacgcacagcgtattcaacggcagcggcaccggaagcgacggcaaggcctgcggtaccaccttcaagggcggcgatgcggtcctcgaagacaccctgggtggtgttggtcaaacggccgtagatgttgcccgggtcagcgagaccgaagcgagcctcggcgtggtcgaagttgtggaagacgtagctggtggtggcgtagatcgggactgcacgggagtcggtggccgggtcggcctgctcctggcccacatgcagctgcagggtctcaaaacggtacttcttgttgttctcggccatgggtctttctccttggttgtgctaggtcgcgaggatttttccttgccacccgcctgccgtgttcgggcggttggcgaggtgttggttatgaagttacgacgcttgggccgcgcggcgcaagccgaacgttatcgggcttgcctataagggcttataaagccttgggatcattgacgtgggagactgtcagaagtcacgaaaaagtcgttgaaattatcgcgacacgccgggccgcacgcatgcgctttcacggtcgactgcggtcacggtgatatcgctaccatgcctttcgcgcatggctcaagtgtccgtgatgattgcttgttccacccgtcaccaagacggtttgcccgctcggcgatgacgtctgttcctttttccgccgcccggttacatggtttacatgacgaacgactacagtcaaacatcgccaatgaattattccgccaacatggtgaaggggttcgaacagacatgaccgatgtaacactgtatgaccgtgatccgaactatattccgcgcgtggccgccgtgcacgacatgtgcggctacggcaagtgctcgctgaccgccgcgattccgattctctcggccgcaggctgcgatgtgtgcccggtgccgaccgccctgttctcggcgcacacgcgctatgcagtgttcacgttccacgacaccacggatattctctccggttacttggatgcctggcagaaggaagacgtggaactggatggcgtgtattcaggcttcctcggctcccccgatcaggtggcgatcattcagcgtctctaccgtgaatatccgaatgcgctgcgtctggttgacccggtgatgggagacgccggcgaaatgtaccccacgtatacaccggagctgtgcgaggcaatgggcgctctggccgatggtgccgacgtgttgatgccgaacctcaccgaagcgagtattctcaccaagcgtgactatcctggccagaatattgatgaggccacggttaacgagctgcttggtgctctgctgaagttgggtgccaagaacgtggtgttgaagggcatcgaccatggcgatggcaaaatcgtcaactatgtggccagcgcttccaccggtgttgccggcaagatcgagctggctcatgaaaagctgccatacatgattcatggcacaggtgacgccttcgcatctgccctgtgcggcgcggtgatggccggccgcggcttggccaagtcggccgaaatcgccggcgagttcgtgcgacacgccatggtcagcacccgtgaccagccgcatttcgaggatcgtggcgtcagcttcgaactgaaccttggcgaactcaccgatttggtgaagtgaccgcaccttggctcccctctccgctcactgggtctgacgtattcagcgaacaactcggcgggttgtttgtcatcacaggtaagtcggctggggagccttggtaaaccttctgaactaatggtggataaccgggttttcatccacacgttatccacaacacgccaaaccgcgtcatagtatccacatttgccggttgcgcttgtgctcttacataagtaacccgcacagtggaatcatgaacgctttaccacctacccagccgacgacgaagtccggcatcgacgccggtcttgcctttcaccagcccatgctggcttcacctgatccgcaggcaacgctgccttcggaacggattgcggccacgatgggcgaccgcaatctgacgcccaaacagttcggtgcgctcggcgagcagtatgccgccgcgtggctggaggaacacggttggacgaccttgagccgcaattggcatacccgttacggcgaattggacatcgtgatgctcaatcccgagtacacggtggtgttcgtcgaagtgaaatcacgccggtccatgcattacggatatccgcaagaggccatcacgccggcgaaacagcacaatctcaggaaagccgcctgcgattggctgcttgaccggcgtaatcgtgtgccgcatacggcagtccgtttcgatgtcgtcaccatcgtgcttcgggtgggcagaccgctcgtgcatcacatcgaaaacgccttctgaattcgtcccccaaaaaacagccacgttgcgaaacacattgcgaaaggagtagacatggctatcggcagcactctctcagtcggactgatcggccttaaggccttcatcgtccaagtgcaggctttcatcagccctggcttgccatacttcagcatcatcggattgccggatgcatcgttgtccgaagcccgcgagcgcgtgaaatcggcgtgtcaagccactggattcggttggccgcaaacccgcgtgaccgtgaacatgagccctgcggccatgcccaaacgtggttcgtcgcatgatctggccatcgcggccagcgtcctatgcgcggcgggtgccatagggcatgattgcttggaagataccattgtgctcggcgaagtgaatcttgacggctcggtgctgccgattcatgggctgctcccgatcatgctgcatgccgaggaacgtggcgtgcgcaaaatgattgttccccatcgcaatcttgacgaggcttcaatggtggatggactggatgtagtgggcgtgaggcatgtgggtgagctcatcgaactgatgggcggcgatgccacctatacgattcccgatacaccggttgccgacgagaccaccacggatcaatcgcccacaagccatcccaacgattgtggcgatatgaacgaggttctgggtcaggaacatgccaaatgggcgctgcaagtggcggcggcaggcggacataatctcatcatgaccggaccgccaggcagcggcaaaaccatgctggcctcacgtatgcccggcatcatgtgcccgttgaacgaggcggaacaactggaggtggcgtcgatacggtcgctgtgcggcatactgcctcagtacggcatcaccgacatgccgccgttcgaggcaccgcaccacaccgccagcacggcggccttggtgggtggtggcagcggcatcgccgttcccggcgcgatcacgcgcgcgcatcgaggcattctgtttctggacgaggcaccggaattcagcgcacgcgccctgcagacgttgcgcgaaccattggaatccgggtatgtggcgctttcccgttcaaaaggcagcacctattacccggcctcattccaactcatcatggcggccaacccctgcccgtgcggatactattacggcaccggcgaacgttgcacttgccgggaaaaagaccgtattcgttatttctcgcgattgtccggaccgatattggatcgtgtggatattcagatggcggtgccaccggtctcgcgcattgccgcgcagagcgagacgatcggcgagtccagtgccgggatacaagctcgtgtgattcgcgcccgtcaagtggccaaggaccggttcagacagtatggatgggtgtgcaacgcgcaagcttcgggcaaatggctgcatgccaatacgtcgctgaaagcgatggaattggtcaatcgggccctgtccaatcatcaactcacattgcgcggggccgatcgcgccatgcgtctgtcttggacgctcgccgatctggccggccgcgtatcccccaccgagcaggacgtccatcagggcatcgaaatgagaacgaggatgacatgagtaacgctactgatatccgacaatctggcggcaccgcaggcagtgtggatcacaccgatacgggcctcgctgtttcgcgcaccattcccatgcctcccacggatacgttataccgcgccgcgctcacgttctgtcttgatggggcggatgtgatgatgtacgccacgctcaaaggcgcggaaagcgccgaatccctctggcacgcgttggcgcaatcccatccaagccagccatctggaatctgcggcccggcgctgtcacgcattgaccgcatgttcgtggatggcctcacccgatggggccgcaaggcgtcggcgaacgcgatgcgctccttccgcaatgcactggccggctggcataaccgcatgatggacctgccctcgcaagacatcatccaactgggcgactggttcactatggatggcacgcaatggattatcggccccggccatccatgttggccctcgcagttggccgacctgtccattcgctccgattgggcgccaccgctgtgtttgtggatcaaaggcgatccacgcgcattgaccagttgcgccaaaccggtcggcatcgtcggttcacgggacgtgaccgaatacggccggtatgtggcacacaccgtagccgaacaggcagtcgttgccgggcatctggtcgtgtccggaggcgcaatgggcacggatgcggcggcacattggggagcgttgaatgcgctgcacggcagaatgcccgccaatgtgggcagaaccgttgccgtattcgccggcgggctcaaccatatcggaccgatgcgtaaccgcacgctgttcgaacgtatcgaggcgcagggtggtgcactgatcagtgaactgtgcccagggacgattcccgaagcccgtcgttttctactccgcaaccgcattatcgcggccatgtcttccacattgattgtgacgcaagcccggttgcgttccggagcgctcaacaccgcgggatgggcatgcgaattgctgcgcgaagtgtatgcggttcccggtgacatcaatcagccttgcaacgccgggtgcaataagatgatcggcgaccaccgggcgatgattctgtgtgccgccacatccactgaggatatatgccatgaacggcataagcccgttatggcggcatgcccaggcataccgaaatccacaggtcaggactcgtccgaaaacgaggaggccatggaagtgccggcaacgactccgttatcgccagcatcctcggaatcatcggcgtcacaggagtcgtcacaagattcaggtcattcgaaacgtcttaggaccaagcatactcagcctacactcgttcaatccaaggatgggccggcgagcgcaactgccgaggccggtgccaacaagagcaagggtgaagagccgccctcgtcgcatcagatgccggatcttcgtgtcaagccgaagctcgatcccgagaaggaagcccaacaacgtatcattatcgccaagctgccggaaatggaacgcacattagtggcattgattcgtgaatgccgtaaacgacatctcatcgtcaccccggacgcactattgcgtgtggcgcgagagacggtacccgacgagattcccaatatcggcaccatacttgagctactcggcgcattggagctgaagggagtgatcgagcgggatgccggcatactcaagttgagcagccgtgtcggctaatcggctttcatgacacggctcgaagactgttcggcgggtgtgcgagaatcgaacccatgagtccgaaacgtttggaagatatgtatgatgcggtgatcgtcggcgccggagcggccggcctgtcggcggcgttgggactgctgcgctcccccaaaatcaccgagctcaaggaacaaggcatggacccgaagatcctcgtggtctccaaactgcagccgctgcgttcgcacaccggttcggccgagggcggcatcgccgcgagcctgggcaatgtggagtccgatgactggcactggcattactacgacaccatcaagggcggcgactggctcgtcgaccaggacgcggccaaactgctcgccgaatacgcgccgcagaccgtgatcaacctggagcgtcagggcgtggccttctcccgtaccgatgacgggcatatcgcccagcgccggttcggcggccacacgcgcgagttcggcggtgccccggtcaagcgcgccgcctatgcggccgaccgcatcggccaccagattctgcacaccttgtggcagcagtgcgtggccgccggcgtcgagttcgccgaggaatggtatgtgaccgacctggtgctcgccgacgacggcaagcaggcggccggcatcgtggcatttgacacgcattcgggcaagattcaggccatccacgcgcgcaacgtgcttcttgccaccggtggcgcgggccgactgttccataccacatcgaattcctgggacctgaccggcgacggcatggcattggccttggccgccggcctgcagctggaggacatcgaatttgtgcagttccaccccaccgggctcgcgcacaccggcatcctgctgtccgaggcggcccgcgccgagggcggcatcctgaggaacgccgacggtgagccgtttatggaacgctacgccccggagcatagggatctggccgcgcgagacgtggtctcccgctccatcatggcggagatcgacgccggccgcggcgtcgccgacctgaaggacccggatggtccgaaggactgcgtctggctggacatgaccggcatcgaccccgaacgtatgaaggaagtgctaccgcaggtggtcgaaaccatcgagcagtacgcgaacctcgatccggccaaggacctggtgcctatcaagcccactgcgcattacacgatgggcggcatccccatcaccaccaatggcgaggtgtaccgttgggccgacggtgccgtgcaggtagtcgatggactgttctccgctggcgaatgctcttgtgtctccgtacatggtgcgaatcgtctgggcggcaattctctgctcgacgcctgcctgttcggtacacgtgctggtcagacgatggccgcacgcatcgtcgagaacccggttgactcccccatggccgatgattcgaccgatgacatgctgaccgatgccgccgatcaggctgccgattcccgcaaggcagagcttgacgaactgctcgccggaccgatggacgattcagacgatggcgggcccaccgccaatccttatcagctcatggcccaactcggatcagtgatggagcaggctctggccgtacgttgcaccgctcagaccatcgatacggcgttgactcagatcaacaacgacatcacaccggttgccgatatcttgcgggcccatgacaagaccgccgctttcaatcaggaggtcaccgccatctgggaagtccgtcatctaatcgaactggccgaggccatgctgcacgcttccgaatcccgtcaggaatcccgcggatccatgcaacgacttgatttccccgaacgcgacgatgagcatttccttgctcactcgatggtcgccgatgatggtccggcaagtttcaagccggtgcacatcaccgactatccacccaagaagcgcgagtactgatccgctggtggtaataccaagccgcctagggcttgtggcacaataggttggctgatattggacttgacatcccactgtttcatggaggcagaacatggctgaggcgagcaacacgacggttaccctgcaagtgcatcgtttcacgccgcgacccgagcgcgccgaacgtgcacgcggcggcagcccgttcgccaagaaaagctccccattcggcggcggctcggattcggcggcacgccgtcgtccgcgcggcaagcagtgggtgcaggaatacacgattcccgcgcgcccctcggacaccgtgctcgactgcctgctgaccatcaaacgcaccgtcgacccgacgctggccttccgctattcgtgcggtcacggcatgtgcggttcggacgccgtggccatcaacggcacccccaccctgctgtgcacggccaccatccgcgattgggccaagcagcccggcgccatccccgaagtcgatgacgaagggttccggcacaccggcaccgagtccgaagaatccgacgattccgcggaaaacggcgcaaacgcggcagccgaccaggactcggccgcaaacggctcgctgggagtcatcgaactggcatccctgcccggcttcccgccgcagcgcgacctcatcgccgacatcgacccgatgctcaaccaaataaggaagctcaccccatatcttcaggcggacggcgtgctcgccaccaccgccgaaggcaaggtggacgtgttcgaatacctgcagaaccccgaacaactcgccaaatacgagctgctgagcaactgcatcgcctgcggcgtgtgcgaaggcgcctgcccggtgtacgccggcggcgacgctttcatcggcccggcctcgctgatttgggcctcccgtttcgtcaacgattcgcgcgacaccaaggccatggagcgtatggacgccatcgacaccgccgacggcgtggccgcctgccagtccgtgcgcgcctgctcccgccactgcccgcgcggcatcgatgtgggcgaggagatgtggcagatcgtggccaaggtccgcgagcgctaagccgcgccacgaccagctacggcaatcgctgcaacacgtagtcgatacatccaccgggtgcccgcacgagagaagacataaaggaacgaattatggacagaacgcagtacaccaacctcgccaaggcatgggaattcaccgaggaacacgcgcgcgaacgtgaatccaatgcgttgaccgacgcccgtacggccgccgacaagtccggccagttgcagggttcggccgcgcaggcccgtctgctgggcatgctggtgcgcatcaccgacgccgcttcggtcatcgccgtaggcaccggctcgctggtggagaccttgcagctcgcccatgcgctggataacaagggcctgctgactgcggtcgattccaccgctcagggcatcgcgctgattcgcaaggcgttcgccgaactgcaggatgagaccgacaccacgttgcgtgcggtgaacgccccggccagcgtgtttctgccgcgcctcaacgccaatgattacgatctgatcgtggtggcgggcgacgccgagaactatgccgccacgttcgcccaggcctcccgtctgctgcgcgcgcacggcgtgatcgtgttcaccgatgtgctggcgttggaggacggtcagggcggcatgattaatccggccgaccgcagcgacaaggccatcgccatgcgtgagctgctcaccaccgtcgaagatgacgaaggtttcgagtccacgcttacccctgacggcacaggcctgctcatcgcctacaaaaagtaactctgcccttggctcccctcggagaggggagccactctatctcgcttacctcacaattgcgctgacagccacctccacggcttcgtcggcgtcatcggtcacggtgaccagtttcgggtcgattgccgaaatcatgccgtgctcggccaccggaccgttgagccagtcaaagagcccctgccagtattccttgccgtagagcaccaccggaatattcgccaccttgtgggtctggaccaaggtcagcagctcgaacatctcatccagtgtgccgaagccgcccgggcacacgatcacgccggaggaatacttgacgaacatggttttccgcacaaagaagtaccggaagctcatgccgaggttcacccactggttcaacccctgctcgtgcggcaattcgatgccgagtcccacggatttgccgccagccagtgccgctcccctattcgcggcttccatgatgccgggaccaccgccggtgatgacggcgatgttgcgcttggctatctggctacccatgcgccgggccgccttgtagatcgattcggtgcgctgggtgcgtgcggagccgaaaatagagaccgcaggtccgagctcggcgagcgccccgaaaccatccacgaattccgattggatgcgcagcacacgccatgggtccatgtgcagccagtcggtgtcctggtcgggtttcagcagattggcggtggtattgtccgagggaatcatctggccgcgtagaatcaccgggccgcgatgataggtgtcgcccagcggcgagacgtcctccaagtcgaccgggttcaccggcgttgcggcagcctcggttgccgtctcggcctccaacgttgccgcatcattcgcggctgtggcttccaatggttccatatcgtccacgactgtggacttggatgcggcctcggctagattctttgcttcagcggcctttttgccgtcgttcttcttggatttcttctgcttctttgccatccaatatcctcctgtacggtgctatcgactcttcgcattctagcgcctgaagctctgcatacgttttccgcgaaatcatccttgacttcgtgaagaacgtacggtgagtgacactcagcgtacggttttcacgaaataaggcctcatctcgtgaagaacgtacggtgagcgcgcctcagcgtacggttttcacgaaacaaggccaacaatggagtagggatcgtctaagccatcagtggcggaagtcaatctccacactggcggtgccgtcggcgagggtgccggggtgttccgtgggcgtggtggactttgtggtgcgaccggtctgaccagcgccatcgccatcaatcgattcgtcatcctccgcatcggccgctgctgcggctgcggccttctcgaatctcttggactgacggctcagcagcacaccggaaatcgcagcggcgatcagggaggccaccagcacgccgaagcgcgcctcagcggaaagttccgcattcttgtacgccagcgaggcgatgaggaaggacacagtgaagccaatgccgcaggcgacggcagcgggaatcatgtcgcgcacgcgcagccccttggccatcttgagcccgcccacatgcgtggccagccatgcggtggtgatgatgcccaaaggtttgccgaccaccaaagccacaatcagtgcgataaccaacggcgaagccagcaacagcgggctcaccgactcgaagtgcacgccggtggcgaacagggcgaagatgggcagggccagcagtgcggagaatggctgaagcttgttggcatagcgttcggcacgcggtgaaagttcgccgtgcatttcacgggagggagtcagcaggccaaccagcacgccggccagtgtgggatgcacgcctgcctcgaacatcatgatccaagcgaggacgccgacgatgccgaccgcaatccacggcacttttttcagtcgtacgaggtatgcccagatggcggcgcacacgatgatgccgatgaaccaataccaggcgttgatcgaggagaagaatacggcgatcagaataatggccagcaagtcatcgacggtggcaagcgtcatcaggaacgcgcggatcgaaccgggcagggccttggcaaacagggcgagcacggccagtgagaacgcgatatccgtggcggtgggtactgcccagccgtgcgacatctccgagaacgggatgctgctgccggtggtggtcagaatcagcgtgccgggttcaccaggcccgatctgagagaacaatgccgtgacggccaggaacaggatgggcggggcgatcatgccgcccaccgcgcacagcatcggcacggcggccgccttcggattggcgagcgagccggtggtgagttcctgcttcagttcgaggcccacggtcaggaagaagatggtaagcagaccatcctgggcccaatggccaatcggcaggtcgagattggtgtaggggatgaacagatgcgtttccgcgacggtctcgaacgcatgcgcggtggcgggcaggttcgcgagcaccaggccggtgagcgcgaagccgagcatgatgagtccggaaatacggtctgaagcggcgattcgcctgatggtggaccagagtcccttcttcgcaccggcggtcgtggccatcgcgtctccttactgtactctcttggatgaaccgtatgtaatagtacggaatatctcaggacgttccgctccgggctgagtcgcgaagggcaaccttaccccacccctgtgtggccgactcaaacgggccaatacaattggaaaagcctcggaagcatttcgctttcgaggcttactgtgcgccagacaggattcgaacctgcgacctgctgatccgtagtcagctgctctaatccgctgggctactggcgcataccactgttgtccccgtggttcgggagtgcgccagacaggattcgaacctgcgacctgctgatccgtagtcagctgctctaatccgctgggctactggcgcatgttgtcttttcagacaactcgatatataatacacgccgttcagatgaatgcaactcggcgtgttgcggcgagtcgcaccatcctaatcgccaccgcaacggcgtatttactggcctcacgccgcatgtgtacggactcggtcaagcaaaaccgactacgcaactttgaggcgtccctgcggcacatccacggcttcgcgcaagagtttgggcgtactggaaccctctacggacgccttgtccacaatcacctgcttcacatcatccaaactcggcaactggaacatcgtgtcctgcaacgtacgttcgataatcgaacgcaacccgcgtgcgccggtcccctgcttgatggcgatatcagcaatcgcccgaatggcctgttcggtgaactgcaggtcgacgccgtcgacggcgaacagcttacggtactgcttgatcagcgcgttggctggctgggtgagaatcgccgtcagatcgtctacggtaagttccttcagcacactggcgaccggcaaacgtccgatgaactcaggcaacagcccgaactcggccagatcatcggcattgacctgttcgagcaattcctcgtctttcatgtcggcgtcgtgccaattcgcgccgaagccggtctctcgacggcccaatcgcttgcgaacaatatccgtcagtcccacgaacgcaccgccgcagatgaataggatgccgcgtgtgtccatctgcgcagtgtcctgctccttatgcttgcgcgtgccctccaacggcacggaggcgatggtgccttccaaaatcttcagcaacgcctgctgaacgccctcaccggacacgtcacgggtgatggaggtgttctcacctgatttgcgcgcgatcttatcgatttcgtcaatgtagatgatgccgtgctgggctcggcttacgtcgccatccgcggcttggagaagacgttggagcacggtttccacatcgtcgcctacatagccggcctcggtcagggtggtggcgtcggtgatgacgaatggcacgttcattacgcgggccaacgcctgtgcaagataggttttgcccacaccggtggggccgagcaacagaatgtttgatttggcgacctcaacgtcagccaaagggtcactgttgcggcgggtagcacgcgtctgggcgggagcggattgcttggcttgtttgccggtctggccaccgtgcccgttattcccgtcaagctgctcagcggactcctgaagctccatattgacgcgtttgtaatgattgtatacggccacggacaatgcgcgcttggcgttctcctgaccgatgacgtagcggttgagataatcgaagatctgagcgggcttgggcaggctcagcgaattgacctcggcatctttgacacgctcctcggagatgatgtccacgcacagggcgatgcattcatcgcagatggaggcgttgggaccggccaccagttttctgacctgacgttcggttttgccgcagaacgtgcaacggggtacgtcctcgttgtagctcaccacacgtcccatgattctcctttgccgaccgcgccgcaccgtcgaaccgccacgctgcgcattatcattgtcatccttgaaatacaatacccccggtcgttgccgaccgagggtattgcaatgttcggaagttttactggcggtgttccagcacctcgtccacgatgccgtattccttggcttcaggagcggtcaggaaagtgtccacttcgatgtcgcggcgaatcttctcgacatcctggccggtgtgcttggcgagggtctcctccagccattcgcgcatacgcagcatttccttggcctgaatctcgatctccgtggccttgccgaatccttggtcgatggccggctggtggatgagcacacgggcgttcggcagcatcaggcgcttgcccttggtgccggaggccagcagaatggcggcggcggaggcggcctggccgagacacacggtctgcacgtcgggcttgatgtactgcatggtgtcgtagatggcggtcatggccgtcatcgaaccgccgggtgagttgatgtacatcatcacgtcacggttcggatcctgggattcaaggaccagcagctgggccatcacgtcgtcggcggaggcgtcgtccacctgcacgccgaggaagatgatgcgatcctcgaacaggcgggagtaggcgtcctgggtcttcatgccatacggggtcttctccacgaactgcggcatgatgtaacggttggtcggcgcgggctgggctgcgcgggcggcggccggcatgaaaccggctacgccatgacggccggccaagcggtcggcacgggcggcgaactttgcttcttcacttgccatgagtctcactccccctgctggttgttgccgatggtgtccggcgtggtcacgagcttgtccacgaagccatagtcgagggcttcctgggcggtgaaccagtggtcgtattcgttgtcgcggtagatctcctcgagggtgtggccggtctgctcagcggtcagctcgctcatggttttcttcatgtccatgatgagctcggcgttgatgcgcacgtcagtggcggtgccgccgatgccgccggaaggctggtgcatgagcacacgggcgtgcgaggtcaggtaacgcttgcccttggtgccggagctcagcaggaactggcccatggaagcgcacatgcccaggcccacggtcgccacgtcaggctcgatgagctgcatggtgtcgtagatggccatgcctgcggtgatggagccgcccggcgagttgatgtacagccagatgtccttcttcgggtcctcggcggccagcatcagcagctgagcgcagatgcggttggccatatcgtccttgacctcttcacccatccagatgatgcggtctttgagcagacggttgaaaatcgggtcgacggggccggccgggacgtcatcgcccgccatgaccggcaaggtcgcaaaggtattgctcaccttgattctccttctaattactcgaacattgttcagactaccgccttgaagcgactgaaggcggcttttcgcgtgctttttggcgggtagcgtagggatttcgggttattccaaggtgtcgaggacgtcgtcaatgaggaggcgggtctgggaggcggcatcgtcgcccagacgcgggaagcgacgggcggcattggcggggctggcaccggcggctcgcgccacgttggacttgctggcaccatgggccacggctttttccgcgagccgatcgaccagtgaatcggcgacttggcgcatctgttcggccacccataattgggccatatccgcaggcaagtcgtagtcttcggccacatcgctggcggcctcctgaatggcggcccacaacaccatgaatggctttcgatagtagtcaatctgctcagtgagcggctcagcggcaagcgattcaagtgccgcacggacttcggtgttttctgacatagctttctttacctcggctcccctcagtctcactgtgttcgacagctcccctcagagaggggagccagaatatatgcatctacttacttacgactcagcaaccactttgatatcaacgacgacgtggccacggccatgccgactggcacgaagaaggtaatcggcgcttcggtcagctccatcaccaagcacatggccataagcggtgcctgctgtgaggccgaaagcaacgaagccgcaccgatcaaggcacacgcggttaccgaatcagtcggaaacatcagtatccatacgaggccgagcatcgcacccagcgtggaacctaatgcgatgccgggctgcagcacaccgcccgatgcaccggagcgaatggtcatcagcgtcaccagcgccttggcgacaaaggtgagtgccaacacacccagcaacatccagatattggactgggacagcgggaaaccggcgttcatcacggatccagaagagccgctcccaccctgaagcatggcccaaaacgaggccattccagagcccgctcccccgccagaggccgaatcggatacattaccgccgcccgtcagcaagttccatggagaggcggccgctgaagatgccgactgcatggcaccagcagtgccggcggtttcaggaatgaacgtgctgaatccaagttgcgctgcggcacggccgttgcccatcacctgcggcacaacaatcgccaccaaaccggtgatgagaccagccagcggcatctgccacagaatggccttgccggtcggcttgtgcgcttccgcccattgcgaaccttttcggaacaatgcgccgcccactccacatgccgcaccgcagatcagagcgaacagcattaacgttggcgtggattccggttgcatggcggtgatgtcgtagaacaggcaatgccctttgatcgcaaccgccacgaatgcggcaatggcagacacgcccagtccaaacgcaaccttttcgatcgtcacatccaccaacaggatttcgacggcgaagaacatgccggccagcggcgcgtcatagacgcctcctagaccggcaccggcagccactgccaccaccatgcgccggtcgataccatcaacgccctcgatatggaacaggtcgcaaaaacgttgcgcgatcatggcgccgagttcgcgtggggcgacttctcggccgatcgaggcaccggagccgacgatgaaaatctgcaacaccacatgcacaatggtttgccagaaaggcattcgctttcccgccacggccttcttgactgagggcaccacagtcgttttgtgtcgtagcagataccagataatgcccgcgatgccgagtcccacggtcaccgatatcacacggcgtgcagcgggcacgccgaatggaccagacaattctgggccttcgatgtagccgagcagcacatgttcaacgccgtagagcaacagggtcagcagacctgctcccacaccgatgagcacgccgagcacaatggtcgccgcagcgagccaaccaaggcgtttgatagtaaccgttggctgcatgtcaacctccgcacgctatgcaacgagtatgccttgggaactcccctcagtctcgctacgcccgacagctccccccaaaggggagccaaagaaatagtccttttaccagaataggaagagcccggaaccgtgaaacacgattccgggctcaaacaatcacgctaacgcgatgaggctatgctcactcagcgtccttggcgtcatccttggcggacagttcgtcggccacggcggcagcagcggaagcggcctcgacggactcggactcttcgtcctcagcggcctcgcccaggaagccggagaggtccacaacctcgccatcagcggtgaacttgacggcgcgcatgccggcgagcagacccttggaacggccgacttcctgcacagcggagccaagctggccattcttgatgatggcctggatgaagttgttcgggtccatgccgtactgctgggcgatggaagcgaggaagttgaacacgtcggactgggacacctgaacgtccagcttctcggccagggcgtcgagcaccatctgatcgcgcagatccttctccacggtctcctcggcctgagccttctgctccttggtggccttctccgggtccggggtcatgcccttgagctgctcttcgaccatgttggccttgacacccttcggcaccgggatctcgagaccttcctgcagcttggcgatgaaggcatcgcgagcctcggtggcctgacgaccttcggcgtcctgagcggcagccttgcggatgtcagccttgagctcgtccagagtgtcgaactcggaagcttcggaagcgaactcatcgttcagctccggcagttcctcagccttgacggagttgaccttgaccttcacggtggccttctggccctcgtgctcgccggcttccagcgtgccttcgaaggtggtctcctcgccggcggacaggccgtcaagagcctcgtccagaccgtcgagcatggtgttggagccgagctcgtagctcacgccttcctgggagtcgacggtctcgccgtcaatctcagcagtcaggtcgatgttggcgaagtcgcccttggcggccgggcggtccacgccgaccaaggtgccgaagcgctgacgcagggtctcgaggcgcttgtcgacgtcctcatccttgacttccggcttggagatggcgatctcaagaccgtcgatttccggcagttcgatgtcaggacgacgctcgacggtggcggtgaacttcagcttggtctcgtcgttggcggactgcggaacatcctgcacgtcgaactccggctgagccatcggacgaatcttcttctcatccagggccttggagtacagctccgggaccgcgtcgttcacggcctcaccggcgacggcggcgaaaccgatgcgctggtcgatgatcttgccgggaacgtggcccttacggaagccgggaacgttcacctgcttggcgatttccttacgggccgcatccagatacgggttgagctcttccggttcaacagtgacggtgagcttcaccttggtgggctcgaggttacgaacgctgatcttcacgctaatgactcctcaaaagtcgttatttcttacagttctgccgtaaggcaacctctacatgataacgccacttacggacggtgcaatgagtttcacctgccagtttcttgcgccctgctcgatcaggaacgtctcgacgtccacttccaccgggtcttccacccagcacaggttgcgtaggatctgtggcttgatgatcatctcggccggcgtgcgggtgtcttcggcgatgcggttgatcacacgccgtacccgctgcagacggtcataacgctccggatggcgctgttgccacagtcgcatggatcggggcgcgttcaccacaccgttttcgtcctgttcgggggcgggcatggtaggccattgggtgggcttcagggccatggcgcggtcgatggcctgcttccagaccttcggcttgaccgtacgctgaatcggcgcgtaccgctcgaacattttgtcctgctcggtgccggtatgaatgcgcacacgctcgttcagggatcggagtgcgcggaattgggcggcattgtgcggcttgttggtcgcggcctcgatgattgacgaatcggtcaataacaggctgggagcgatgtcgtatcgccgggcgagccggtcgcgctcctcccatagggatttggcgatggccaagcccctcggatcacgactcagctgggtgatgcgcgagatacgcagccaaggaatcggatgaggtttgcgcggggcaaggcccgcaaccaaagcgtgagaaaactcttcagcggcccactcgtccttgcctgcggctttcaggtcacgacgcatcaaggtttcgagttcgataagcacctccacgtcgagcgccgcatagttgcgccagtcgcgcggcagcggacggtaggaccaatcggcggcggaatgctctttggccagcgtgatgccgaggtagtgttcggtgacggcggccagaccgaagcggtgcaggccgagcaatcgcgccgctatttccgtgtcgaacaaggccttgggtttgagtccgatttcggcgaatccgggcaagtccatcagagaatcatgcagaatccatgtagcatcgcccacggcgtcattgaattcattccagtcagctccggcccgtgtcagggcgacgggatcaagcaaggcgatgcccgcaccttcacgtttgaactgaatcagccaatcctcatgtccatagcggaatccggacgcccgttcggcgtcggcggccagcgagcccgtcgcctcggccagcgcatcgcaggcacgatgatagccatccagcgacgaagtgacatcgggcactcccccgcgaggctctttcagcagtcggggttcggtgtcacggacgtcactcaactggcgtcatcctcctcaaaacggatggtggatctgatgaatgcggcccacgagcggatttgtgcgccggcgtccatagtaccgtccggtccggtcccgtcaagcggggtccatgagacgcgaatctcacacccggcgctggtggagccggccatcgaaccaaaagccgtgttttgggtcacggtgactgtgccggataccgaatccggctcgatgccgtcgaaatagtcgcacatgtcatcccagtacatgccgggggtcagagaatcgttttcggcggtttccagcggcagccgcgcgaacgccacgcaacgccagttggaatcccggtcaatgcgcagctcatgagcataaagcatcatgatccagcctgtggcgattcgtgattcggcatcgttgccaagaccggcggaaaaggcatcgccgagggcacgctctcccgcttcgaattccacgccgataccataatcggccaaggtggaaggcacgggaatctcccgatagcgcacgtcatggatgcgcttcatggtgctgacggattcgacagctgcccatacttcatccggcacaccctgagggcgtacggggcgtccgtcgttggacgctcccataggaaatgcgtagatgtcggccatatctctagggtatgggcgaacgggccgaatcgtggtatttacgcgcggttcggccctgcaatttaaaacacggtgaagccgtggtccttgaactggttggccacccgcgaacgggtggcggcgttgggtcccttctggttctccagcgggtatgggatgcgcagttcgtgccacttcgggcggccaagctggtggaatcccagcacgtcgatgtgttcgacggcatcaccgaaggactcgcagatcttcgccacgttttcgacgttctcttcggagtcggtcaggcccggcacgagcacaaatcgtacccagatcttcttgccggccttggccagtcgctggccaaaatcgatggtgggctgcaaggtgccgccggtgaccttgtgataggtctcctcgtcgccggatttgacgtcgagcagacacaggtcgatgtcctcgagcatctcgtcggtgtagctcgtgttgaggaagccggacgtatcgaggcaggtgtgcacgcccatctccttggcggcatggaacacacgcgagacgaaggcgggctgcatcatggattcgccgccggagaaggtgataccgccatgcgtggccttgaacaggtccttgtaacgatcgaccttcttgatcatggcgtcaaggtagacgggcttgccgtcgcgcatcttccaagtgtccgggttctggcagtactggcagcgcagcgggcagccggacatgaatacggtcatgcgggtgcccggtccatccacggaggtgttgatgtcccaagagtggacgaagccgatatcgccggatttcagggcggaaaggcggtcacgtcggtcgagtccgattggggattcaaagccggacaggccgcccatcaaagtctgcgaggcataggtcttcgattccttgagcatatgcctggtcgtggtgcggaacgtgggtgttgcgggcatagttgtcctcctgttccaaatgatgcgaaagtctgtggaaaataaggaaggggtggagccgtgccccaccccttcagttagtcattgccgcggttcgcggggttggtcatcagtcgacgacggcaccttggtggaaggtacgggagatgacgtcgagctgctgctccttggtgagcttgacgaagttcaccgcgtagccggagacacgcacggtcaggtgcgggtacttttcggggtgctcgacggcgtcctccatggtctcgcggcgcagaacgttgatgttcgcgtggtagaggccgtggccgttgcccgcgtccaggatgccgaccaggttgccgatgcgctcggcttcatcgcggcccaggccatcgggggtgatggtgttggtcagcgagatgccgtcgagggcgtcgttgtagtcgatcttgccgacggagaacatggacggcagcatgccgtgcgagtccatgccgttctccgggttggcacccggggcgtacggggtgcccttcttatggcgggacgggaaggaaccggtgttcttgccgtactccacgttggaggtgatggtcaggatggactgggtcgggacggcgccacggtagacgggcaggcgcttgacctggcccatcacggtggagacgacccacttggcgatgtcgtcggcgcggtcgtcgtcgttgccgtagaccgggaactcgccctcggtgcggtagccgacgaccagatcgtcgtcggcgccttcgacgtactcgtactcgtggccttcgaggttcttggcttccttgttggtgatcgggtacaccttggcgtacttgatggcggacagggagtcggcggcgatggacagaccggacatgccgcaaccgagggtgcggtacacctccttgtcgtgtagggccatctcgatggactcgtaggcgtacttatcgtgcatgtagtggatgatgttcagcgcttcgacgtaggtttcggacagccactcgagcgccttctcgtagttgttcttgaccttctcgtagtccaaggtgccgtcggcctccggggcgatcgggtcgatgacgcccttgtcgatgacctgcatgccggtcatctcatcgcggccgccgttgatggcgtacagcagggccttggcggagttcacgcgagcggcgaagaactgcatctgcttgcccacgcgcatcggggagacgcagcatgcgatggcggcgtcgtcgccccagtgggaacggatttccttgtcggactcgtactggatggccgaggtgtcgatggagatcttggcgcagaagcgcttgtagccttccggcagcttcggatcccagaagatggtgatgttcggctcagggccaggtccgaggtgctcaagggtcagggtgttgagcagacggaaggaggtcttggtgaccatcggacggccatcgtcgccgaagccggcgtcggaccaggtcgcccagtacgggtcgccggagaagatgttgtcgtagtccttggtgcgcaggaagcggacgatacgcagcttcatgacgatgttgtcgatgagctcctgggcgtcggtctcggtgatcttgccggcctcgaggtcgcgctcgatgaagcagtcgaggaaggcggagttacggccgaaggacatggcggcgccgtcctgggacttgatggaggccaggtagcccatgtaggtccactgcacggcttcctgggcggtctgagcagggcgggacaggtccaggccgtactcgttgccgaggttgatgagctgcttcagagccttgatctgctcgtcgtgctcctcgcggaagcggatccagtgctcgatctccggctcggtgaagtcgttgcggtacgggatggagtccttgtcgcgcttcttgaaggcgatcagcttgttgacaccgtacagggcaacacgacggtagtcgccgatgatgcggccacggccgtaggcatccggcagaccggtgaggatcttgttgtggcgggcgaccttgatgttcttggtgtagacgccgaacacgccgtcattgtgggtcttgcggtacttggtgaagatcttcttgatctccggatccggctccttgccggcttccttgatggcctgctcgaccatacgccagccgccgttcggcatcatggcgcgcttgcagggcacgtcggtctgcaagccgacgatcacgttgtcgacttccggggagtcgatgtagccggccgggaaggcatcgatgccagccggggtgtgggtgtccacgtcgtagacgcgctgcttgcgctccacggccaggtagttgtcgtcgaggtacttccacaggtgcttggtcttctcggtggcaggagccaggaatgtctcgtcgccctcgtacggggtgtagttcttctggatgaagtcgcggacgtcaatatccttctgccagttgccctcggtgaagccggcccatgccttggcgtcgagctcctcttgggagacagctgcattttctactgcggtcatgtcactccttaaatggggttgtaggtttcgcatcttcacggaacccttggttcaacagtgtagttggcacttgcttgggaaaagccgaaattgggagtgagctatctcacattgttttttgtgaacgctaccattccaatggtttctaggtattgatggggctattgcacgtctccagatatgggaaaccgctcatactgtgatgttcgtatgagcggcttggtgagcggttcggtcttgagattgacagcagaaccgtatccgtctgttttggccgtcagtcttcatcgctcgcttgcgcggatttcacaccgtagttcttccagcgccagttctcctcctcccatctggcgttgcggtccaccacgatgtcccaggcgtgttcggcatcttccttggtcttgtacggacccatgcgctgttcaatcggtgagaccatgcccagctcggcctgcttcttgacggtgttgaaataccactgcttcttgttatcgtctgtcattggtacctcctcaacggtattacttgctcccgctggcgggagcaatatatgtttattccctgaacgcgttgatgacgggcagtcggcggtcgcggccgaacgcgagggccgtgaccttcggtcccaacgggtattggcggcgcttccattcggcgtggtccaccaatcgcatcacagtgtccacggtggcctggtcgaagccgtcggccaacaggtcggcgcggccgtgcgcgtgctcgatgtatgcagcgagcaccttgtcgagcagcgcgtattcgggcagggagtcggagtccttctgcccggggcgcaactcggccgagggagccttctcgatggatgagaccggaatcatcacgccgtccttcaacgggatgccggcgttgccgtcctcgttgcccacgatcttgagcccgccgataccgacgcctgcggccgcggccttgttacgccaacggctgatctcccagacacgggtcttgagcaggtccttgatgggtgcgtagccgccgaccgcatcgccgtagatggttgagtagccgcaggcgagctctgacttgttgccggtggccacggcgagcaggccgcgagaattggaactggccatcacgatcacaccgcggatgcgggcctgcaggttctcggcggagacgccatcaaggtcaagttgctgttggtaggcgttgaacaatagctcaataggctggacctcgtaatgggcaccgatgttggaggccaggtcagcggcgtcgtctttggaaccatcggaggagtacatggagggcatggagatgccccagacgttctcgccgccgcatgcgtcggccgccatggcggctaccagtgcggagtcgatgcctcctgagaggcccagcgtcacgccggtgaagtggttcttggccatgtagtccttgaggccgagcacgcaggcagtgtatacctcttcgtccgggtcgagttccggaacgatctcggccttgacctgatgttcggcggtggaatcgaagtcccagaacgtcaggttttccatgaacatcgggccgcgttcgataagcgtgccgtcggcatcgaccacgaagctgccaccgtcgaagaccaggtcgtcctgaccgccgacctgattcaggtagatgaccggggcgttgacttcggcggcacgacgctgggcgagctcgaaacgggtgttggtcttgccttcctcatacggcgagccgttgatggtgagcagcaggtcgatgttcttggtggccaggtcggccaccgggccaccatcctgccagatgtcctcgcagatggccacgccgatggtggcaccatccacgtcgagggtcacggaacggtcgccggcggagaagatacggaattcgtcgaacacgccgtagttgggcaggaagtgcttgtcgtagccggcccagaccacgccctgatgcaataccaccagtcggttgcgcggcttggaggtcttacgatcagtgcccacggtgccaaccaccacgaacagattgccgaggccgtcgtcgttgagctgggcggcgagttcgttggccttgtcccatgcggcttggcggaaggtgcggcgcagggccagatcttcgatggggtatccggtgagggtcatttccgggaaaacaaccacttgggcattccctgcggcggctttacgggagtagtcgagcactttggcggcgttggcatcgagcgcgccgacgcaggtgtcgatctgggcgagtgcgaagcgaagctgtgtcatagcttcttagtgtagccgcgtatggcgtcggattgcctgttcttccggcttggcgtcattcattaggtcgtttttgcgttcattaggtcactgcaatgcgatatcagtcgttgcaatggcgcgattccaacaaccagtatcgccgttcaccgacctaatggacgatgaatcgacctaatgaacgaatgccactcccctcagtcagcttcgctgatagctcgtcctgcacttatggacgggcgaggcccgcgcatatctggttcggctgtcgcctcactttcggctgcagacagcccattgggctgtctgcctaacgcctcagcctccagaggggagccaaaaaaggatttacctcagctcgttgagcacgcgcagggcggcgttgacgtagaagttgacgaaggtgggaatggattcgtcgagacccacgaaatgcgggctatgccagtcggcgcaaccttcctggccgtttgacccgacgaacgcgaacaccggcaacgtcaccttggcgaattcgcagaagtcctcccccgccatcgactgacgtatcggttcgagctgcgcgtagtcgttgacatccgccgccacggccttggcaagacctggatcggagaccagcgggtcttggaaatcatcccagaccacatcggcgctgataccgtatgcctcggcggtgtgttccaccacttccttgaatcggcggccgaccagattgccatccgacttgtggaaatagcgcacagtcccttggaatccggcttcggcgggcaccacgttccacacatggccgccgtgcacttcggtaacggacagcaccagcgggtggaagggcgtgacgttgcggctcacgatggtctgcaggctcagaataatactggcgagcgcttcgatgggcccggtgcccttgtacgggtagccggcgtgggtgccttgggcgtggagggtcacgcggaatttcacgcagccggccatcatcggctcgacgccgatggccagctggccggacgcatagttggggttgttgtgcgtgccgataatggcttcgacgtcatccacgagtccggcgtcgatcatggcgcgagcgccttggccggtctcctcactcggctggaacagaatcttgattgagccggcgaacttgtcacggtgctcggcgagccagaaggcggcaccgagcagaccggtcatgtgcaggtcgtggccgcagccgtgcatcacgccttcattgacggagctgaactccagtccggagtcttccacgatgggcaggccgtcgatgtcggcgcgcagcccgatacgcggcccgggaccggcctcgccctgaatgagccccacaacaccagtctccagcgggttgtgcaggatctcgatgccgtgcgccttgagctggtcggtcagatagatgctggtgtcgaattcacggaaactacgctccggatgggcgtgcaggtagtggcggatggtgatgagttcgtggtcgatgtcgatatgttcactcatggttcccgattctagtagcgcgaagaatatattgcggccctcgcttcatattggcgagggccgcgatctatggggtcagtatgccttgttattgctggcgtttgagcagtcgtttggcgatggcgttggcgatgccctgcaccacctggaccagtacgatcatgatgatcacggccgtccaggtgacggtctggtcgaacttctggtagccgtaggcgatggcgaagttaccgagaccgccaccgccgatgtagccggccatggcagacatgtcaagcacgccgatgaacaggaaggcgtaggccaggatcagcggtgccagggcttcggggatgagtacggtgcggatgatggtgagcttgccggcacccatcgaacgcgcggcctcgattactcccgggtcgaccggcacgagattctgttcgaccagacgagaagtggcgaaggtgcacatgaccaccatcgggaagatggcggccacggtgccgatggacgtgccgaccacgacgatggtgagcggctgcatggctgccaggaaaatgatgaacggaatcgggcgcacgatgttgacgatgatgtcaaggatgcggtagacgaccgcgttctcgaacaggttgccggggcgggtgccatagagcaccacgccgaggatcaggccgaggaatccgccgatgacaagggtgacgagcaccatggtcagggtctggccgatggattcgaacaatagtgggcgcagcacgttccagtcgctacgcgagttggcgaggatgatcatgcgttgtctccttcatgtgcggcggcggatacagcgggcgcggtggcagtatcggccgccagtgggtcatgggcgcagtcttcggcgtaggaggcatgtccggcaactgcgtcggcgtaagccacgggctttgcggcggtgccgaagtcaatgacgtcgctattggcggcgagctcgcgcaggaattcgtccacgtgccagccgggcccgttgaattcgtaggtgatggcaccgatggcggtccccttgaccgtgtcgatgccgccgtagagcaggctggattcgacgccgtatttggcgatgagttcggagatgttctgtccggatgccttgagttcgtggccatggctgccggaaacgtccttttggcggatgagcacggtgacgatgcggcccgaccattcgtggtgcaatcgctcgacccggtcttcctcgggcaggccggacagggcggtggcgatgaatcgcttggtcaccggctgctggggcgcggcgaacacgtcgtatacgtcgccggattcgaccacgcgtccggtgctcattacggccacgcggccggcaatctgctggaccacgttcatctgatgggtgataagcacaatggtgatgccgaattcctcgttcacacgcttgagcaaggccagcacttcggtggtggtttccgggtcgagcgcgctggtggcttcgtcggcgagcagaatctccggattagtggccagtgcgcgggcgatgccgacgcgctgcttctggccgccggacagctgcgaggggtatttgtttgcgtgctcactaaggcccacgaattcgagaagttcgttgacgcgacgatcctgatagtccttgcgccagtgatcgagttgcagcgggtaggcgatgttctgcgccacggttttggtggagaacaggttgaactgctggaaaatcatgccgattttctggcggatgggccgcagcttggtctcactcaaagaggtgatatcggtgccgagcacggtcacggtgccggaggtgggtcgttcgagcgcgttgataagccggaccagtgtggatttgcctgcaccggaatagccgatgatgccgaagatgtcgccgcgatcgatggtcaggctgacgtcatccacggctcgtgcgatgttcgcgccgcgtccgcgtgttttgaattccttcacgacatggtcgaaggtgatgatggggtcgctcatagtgctccctgatgctggttgttgatgtccggtcacggaagcggagcgaatcccgattgttggctcgggtactcgctccgcttggtggtaatggctatggacaggttagtcgtgcactcgtatcagccacggctcactgctgggctttggcgtccttctcaatgtcggacaggaagccttgcagctcgctggcgctgaacttgtcggcgaacaccgcggtaccgccggagttctcctgcagggcgtcgagcacatccttctgctggtagatggaaacgagcttcttgtaggtctcgttgttcacgtccgccttgcgggccacccacacgttgatgtaggggcgagcttcttcggattcggcgtcatcctggtagatggcgtccttcgggttgagaccggcgtcggccacgtagtcgttgttgatcacaccagcggcgatggtcgggtccttcagggtggtggccacctgttcggccttgagcggggtgaccttgaccttgctcttggcttcgtcgatgtcggccggagtggagaaggcggtccagtcgcccttgagcgtcacgagaccggcggccttgagcacgccgatagcgcgggcctggttggtttcgtcgttcggaatggtgacggtgtcgccctgcttcaggtccttgatgtccttgaccttggtggagtacacgccgagcgggtagatggcggtgccgccgatgggctgcaggtccttcttgttgctcacgttgtagttggccaagtagagcaggtgctggaattcgttgaggtccagctcgccggagtcaagggccgggttttcggaggtgtagtcctggaagtcgacgatgtcgacgtagatgccggccttctcggcgtcctgcttgaacttgacccattcggggttggtagcgccgaccacgccgatcttgaccgggttgcccttgctgcccttggcggacgactcgttggcaccggcaaacgcgcggtagccgaagaacgcggccacggcgataatcgccacgaccacgatggtgatgatgacgttgcggacggtgtggttcacacgcaccggctcgttattgttaggagcggccggagttgccgactgggttgctgctgtcattggatttcctctctccaaaattgatgtcgggtaacaccataacgcgcttgaaccgcgaaagtgacggaaaatggccgattgccgtataggtgtcttttatggcgcgcatgcaatggccgggattcgtgcgtttgataacccgctataggcgtgccgaacacgccggaaagcacgtcgagaggggctttgacaatggaagctatgactaccgatactgccaatgccgatatccgagccgtattcttcgatatcgatggcacgctcaccagtttcacgacccatacggtgccggattccacaatcgaggcgattcaccggctgcaggccgcaggcgtcaaggtgctgatttgcacgggccgcgcgccttcacagatgcacgtggtgctggataccatgccggtgacgttcgatggcgtggtggcgttcaatgggcagtattgctttgatgacaccggcttctttgcctcgcaggccttggatactgctgatattgaggtgattctcgactggctggaccgtcaccccgatgtggtgtgcaatttcggcgagaaggattacgtgtacttcaaccagtccaatgatctgcttcgcgccacgtggagcaaactgggcaaaaccgcaccgacccggtattttgaggacccgcgcacccgcgcgctggatcatgagactttccagatcagtccctttgtcggacccgagttggaggccgaactggtgggactgtgcagcaatgtgcgcggggtgcgttggcatccggatttcacggatctgattccggccgatggcggcaagccgcgcggcatccagcggttcatggcgcattacggcatcacgcgcgggcagaccatggccttcggcgatggcggcaatgacacggatatgctcgcctacgccggcatcggggtcgcgatgggcaatgcgaccgccgagccaaaggccgccgccgattacatcaccgacgacgtggaccacgacggtgtgcgcaatgccctactgcatttcggggtgctacgcgattattgatgccgtagcgcctcgaccgggtcgagctttgccgcgcgcctagctggatagtagccgaaaatcacgccgacagcgatgcagatgcccactgccagtccgatggactgcacggaaactgctggcgcgatactcatgccaccggcgatgccggacaccaatccagcggcgcccaacgacagcaagtagccgatcaacgtgccgataagacctccaagcactgtgattgcaatggattcggcgaggaactgcgcggtcacgtcacgccgagtggcacccaatgcccggcgcaggccaatttcgcggatgcgttcggtaacgttggtgagcatcatgttcataatgccgatgccgcccaccagcaacgagaccccggccaccgaacccgccagcacctggaatgcgctcatgaagctggaaagctggtcgatggaggattgggcgcttacgaccgacagattctggtcgatccgttcggttgggatacgcatgatgcgagcgacaacggtcttcgtctgttccgtgagctggtcgatatcaaccccgtccttggccagtccgtagatctgcatgtatcccatgttcgaggacgcaaaccgcagcgccacagtggtggcaggcatatagatattcacgctgtcgccgcccatgccgcccatcaatccagacgactcgaccacacccacaacggttgcttcattgccgtcaagcgtgacggttctgccgatggcgtcaatgtccgcgctgccgaacagcttctgcacgccctgcccgtcgagaatcaccaccattgcaccactcgttgcttcactcgatgtgaaggcccgtccacgaccaatcgtcactccggatacatcgaagaaatgctcgtcgacaccggtgatgctcgccgacaccttgtcggtggtaccgggcgcggcgattgacgaggcggcaccatagttcgtcggcgagaagtactcgtagtcggtcagttcctcgcgcatcgcagtgatctgttcgtcgtcaagggtgccgacgtccgtgtaaatcgaaatcgtgcgcgccgcgttcatacccagttcgccgaccagagagtctcgaatgccaccgatcagtgaggtcatggtaatcaccgcggcaatgccgatgacgatgccgagaatggtcagtgcgcttttgcctttgttcgccctcagtgcggagccggtttccgccagcagatcccgtgttctcatcggtacatcccttcacgcagtacgccgtcacgcatgtgcaggcatcggtcggcgcgttcggccacttcggggctgtgggtgatgagcacgatggttttgccttgctgcttgagctgttcgaacgtgtgcatcaccgcatcgccggttttggagtccaggttgccggtcggctcgtcgccgagaatcagcggcgggtcctgtaccaacgctctggcgatggccacgcgctgcatctgaccaccggagagttcattggttttgcggtcgaacagttccggactcaacgccactgattggagtgctttgatggcacgcccttcccgttcacgcaccgggcagtcggaataggccaggggcagcatcacgttgcgcagcacgctggtgcgcggcagcagattgaaggattggaacacgaagccgatgagccacccgcgcagttcggagcgttcgtcatcactcagattctgcacgtccatgccgcacaggcggtaggtgccggatgatgggcggtcgagcaggcccagcgtgttcatcagcgtggatttgccggaaccggatggtcccatgatggcgaggaactcgccttggcgcacgttcatggtgatgcctttgagcacatgggtgtaggtgtcgcctgtctcgaagatgcggttgatgttttcaacctcgatgacgttggctgtggcggtgggcacggcaatggtctcattacgccgtttgccgcgatttgcccggctcgcgtcggaacgaaacgggaacatatcagcgtgccctttcgtccgaagccgcggtttgcgaggtggaagaagcagcatcgccagtattgtcggcagccgaagcgccatcaagcatgatgacatcgcccttgctcacattgccttccacaacggctttggtgttgttcttggctttgaccgtgactcgcacccgcttgaactcatgggtttcggcgttggtctcgagcatgaccgcgctgctctccttaccctcatccacgatggcggcgagcggcaccatcaaagcgttgtcaatgctctgcatggtgattttcacactggccgtcatgcccggcttcagtttcggatcaggggcgggaatgatgagacgcacggcgtatcccacgccgccgttgccactctgcccgcctgccgaggaatcagccaactgcgacgtggtgctggcgatggtatccaccttggcatcgagcgtcagtcccggcaccgcggagaacgtgactttggcgctctggtccttggccactttagtgatatccagctcattgatgttgacattgaccttcatctgactcaggtcggcgatctgacacaatggtttaccgtctgcgccggcggaagtggatgagccatcggaggaagctccgatggcggcaccgggcaccgcgctcatggtcagcaccgtgcccgagaccggagcagtgaccgtacgcttgttggcttgggcgaccgcctcgtcataggtggcttgtgcttgctgaacggcgacctgcgcgctctccacgccgctttgtgcagcgggcagctgtccggccgcatcatcggcagcggcttggccttcctcaccatcctgattacgtgcctgacctatggtcgcattgatttggttcacctgctgctgggcggcattaaggtttgagttcgctgctcgcagagccagatcggcctgattcacgtcgctatcgagcttgtcgttgttgatggtaaacagtacgtcgccggcgttgacggttgcgccttcctgcaccttgacttcgccgatggtgccgtcgatctgcggggcgacgacggtggagttgatgggttctatggaaccggtggagctgacttggtcgacgaaatggccacgttccaccgttgccgtggataccggagacacgcccccatctgacggggtaataatcgcgtgcaccaccataaagccgataatcagtaccgccacgacggcgacgacgatgatgcgatgcaccactcgctttttcttgcgcgtctcacgttcgcgcattaatcggttgaattcggcgacttccgcgttctccgcctcgccttgggcaagggcgtcgacacttgattccacggtgtcggtagcgtccaacggttgtatgattgcggtctgctgctgatccttctgcatgtgctctcccccatggctggctccgagcctcgcgcccggatactggttccaagcctatggaggaatggcgtggtttccatcatgcgcaggattgaattgatggggagttgtcatccttaaggattagttggggtggggaatttatgggctgttttcagtcttggctctcgccttcgcttccacttttctctcccccagtcatgcttcgcatgacagcctcctcgtcagagggggcttatgaataagcaaagggctcgggacgaatcccgagccctttggcgttagcgaactaacaacaccgtggaggtgttatcactcgttgtcgccagcggtagcggcggtagcggtgacggcacccttcttgtcggtgttcacgccggagtacacccagtcggtgtagtccgggtggtcgtagcccttgtcgacggcgaactggaaggcctcatcacggaacttctcgagctcgtcgatcttgtcggcgtacttgtcggcgtcgatcatgcgcagggcctcagcggtcagctcgtagcggtcgatgcggttgacacgaaccatgtcgtacggggtggtggtggagccctcctcctcgtagccgtggacgttgaagttgtcgtggttcggacggtcgtagatcaggccgcgcacgtcgtgagcgtaggagtggtacgcgaacagcaccggcttgtcggcggtgaagatgtcggcgaactcctcgtcggtcagagcctcgtcgttctccttggcggactgcagggagagcaggtcggcaacgttcacaaccttgaacttgacgcccagttccttcagcttgtcggaagcagccatgatctcctgagtcggaacatcgccggcggcggcaagcacgacctcggcctcatcgttgttcttggcggtggaagcccaatcccaagcggcggcacccttctcgagctcggcacgagcctcgtccagggtcagccaggtggcagcaggctgcttgccggcgatgatggcgttgatcttgttggtggacttgtagcacttctcggcgatggccagcagcatgttcgcatcggtggcgaagtagatgccgatgacgtggtcattgtggaagcacttgttcagcaggacggaggtgacacccgggtcctggtgggagaagccgttgtggtcctgacgccaaacgtgggaggagaccagcaggttcatggaggcgatcggcttgcgccacggaatctcgcggacggtagcctcaagccacttggcgtgctggttcagcatggagtcgatcacgtggacgaaggactcgtaggagctccagatgccgtgacgaccggtcagcaggtaggcctcgaggaagccttccatctggtgctcggacagctgctcaacgacctggccggagacgtgcatgtgctcgtcgacctcgtcggagatgtagccggcatcccactgcttgttggtgacttcgtaggaagcctgcagacggttggaagcggtctcatccggtccgaagatgcggaagtcgcgcgggttgttcttgatgatgtcgcgagtgtaggcacccagggtacgggtggcctcgagctggccccagccgtggccgtactcagccacttccttgacctcgtagtcctcgaggttcggcagcttcaggtcgtcgcgaatcacaccaccgttggcgttcgggttggcaccgatacgcagctcacccttcggcatgaaggcaaggacgtcgtccttgacagcgccgttggcgtcgaacagctcttccggcttgtaggactcgagccagttcttgaggacctcgaagtgggcctcggtgtcgcgggcggaagccagcggcacctggtgagcgcgccaagagccctcggtcttcttgccgtcgatgtacttcgggcaggtccaacccttcggggtgcggaagatcagcatcgggtagaacggacggtgcacgttgtcggtctgagcggcggccttgatgtcgcagatctcgtcccagatggtctcccacagctcggcgaagcggcggtggatggacatgtggtcctcatcatcgaagccagcgacgaactcgtagggctcgtaacccatgccgtggaagaactcgtggagctcttcgtcggagatgcgggacaggatggtcgggttggcgatcttgtagccgttgaggtgcaggatcggcagcacgataccgtcggtgcgcgggttcacgagcttgttggactgccaaccggtagccagcgggccggtctcagcctcgccgtcgccgacgatggccgggacgaacaggctcgggttgtccatgatggcaccgtaagcgtgggacagagcgtaacccagctcaccaccctcgtggatggagcccggggtctccggagcgaagtgggacggaataccgcccgggtaagagaactgacggaagaacttctgcagaccagcttcgtccttggtgatcttcgggaaggtctcggtgtaggtgccgtccaggtaggactgggaggtaccggccgggccaccgtggcccgggcccatgatgatcacggtgttctggccgtggtcagcaatgaaacggttgatgtggccgatgaggaagttcaggccaggggtagtgccccagtggcccaccagacggtgcttcacatcttcgcgggtgaagggctccttcatcagcgggttggaacgcagataaatctggccgatggaaaggtagttggcaacgcgccagtacttgtcaacgccttcgagggcttcctcggaaaccggagcgttgagcttcttccaaggggtgccaataacaggactcgtcatgtgtactcctgtactcctgcacgtgatcgtgcgattgattatttctgttcggtcacggttcctgacccttgcggtgccaaggttttccgttcccaatcaatcgtcatggtacgaggacaacgcgacttttgaacgatttcttgcgggtgtgttcgaaattgttgcggaaatttcagtatttgtgcggttcacctgaccgtttgtcaacattagttttttcaacatactttttcagaacggcggaagcatgcggaaatctagcatctgactagaacagcgcacgttcgatttcccatgttcgaaatcggcgtgttgtccgactacaggcatgtagtttgttcgatttgcgcacatagtccctgcgtgtcggccttgtcgccttgaccagtgataatcaggggtgttcagcccacgtaaaattccaatgaacgttaggggaatatcaatggcaaacggtcctgtgcttgtcgtcgacttcggcgcccagtacgcccagctcatcgcccgccgcgtgcgcgaggcaggcgtgtactccgagctggtccctcattccatgccggtcgacgagatcctggccaaggatccgaaggcgattattctgtccggcggcccggcctccgtgttcgagcccggcgcgccgaccatagataccaaggtattcgaatccggtgttccggtgcttggtatctgctacggcttccaggtcatggcctatgagctcggcggcaaggtggataaggccgctctcggcgaatacggcaagacctcagccaccatcgacgacgccgacggcatcctcgccgactcccccgccgagcagaccacgtggatgagccacggtgtggcggtcgaacaggccccggccggcttcgaagtgctggcccacaccgaaggcgcgcccgtggccgccatggcggacgaatcccgcaagctctacggtgtgcagtggcacccggaagtcaagcactccccgcttggccagaagcttatcgaaaacttcctgcaccgttgcgccgcgctgcccaacgactgggacgcctcctcgattatcgaggatcaagtcaagaagatccgcgagaaggtcggcgacgccgaggtgatctgcggcctgtccggcggcgtggactccgccgtggccgccgctctggtgcacaaggccatcggtgaccagctcacctgcgtgttcgtggaccacggcctgctgcgcaagggcgaggtcgagcaggtcaagcacgacttcgttgccgccaccggcatcaagctcatcaccgtggacgcggccgacgacttccttgaggccctgaagggagtctccgagccggagcgcaagcgcaagatcatcggtgagaagttcatccgcacgttcgagaaggcccagcgccaagtgcttgaagaggccggcgcgcgcggcaaggaagtcaagttcctcgtgcagggcaccctctaccccgacgtcgtcgaatccggcggcggcgacggtgccgccaacatcaagtcccaccacaacgtcggcggcctgcccaaggacatcaagttccagctcatcgaaccgctgcgcaccctgttcaaggatgaggtgcgcgccatcggcaccgagctcggtctgcccgacgaaatcgtctggcgtcagcctttcccgggcccgggtctgggcatccgcatcatcggcgagatcaccaaggagcgcctcgacctgctgcgcgaggccgacgccatcgcccgcgaggagctctccaaggccggtctcgaccgtgacatctggcagtgcccggtcgtgctgctcgccgacgttcactcggtgggcgtccaaggcgacgagcgcacctacggctcccccatcgtgctgcgtccggtgagctcggaggacgccatgaccgccgactggtctcgcgtgccctacgacgtgctcgccacgatctccacgcgcatcaccaacgagtgccgccagatcaaccgcgtcgtcctcgactgcacgtccaagccgccggcaacgatcgagtgggagtgacgctacagcaaacgcatgcgaaaaagcgggaatagaacaagtgttcgattctatattataatgcctgccagcgggcgcggtttcttccaaagccgcgcccgctgctgtatttgagcggatatcaacggagacccaagctcggggaaggctgttgcaatggctaggatttcaagaaggagttcagagagccctacaagccgtccggcaagccgggagtcgtaaccgttccgcccacatgagctacgtcgccgtgcgggacaagggcgaccctcatgaactggtcaagcgtgatgtcatacctcggcgtacacatacgacaaccatcacgcaaaacttagatagtgtaaacacaacctaattcaggaagaaatcatcgacttcttcgcgcgtgtgcaggatttcgctatccggaacgttgaggcttgccgccagctcaacggagccggaaaaagccatggcggaattcggggagaaagccttttccagaagactgatgtattcgctcatattctcacgaaggccgctgatgcatgcggcgtattcgctttcgagctctgtgtcgagggccttcagctcctgggcatagtgcgcgagcagctccgcctctcgtttgttatagaagttctttcccagctcgtatacggtcgtacctacggcgttgccgacgagagcgcccagaatcggcaccggaatgatggcctgacccacgaagctcgagaacgcgctcacggacgcatcgagacatgcgatttcggagctttctataaactcgatctccgtaagtttgccgctacggaacctgtaagcgcagtcagcgacgccgaatgatgccgtgactagcgcacttgcgacagatgagggtgtggccgcgtagttgttcagccaataaacggctccaccgcgaaccccgcccttgacgagtcccatgccggaatctttggcgatttccgcccagtcatcctgggtcaagtcgccgatgcgctttccgttcccgagatggcgcttcattgagatggcgaacgccgttcccgcttccagaacggcaccagccgctgcggcctccgcgccctcttggggcgtgggcttgtgctcttcgtggatgtccttctttattcgctcgctctcgtctgcgagcctgctcttctcctcggccatcttgtcggcgataacgttcttttggacctctgagtactcgaacttggaggcttctaggtcatcgatgctgaacccgcttgagtcgaagaattcatgaatgcttttccacgttgagtaggatggaccgccagctgaggacaccagcttggccgcttctttctcgggcatctcgtacagggaacgcactgcgtcgagatggtccttcgggatttggtaggtgccgtccttgtcgaggaaatcgggatacttcttcaaatgggcagccactgcgttcagggagaacttaccgccggcgttcacgaacttgacctgtatcttgacaccgttgcgcgaaagatcggtgggcccgttgtcgttcacccattccattaccggtttatcgccatggacgaggttctgcgcattttccaatccacattcggccacttcggcgatgaagccatggacgcccttgtcgccgcccctgttcgcaacgatgagatcctcgattttcccgagcgcccagttcatggactccattgcggaatcaaggttctgatcttggcggttgagattctcgataaggtcgttgattctcatctggttgatcaggccgacccatgcggcgacggcctgctcctgggagctcttgactatcttctctgccttcacggctatttaccgtccttggtggtcaccctctcgacgatgaggacgccgagggactttgtgctgtttaccaaagagcctagagccagtttctcgtcgtcggaaatggaaaggtaatcggcaccgtgtagatggcatgaggacatgaaagatccggacagctcttcacgaagggcatcggtctttatcttaagcgccccgatcgccgcggacgtctccttaagggcctcggtgtttcgctttaccgacaagagttcctcgtgcttttccctggcgatctcgtgctgctttttcacgaagaggacgatggaggtcagcagcgtggcgcctgcgacgccccatccgatgggaccggccattgccaggaaagcgttgccggcggccattccgccgcctccggcagccaatgcacccccgccgagccaggccatcgccgcattcgtcgcggcagcgcttgacagcgtggaaatcgcggcgccagtggaggcggtgccgaaagtcgtggcaacccacatggcggcggatggggcgatactggcaacggccatgcccgccgcgacgccggcaccggcgctggccgccgatttccgtgccgagtccagctcttcgcgggcgaaggcttccgactctttgaagcttcgcttcttgtgggacacctcctcgatattctccacgaacgacttcggcgtgttcgcgatcgagttcaccaagtcggtaacgaggtccagcaggtcgatgctcctcagcctagactggtagagctcgattcctcccgattccagatcggtataggtttggtcgtagtcgatgacggcgagctcgtactcatccggttctttcgctttggcattctcgacgccttgcttgaccccatcggcgatttcccctactttgcctgcaatgttctcgatggcccgtcccgtctgattggcgacgctttgagcagcattcgatgcctgttcggcagcacttgcgatcccttttcctgcagcggccgcagccttctgtgcttctttaattgggtcgaagctcttatcgaaaaaacccatcgcccccgcctctcctcatttgcaatccaagggcattatgccaccagtcgacgatcgcggatcgcggccgaaagcccatgaccttgccggcggattccgaaacgctatcatgcatgttgctacgctgggagaatgcgcacttgatatagggtcgaaacacactatgatgtggccacgcagaacagaaacaaccatcaggcacggaagagacccggaaaggcgaagaggccatcgtcatgtccagtgaagtcagacaagggaagatgccgccaagacacatcgaggtgcggggcgcgaaggtccataacctgaagaacattgatatcgatatcccactgcacgagatcgtggtgatcgccggggtctccggctcggggaaatcctctctcgcgctcggcgtgctgtatgcggagggatcccgcagatacttggaatccctctccacctacactcgccggaggatgacgcaggcggaacgcgcggatgtggaggatgtccgatatgtgccggcggcgcttgcgcttcggcagcgcccgggggttcccggcatccgcagtacattcggaacgctttccgaactgctcaatggtctgcggctcatgttctcccggcttgcgagtcaccgctgtcccaatgggcactactgcccgccatctctttcggtcgcagccatgcaggaaatcacctgcccggcctgcggcgggcaattccacggtcccggagccgaggagctcgccttcaacagtaccggcgcctgcaggacctgcggcggcacgggaatcgtccagaccgtgaacgaggcgacgctggtgccggacgattccaagacgatcgacgagggcgcggtcgtcgtctgggggacgctcatgtggtcgctcatgaaggacatcgtacggacgatgggcgtgcgaaccgatgtgccgttccgcgacctctcgccgagggaaaaggagatcgtctaccacggcgagttgaaaaaacatcacgtccattacgtcaatccgcgcacgctggaaccgtcggaaatggatttcaactattacagcgcggtcaattccgtcaagaactcccttgccaaggtcaaggacgagaagggaatgaagaggctcgagaaatatctcaaggagggcgtttgcccggactgccatgggacaaggctctcggaggccgcccgcacgccgagactgcgggggaatcggtctggaccgggcaacggcaatgacgctttcggaactgatcccctgggtgcagggcgtgccggcatcgcttccaaaagagatgcgccccatggcgcagagcatccgcgaatcgttcatggacgtttccgagcggctgatggatctcggccttggatacctgtcgcttgatcgggcggcttcaacgctttccacaggtgaacgtcagcgggcgcagctcgcaagggcggttcgcaaccggacgaccggcgtgctgtatgttctcgatgagccgtcgatcggcttgcacccccataatctcaaggggctgaccggcgtgatggacgatctgcgggcggatgggaattccgtcatcatcgtcgatcatgacacacgggttttgaagcatgccgactggatgatcgagatggggcaaggagccggagcggacggcgggacggtgattgccgagggcaaggatcgcaaacatcgcgaagaatccacggtccgtcatcgggccgtatctttccgaccggtatgaagcaagaatccgtccggtcacgcaggtggatcgcatgttcgacaagggcgccatacatctggaaacggggatgatccacacggtgcatcctctggacgtgcggataccgatggggaggctgaccgtggtgacgggcgtctccggttccgggaaaaccacgatggtgctcgaaagcctgatcccgtcgctcagggcgaagatcggcgggcagaagcttgcgggacatgtgaggaacatcgaggcggagggcatcgcacaggtcaagctgatcgacgcgacgccgatcggcatcaacgtgcgctcgaccgtggcgacgtacgcgaatgtccacgacgagctcagaaaggcatacgcaaagacacaggacgcgaaggaccgttccctcaaagccggagatttctcatacaatacgggaagactccgctgcccggcctgtgacggaacaggggagatctcgctggacgtccagttcctgcccgatgtgaagattccctgcccggactgccggggttcccggtacggcgcggatgctttcgacatccgcaggaaagcgaaggacggcaatgcatacagtctgccggagctcatgaatatgagcgtggatcaggcgctgaacgccctcgacggactgaagctcccccggcaacgactgcaggtgctgcacgacctgggactcggctatctgaccctcggcgaggaaacgcccggactttccggcggcgaagcacagcggctgaagcttgccagcgagatgggaaaggaccagagcgactcggtgttcgttttcgatgaaccgaccatcggcttgcatccgcaggatgtgaggacgctgctgcttgttttccagacgctgatcaatcacggcgccaccgtggtggtcatcgaacacgaccttgatgtggtggacaacgccgattacatcatcgatatgggaccgggcggcggaaaggaaggcggcagggtcgtcgcctgcgggacgccggacgagatcagacacacagatgaaagcattaccggtcgctatatatagcgtcatatgtaggagcgtggtctctgcctgacggcatcacgcgggagcaggccggtacggccctgacccgcatcgcgagtggtgtgccgcggcggcccggctgcggcacgtcggcatggggcgcgccgccagggcgcggaatacggggaatatgccgcgtacgacaggaatgatatgattcaatcctggatttgcgttacgtttgccacacgcggcggaacgccgtcggagccgcagtcagagagggaagtcccgtgaaacgtttcgtgggtttggacggcatcaaaggattggcgctgctggccatcgtgctctatcactgcatgcagcagcgtctgccgggcggattctacggcgtggacgtgttcttcaccgtctcgggattcctgaccgccacaagcctcatacggtccctgaacacgaccggaacgctcaacctcgtgcgattcatccccaagcgtgcagtacgtctctatccggcgctgtttctgctgattccggtcaccgtctccgtcggctggctgctcgatcacgatatgctggtttccatccgcgaccaagtcatcaccgtgctgctgggctgctacaactggtacgccattgccggaggccaaagctatttcgaccaaatgaacccgcaggtgtttcgccatctgtggttcattggcgtgctcatgcagttctacgtcatcgtgccgttcatcgtctggctgatgtggaagctccgccagacgaaactgccctcactcatcccactgggactcgcggcgttcagcagtatcgccatgtgggtgatgtacgtgcccaagggcgaccccacccgcgtctacttcggcaccgatacccacagcatgggcctgatgctgggtgtggctctcgcctggtgggtcaccgctcctcagttgggccacgctcgtcagggagctgtgccgatgccccgctccattagatcgagcgcttcggccgccacgtaccgggctccgttacctcagattcctgtaaagcatcgcatctggaatgcgacggcaccggtattggcattcctcagcctgattgccttggtcaccatgacggttatcggcaaacaggatgcattcgccttccgcggcggcatcatattgtccagcctgttgtccgtgctgctgattgccggtaccatctccgacgattcctggatgcaaagcctcatggtgttcaagccattggccgccctcggcaagtattcgtacggcatttacctgtggcactggccgttgtggattctttccagcgcccttgccccgaagatcttcaaggcagcagggccttggcctctcatcatgaccgcgttgctcaccgccattgcggtgatgatttcctggctgatggtggagaaaccggcggcaatgcactcggtgatatccgtcgtggtgccccttcgcacgaacaagaagaatcatgcggcccgggttattgccgttgacgttatcctggcgctgtcgttggtcggctgcgcgcagggcattactcatgcacctgcgaaaaccgccatgcagatccagctggagcaacaggccgcacaactggaacgcatacagaaaaccgaacacgtgctgctgcgccatgccgtgccggcaccgcccaagcccaagcatgagatgcccaccggcgatcagattaccgccataggcgattcggtgatgctggcctcatcacagggcctttcggaagtcttccccggcattcagaccgacgcgagcgtttcccgctccatcatggtcgcccccgaactcatcggcaatgatctgtccgccggcagtctgcggcaatgggtgctgatcggccttggcaccaattcggcaatcacccctgatcagctggaccagattcgtaatatgatcggccccgaccgcgtgctggtactggtcaatgcccacggagaccgtacgtggattccacctaccaaccaggtgcttgccgactatgcggccgcacatccggacaatgtggtgctggtggattggaatgccacagccaacgcgaacgcgcaggtgctcggctccgacggcatccacccgagcatggatagcgatatctatgcaaaggcggtcaaacaggccatcgaacaatggatcgcaagcggcaggtgaacggcaggcaacgctgagttgtccaaccggtcgtgaagaacggctatgctgaagactgcatcaacgagaccacacgttgggagacatggtgagcgcaatccttgaagggaagcccgataagaatcttattctcgttacgggaaggattcatccgaaattggctgaggatgtcgccgagcagctcggcatcgacgtccttgaaaccaccgcatacgatttcgccaacggcgagatgtacgtgcgctacaccgaatcggtgcgtggcgccgatgtgttcgtgctgcaaagccactacaaacccatcaacaaggcgatcatggagcagctcatcatgatcgacgcattgaagcgcgcctcggcccgttccattactgcggtctgcccgttgctcggctactcccggcaggacaagaagcaccgcggccgcgagcccatctcctgccgtctggtgttcgacctgctgaagaccgccggtgccgaccgcatcatgtcggtcgatctgcatgccgcgcagtcccaaggcttcttcgacggcccggtcgatcatctggtggccatgccggtgctggtcgactacatccgtgatcgtttccaaggccatctcgacaacgtcgccgtcgtctcccccgacgccggccgcattcgcgtggccgagcagtgggcgcagcgtctcggcggcggtccgctcgctttcgtgcacaagactcgcgacatcacccgcccgaaccaggcggtcgccaaccgtgtggtcggcgacgtcgccggcaaggactgcgtgcttgtcgatgacctgatcgacaccgccggtaccatcgcgggcgcatgccacgtgctgcaggacgcgggagccaagtcggtgaccgtggtcgccacgcatggcgtgctctccggcccggccatcgagcggctcaagaactgcggtgcgcgcgaggtcgtgctgaccgacaccgtgccgattcccgaggaaaagcgctgggatggcttgaccgtcctgtcgatcgccccgctgctggccagcgccatccgcgccgtattcgaggacggctcggtcgccgaactgttcgacacctaccccgagcaccacggtcaaggcttcctgttcgcctgatcacgtgcgtgtttgttcaaggaaagcacatgatgcgagacgcgacatggcgtagtctttcggtaaataccgacagtatggtataaatgaacacttgtgggccgaaagcccacgactcccccatggtgtaatggcagcacacgggtctttggaaccctttgtcttggttcgagtccaggtgggggaacggctgacggccgctcgacatccgggcggccgtctattgttttgaggtgtttccaccctcaatagacattccgatcgaagggaatacgtcagttatggcattatccgcagccatcgtcctcgccgccggcgagggtacccgcatgcgttccaacaagccgaaggtgctgcatacttttgcaggcaagaccttcctgaacagggtcatggattcggtgaccgccctgaaccccgacacgctggccgtggtcgtgcacttccaggccgagcgcgtcgccgaagccgcccgctcctatgacgagcaggtcaccatcgtgaaccaggacgacattcccggtaccggtcgcgccgtgcagtgcgcaatggcacagctcaccgaggctggcaaggtcgatggcccggtgctgatcgccgcctccgacatgccgctgctcgacagcgagacgctgcaccgcctggtcgaattccacaccgcctccggcaacggcgccaccgtgctcaccaccatcctcgatgacccgaccggctacggccgcatcatccgcgatcgcgaaggcaacgtgctgcgcatcgtcgagcagaaggacgccaaccgcagcgaactcgccgtgcaggaagtgaacacctcggtctacgtgttcgaggcttccgtgcttaccgaggcaatcgccggactgaagtcgaacaacgcgcagggtgagttctatctgaccgacgcgctggaaaccgccaaggccgctggcaaggtcggcgcgttcgccgctccggatccgctcaccgtcgaaggcgtgaacgaccgcgtgcagctggccgcgctgtccaagacctacaaccgccgcgtctgcgagcgctggatgcgcgacggcgtgaccattcttgacccggaaaccacttggatcgaggacgatgtccagatcggccgcgacgccaccatcctgcccggttccttcctgcaaggccacacggtggtcggcgaggacgccatcgtcggcccgtacaccaccctcattgacgcaaccgtggacgaaggtgccgtggtcgagcgttcccgcgtgcaggaatcgcacatcggcgcacgcacgaacatcggcccgtggacctacctgcgcccgggcaacgagttcggcgaggatgccaaggccggcgcgttcgtcgaaatgaagaaggcgcacatcggcaacggcaccaaggtgccgcacctgagctacgtgggcgacgcccagctcggcgaccacaccaacatcggcggcggcaccatcaccgccaactatgacggtgtgcacaagaatcgcaccaccatcggctccggctgccatgtgggcgccggcaacctgttcgtggccccggtcgaggtcggcgacaacgtgaccaccggtgccggctccgtggtgcgccacgccgtgccgagcgacacgatggtctactccgagaacacgcagcacaacgtcgagggctggaagcccgcctgggagcgctgaaccatgcccgcacttcaggattccatcaacgccgtccacgtggccgccgaggccgcagaccgtatcaaggccaccgacatcgtggccttcgacgtagccgacctgctcggcatcaccgacatcatgatgatcgccggcgcctccaacgagcgtcaggtactggccgtggccgaggaaatcgaaaaggacctgttccttaagtgctccggccgtcagccgcgctctcgcgagggcctgaccgagggccagtgggtgctgcttgactacggtgatttcgtgattcatgtcatgcacgaggaatcgcgcgaattctacgggctcgaacgactctggcgcgactgcccggccatcgatcttgaactcgcacacccggaaacggcggagcatgcggacgctgctgccgtcaccaccgcgtaacgtgcgaatcacataacgctgatattcgctgatactcgctgatactcgtgtgtcgggctgcctgttgccgaacgtcattgacggcaccaggcagccctcccttttccctgtttcctcactggaatcgaaaggatcgtcactatggccaatcatgttcgttccattttccttatccgtcatggacgcacttcctataacgccgctcacaagctccaaggccaggtcgacattccgctggacgccgtgggtgaatggcaggtcaagcagaccgccgcggccttgaaaagcctgtacgtcgatcgtcggccggaaatcaaccaccggttcattgtctgctccgatttgaagcgtgcgcacgccaccgcgcaggctttcgccgacgtattgggtggaatcgagcccgtcgatgatcatcgcgtccgtgaacgcagcttcggcgactgggatggccatgccgtggctgaactggccgaacgctaccctgaggacttccgttcctggatggagtctcggggcggtgaactgaagtatggtgccgaacccaaggaagccgtaggcaaacgcggtgtggaggctcttgaggactggtccacgcgtgccggagacgacacggacctgttcgtgttctcgcacggcgcatggatcgcgcagacattgcagaccctgttgggcatttccgcgatcgatccgaccttctccacggtggtctcattgcgcaatgcgcactgggtgcgcttggtgccgatggacaatcccgatggcactgtgcgctggcgtctgctggactacaatcacggtccggccatcgccaacaccgacgaatgggaacgcgaacgctgatcatgttcccgactcccctgctaatccaataggtccggtgcattcggaaccgttcaagcaataactgaatggctcaatgcctgaataatggcggaaacaagccaaaaagtgtcgccaaatcacacttttgtcatttggcgacacgccggcttttgccagaatcgacatctcgtcgtaatgtatacgaggtccgaacaacgggccaacaattgaaaacggggctatagcgcagctggtagcgcatctccatggcatggagagggtcgggggttcgaatccccctagctccacgacgaagccatcaaatcgggtgatatggtggtttctccgctggttcgtggcgggtcttgtgactcccatgaatcggatagcttcactcggggctatagcgcagctggtagcgcatctccatggcatggagagggtcgggggttcgaatccccctagctccacaatcaaggccggtgcttcacacaccggcctttttcgttttctatcctatcgggcgacttttgtgcaacattcccgggaatgcgtcgcaaaacagggactggaatgcatgcagtgcgatactttccccggaaagtatcgccaaggggacgctcttccgattggcgcgacaccggcgtgagagataacagtaatcgccactacaatgaggtgtggtccctatcgtgttgatcatcaaaggagacaaaaacatcgtgaccgtcacccgtgtatatatcgccagccctgaaggcgccaatggccgcaacgtcgtcgcttacggcgtgctcaacgcattgacttccaagtacaagaccatggtgttccgccctgctgtgtccaaccatgacgaattcaccccgatcctgctcgccgcctccaatgcgggactcggcgtggccctgtccaccggcctcgacgtgcataaggtgcgcgccgacaaggacaccgcccgcggagacatcgtcggcgagttcaactacgccatggaggtctcccgcgcgaacgccgccctgatcgtcggcaccgacaaatcccacgtcaacgacccgaccacctacgagttcaacgcggacgtcgccgccgatctgaaggccggggtgttcctggccgtgtgcaccatggaccgatggccgcacgagctcgacgagaccgtcaagctgtccatcgagggcatgcgcgccgcgggcaatacggtgctcggcatcttcgtgaccggctgcgagccgcgccacgccttctccgtcaaggagaccctcgccaaatacggcctgccggtctggactttgccgcaggtgcccttcaccgacgaatccaccaaggatctggcccttgagaccttccgcaagcacgctcccatcgacgaggtgctcgccgcgctcgacgtggacgtcaccgcgccggtcacgccgtacgccttccaattcgacctgctcggcaaggccaagagcaacaagaagaccatcgtgctgcccgaaggcgaggaggaccgcatcatcaaggcggccgactacctgcttgagcgcgagatcgtgaacctcatcatcgtgggcgacaaggacgccatcctggcccgcggcagggaactggggctgaacagtctggggcgcgcccgcttccaggccatggacgacgagaacgtgttgaagcccatggtcgccaagctgtgcgagttgcgtgccaagaagggcatgaccgaggagcaggcccgcaagcaactgaccgacgccagctacttcggcaccatgctggtggtgctcggctacgccgatggcctggtctccggatccgtgaattccaccgccaacaccgtgcgccccgccctgcaggtcatcaagaccaagccgggccagaaactggtctcgggcgcgttcctcatgtgcttcaaggaccatgtggccgtgttcgccgactgcgccatcaacctcaacccggacgccgagcagctttccgaaatcgcgttgcagtccgccgagaccgcacgtgccttcggcatcgacccgaaggtcggtatgctctcctactccaccctcggctccggcaagggcccggacgtggacgtggtcgaggaagccaccaagctgctcaaggagaaggctccggatctgccggtggtcggttccatccagttcgacgccgcctggtcccccaccgtggccgccaccaaggccaagggcaacgatgtggccggacacgtcaacgtgttcgtcttcccggacctgtgcgccggcaacatcggctacaaagccgtgcagcgctcctccggcgccttggccatcggcccggtgctgcagggtctcaacaggccggtaaacgacctgtcccgtggtgcgatggtgcaggacatcatcaacaccatcgccctcaccgccatcgaagcgcagtgagcccggcttagctcccgccagcgggagccactgtaatgcttattttgtagcaagcaacgagtaatctaatcaacggtaacccgtgtctcacgggaacattcaatcacaatggaggatgcccacaatggcgaaaaccgtccttgtcatcaattccggctccagctcgatcaagtaccagctggttgatctcgaatccggcgaaggcctcgcttccggcctcgtcgagaagatcggtgagccggtcgacggccactacaagcacgagtacaacggcgaaaagcacgagcttgaagagccgattcacgaccacgagcagggtctgaagcgcgtgctcggcttcttcgaggagtacggcccgaacctgtctgaggctggcattgtcgccgtcggccaccgtgtggtgcagggcggctccatcttcccgaagccggccctcgtgaccaacaagaccatcaaccaggtcaaggatctggctgtgctcgccccgctgcacaacggcccggaggccaagggtgccgaagtcatgcgctccctgctgccggacgttccgcagatcttcgtcttcgattcctccttcttcttccagctgccgaaggccgccagcacctacgcgctgaacaaggaaatcgccgatcagtaccacatccgccgctacggcgcccacggcacctcccacgagtacatctcctccgtggtgccggacgtcatcggcaagccggctgaaggcctgaagcagatcgttctgcacatcggcaacggcgcttccgcttccgctgaggtctccggcaagccggttgagacctccatgggtctgaccccgcttgagggcctgatgatgggtggccgtaccggtgacatcgacccggctgtggtcttccacctgatccgcaacgcccacatgaacgtggacgagctcgatgccctgttcaacaagcgttccggcatgatgggcatgaccggctacggcgatctgcgtgaggttcaccgtctggtgtccgaaggcaacgaggacgccaagctggctctggatgtctacgtgcaccgcatcgtcagctacatcggcaactacacctaccagatgggtggctgcgacgtgatcaccttcaccgctggtgtgggcgagaacgacgatgtggtccgcaagatggtgtgcgacaagctcgctccgttcggtgtcaagctggacgaggagaagaacgccacccgctccaaggaaccgcgcatcatctccactccggactcctccgtgatcatcgccgtgatcccgacgaacgaagaactggccatcgcccgcaagtccgccgcaatcgccgaggctggcaccgatacctacggcaacaccttcgccaagtaagtaaccgccgttaggcatctcactaatctctagttgcaacactatgggggctgattccgattggaatcagcccccattcgtatatggtcaagagaccactacccctgcgtcatactcccctcagtcgcctccggcggacagatccactcagagaggggatccaggccctataacttggctcccttctctgaggggagctgtccgcgtagcggactgaggggagttccaccagaacacaggaccccttactgcctcagcatgccactccacataccgacgaaatcaggcaaggtcttgcgcgtggtggccacgttgatgacctcgatatcaggaatacgcagccccagcatcgcggcgaacgtggccatacggtgatcagcataggtttccatcacggcaccgtgcaacgtctccgccggcaccggttcgatacgcaatccatcaggcaattcctcagccgctcccccaacacgacgaatctcgttgaccaatgcctccagacgattcgtttcgtggccgcgcaagtgaccaataccaaccatgtctgtcgacttatcagcaaacaccagaatcgccgccaacgagggcgcaatctccccggccgccgtcaaatcgaacgtacccagcccacgcacggtgccgtcaccggtcacctcgcaatagcgcatgccgccgatggtcgggaacgatacttcggcacccatctgctccagatatccgggcaacaggccgcccggctgggtggtggtttcaggccaatgaggcacccggaccgtgccgccggcgatcaatgccgcgccgaggaatggcgccgcgttcgacagatcgggctcaacggtcaccttgctcggcagttgcattgcgcgcggttcaaccgtccatgtgcgggcggattcgtcggcctcaaccgcaccgccggcaccggtcacatcggccacggtcatgcgaatgtgcggcaggctcggggtcttctcccccgtgtgcgcgaggtgcagaccgccaggcagtttggaactaatcagcaacaggccggagatgaactgggaagaaccggacgaatcgatgctgacctgcgcctgggcagccggcaaggttgcaggcggcgtaatagtgaacggcagacggccaacctcgccgtggtaatcaaccgttgcccccagctgttccaaaccgtcaagcaccggcttcatcggacgtgcataagcctgttcgtcgccatcaaaattcactgggccatctgcaaacagggcaaggccgggcacgaaacgcatcaccgtgccggccagtccgcagaacacattgacgttgccatggaatcggccggatacaggaggagtaaccgttacggtggtgtcggttgcggaatccacgtcgcagcggacaccgagggcttcgagtgcgcccatcataaggtccgtgtcgcgcgaacgcagcaggccaatcagagtaacgggcttgctgccgagggcggcgagaatcaggtagcggttggatagggacttgctgcccggcaccgttaccgtagcgttcaacggctgtgcggcgagcggggcaggccagagattcgtgagtcgttcagtcataaggccaaatctatcaaacaaattattcaccggtcggcagcgatgcgggattcgatctgctgatcaggtgcggaagacggctgctcaaaaccgccttcgatggcctgcgcgtgcaacaactgagcggccgcgcgatcggcctcgatggcggcgatctggcgcgagaacacgatgaaccagccgaggaacgccagaccagccaacgcctccacattggtgagggtgttgtgacccatcatcatattgacccagaatgcagcgcatacgagcgcggtcaggtcggaggccaccatcactgctttggacaggcgtggcgcaagccacggcaggagcacgaacagcagcagcatgacgaacggcaggcctttggcgcatatattgtgcaagagattgtgtggcgtgtaccgaaacacgccgatgccgatgaatgccaggccggccaccatcagcaggaaggacagaatggagatgcgcagcatgaaatgtgggatttcgtagccgcgattcggatctctgttggtgcggtcgtgccagaggcgctgtagccgttcggtggtcaccagttcggagatggcgaagtagctgacgatgatgatgcatgtgccggcaagaatcagcgtggagttgaacatacgggccgcaaacgtggttctgtcgccgagctgcgaaaagttgttgtgataccagtatgggtcgtcggtggtcatgccggcggtgaccacgccggagatgacgaagaacggcaacagactggcaatagttttggcgttcatcatctccgcctgtacaaaggtcatgtaccccaccacgccggcgaaggcggcgcagacgctggagatatagccggagaagatggcattgcccatcatgtcgttggccgcaccgatgagtgcaaaagacgacaggaaaatggtcgaggcatacactaccgaaagggcgacgatttcgaaaatgcgacgaatcggcgcaaaccaaccatgtttgaggttcaatgaacgtgatttgcgcgcatagccaataatgaaggaaatgacgccgcatgccgccacgatgcccgaacataccatgaatcggcgttgcgtcagctgccagatggccggcgcgtattccatgtacaggttcatcgataccgcgccaatgatggcgcaaatcaagaaggagatgagtccggaggtttctgcacgctgatgacgtcccatgccgggcctcccctatctattcgatgccgcgttatctttcaacaacaaacaaaactccccccgaggacaacgctttactagcaagccagcgggatttggctgtcgccattctactgaaaatctgaaacactacaaaaaaaaacgattatgtacgggcttcttagcctttgcgactatcgttaccgccttgccgagtaccgttgttcatgcagaaagaaagcagtattggacacaatcgaatgagcgtgtcggtatcgttgaaaaagtaatgaatgacggttctatcggttcaacctttaagggacgaaccagccgcggcaccatggcgctgatgcatgactatgccgagctcatcaatgaattacgtccgacagcagagcaattcaccgagatcgagcaatactgggtcaaacgaattcaggcgttcttcaccagcaaaccattcaagctggagtccgacaactcgctttccgttgatgcggccgtggaacatctgctgcggcaggcagcgcagcggcgaagggagaatccgggcaccatgtacgtcggcaccgtcctgcagcatctcgtcgcggcaaagctcaccatcgttgctccggaagtggaaatcaacggcgcgtccgttgctgatgatccgagtccgcggcttccaacggtgaggccgcggaccgtctcacaaaaccgtccgcggctccgccctcctgtttcgtcgcaactgactacaccgacgggttcgggcgcttcgtcacgaaaacgccattgcgatgcaccgtatacgcgccgccgtcactgccccgttccgcccggaacaggacgatcggctcccctgcgatgtcgcgcagttcgacatccgatctgccacgtgtcagatagaagtcgaatatggcgtcgtcggattgacgcacggtgtgcagaacgtcagaggtcacgccgctggcgggcgaccgcaggttggcttccggctgccggccatcctgcggctgcacggcaagccagcctcccacgaatcgcgtcagatcgctcacgcccagatcgcagccgaggaaatacgcctccccttcgccgtacgtgttgcgggtgatcgcggccatgccgtcaagctcccactcatccgcttcttcgccggcatacgaggcaagcacctgcacatgcggtccggcgacggtcacgtcaccgagcttgtcgatgacgcgatcgagccagtcgaaatcccaatggtcttcgatgggctggaggcgatctcagctgaagatggcaagggccacggtgttgacgccggcctggcccatcaggcggatgtcgtcatcccagatttcctccggccattggtcgggactatagtcgccaccgaaagcgatgccgcgtccgtccgcggtcagcagttttggccatgcgaagtcacgtcatgcacgcacggttatctcctttggcaggcggcgcagggccacggcccatatcggataccagctgatactagctgatagacactcctggccgatagtcgacacgccgccggttccggccccactgccggaaccgacatgggtatgttcatgaccgccgaccgcaggaacgaacaggcccgtccgccacggaccgcatcttgcggttcaggcggacgggccttatgggagggatgggaac

SEQ ID NO: 44 - DNA, 3601 bp, Unknown
  R30_18m  MAG No. k141_17052
cgaatcacttatcaaggagggacaatggtaagcatcagcaattttgatgccagcgaatacatcgaaaacgaagaagacgccatcgcatacctcaacgccgccgcggaaaccggcgacccggcgcttctgcaggccgccatcggcgacatagccaaggcgcgtggcatgggccaaatcgccaaggaagccggagtcggccgcgaaagcctctacaaaagcctcaacaaagaaggcaacccaagtttccgcaccatcgtcaaggtcgtcgatgcacttggaggccgacttgtcatcgaacccgtgcccgccacggcatgaaaggattccatcatttttatgctgcctgtcaactctggcagtcatgctgactaccagagtctttgttactcatctatgtaaatattattctgatactgatgctcttgctcgtcccacatgggatcagcctttgcagcccacaccggaaaaacgattctgcaaacagcatgatcctgtaaatcattaatctcatcctgtccgccgcgaccatgctcgtcattgcaccgttgctcatcgcgttcttcattttccagcgtcagttcatcagcagctttatgatgtccggcattaaatgatagcgagtgcctacgcgccgatcaattcgagcatctgcgggatgctcttcttgccgaactcgacccgctgcgtgccatcggcccgtgtgatgacgatgcagggcacgctcatcgcgccatactggtccctaagctcagggaagtgcgcaacatcgtaggcctcggcgcgcacggccgggttcagcgaagcgatacgctgggaagcgagcacggtctccgggcacatcgtgcaggtgagcgagacgagaatcatgatgtccaacgggcttgcaatggactttgcccgttcgatcagatcatcgtccaacggctgaccgggaccggccacgttgtacaggcccagcacgaacgaattgaattcatggccggaaggcacaccatggaaggcgaggccggtcggctcgccgtccaccaccatgcgcacacatgggcgcgcggcgggcagcacgctgtcgacgtcgaacaccgcacggcccgtatcgtccttcttgtactcgccatcaaccaccgtcgatttcagcttgccgccggacaacgcgaccaacgcatcaatgaatccccgcagttccgtagacagcggcgtatcgtccagctccaaagcaagcgtgaccggccgagacatgcggccaaagaccacgttgagctgctgtctggtggcgtcggagaacaattcgccgggtttcctgacggcgttcgccgcggcagcggcatcggcgctgcgttgggcgggtgccggcgcgggcgtggtgccgaccaccgaggcggcttttgtcttcgctgtggactgctcatagacgtaggaggccggacgctgtggcgtcaagccggttttctcgctcatccgcttggcgtaccgttccaactccaccgcggcaatagcgccatcagcggtggcagtaaccacttgccgcaggtttttggcccgcaaatcaccagccgcgtacacgcccggcactgaggtttcgagatagccgtgcgtaaccacgtaaccataatcgtccagctccaccacgccgcgcaccaaatccgtggcaggcacatatcctgcgaacacgaacactccgaacgtaccaccgtcagcaggcttccacgtttcggtctggccggtggcccggttcaggatcgcagcttcacgtaaaccgccttgcccagcagtgacgccttgcagctcgacttggtaacgcacgtcgattttcggattgtttttggctgctgcggccaccgtggcgtcgcaagtgaagtcccgttcccgcacgagaacggtgactttggaggcgtatgtggtcaggaacacggattcctcggctgccgcgaaccctccaccgaccaccagtacttccttgccggcaaaaaactcgccatcgcaggtggcgcagtaggccacaccgcgaccagcgtattcggcctccccttcaaaccctagtttgcgtgggttggcaccggtggcgaggagaataccaaaagccttcaagtcaccacgcgaggtatgcacggttttgacgtcgccatgcacgtcaaggccgatggcttcggcggataggaattcagcgccgaagtcctgcgcctgttgacgcatggtctgggtaagtgcacggccagtggtgcggccgacacccggatagttgacaacctcattggtgatggtgatctgtccgccgaaatcgtctttctcgagaatcaacactcgatatcgggcgcgggccagatacaatcccgccgtcagaccagcgggaccgccgccgacaactatgacatcgtacaaatcatctcgagacataacgactccctttgtgccttgccctggctattcgaagggttgcccggaggttctccgggcaaccttgtcggattagattgataattcgtccatcaagcgaatatcacagttggccaacaagatcgaggctaggttcaatggtgtcctcgcccggagtccagttagctgggcagacctgatcgccatgctcgtggacgaactgagaggcttgcacacgacgtagtagttcttcggcattgcgtcctacgttggaggagatgacttcataggccacgaccttgccttcggggctcacgatgaagtcaccgcgttcggccataccatcaacttcgttgtaggtgtcgagatctttggccaatagagcggtcgggtcggcaagcatcggatattgaatcttggcgatcttttcattggcgtcatgccatgccttgtgcacgaaatgggtgtcgcaggagacggagtagacttcgcatccaatttccttgaacttggcgtagttgcgggccagatcctcaagctcagtagggcacacgaaggtgaaatcagctgggtagaagaagaacagggaccagtggccgagtacatcagccttggtcacctcatggaactcgttgttctggaacgcgttcaccttaaaatcggtcagttcatgctgcagaagagtcatcatcggtcctttcgctgattgtcaatcatcgggcttctgccgttttctatcgtaacgtgattctctggaacccgcgcggacgtaacgcgtgaacctcatcacatcattactaacagtcacgctgacggaccatgcgatgcgagggtgttgtggaataaaagcctcccgcgcgccgcgggaaacaagaaccaaaagacgaacaagaaaagggttcccggaatgtcacgcccggaaagcccccggggaaccgggaggcaaaacaagaaaaggcggttcccggagccttacgcccgacgggaaccccgtgcgaataaacaagaagaggatcctccggaacccccgccagggacaccggccggaagaccccccgacccggccgaccggaacaacggccggccgggaatacaagaggatccccgggagccgagctccaccggggatccccatatcattacgttgaatgcggcggcgtgctactctcccacaccctctcgagtgcagtaccatcgccgcgaccaggccttagcttccgggttcggaaag

SEQ ID NO: 45 - DNA, 27807 bp, Unknown
  R30_18m  MAG No. k141_17431
cagcacggccgtctccggactcggtccatcgtcacgcggttcgggcgcatcgtccaacgcggtcacattcgggcgtacgcgccgcacgcgcatgtagatctgccgtttcgcgatgcccagcagccaggacagcaccttcgcatcaccacggaacgccctcgccgaccgccagcagcccagccagacgtcggcgcacacctcctcggccgtgccggcatccggcacgcgcacgcgcacgagcgcccgcaccgccgcagcgtgacgcccatacagggtctcgaaggcgcgttcgtccccggaggcgacccgcgcgagcagatcctcgtcgcgcatcaccgccccaccgggcgaggtcatgtcatcctgcgtatgcggctccttccacggcacatcgtaaacaaacgttcattgatgtatgtagctagaaacgaaccgacggttcacgacacgagcaacgacacgcccggaaggcatatcggattaagttgtgtagaagaacagaaactcacagaagaaatcgttgcgcgcgtgcattaccgagtcccaagcctggctagttcttggcaggaatgctgacatccagctgccagtgggcttgttcggtgtgggtttggaaggtgccgccgtgtgtttcgatgatggtccggtagcggtcgaggccgctgcccaggccgagtcccatgtcggcgggtgtggtggtgtcgctggcggagacgtggatggcgtccgtgtcgaaggtgacgcagatggcgtaccattcgccccggtcggcgtgttcggcgatgttcgcgtacagttccgccggcaagcccgacagcagtcgcatggtctccggcgtgagcggccggtgtggttcggcgagcaggttgtcgccggtgaatcccggggcttcgagcctggactcctcctcgtcgatcagcgattgcagaccggcacgctgcgaggcgatgccggcttctgcgggcacgggccgactgccgcactcaaatcgccatcggccggttcaaagcaggatgtaaacccgctatttgcccaacagttcgtcatggctgccggttcgcatgaacatggcggtaccatcatcgcgaatccatagaagcagccagtcgccggcattgccgatgtggcattccaatacgccgtttaaatcaccggtaagtgtgtgggcgcgatgcctacgcctcaatacttccttggagtccgccgtgtcctcaagaaccagacgaatgacttctttcagcgggcgtaaatcagtgtgcttgcgtttgagtttcttgatatctcgctggaatgccgctgtgtaatccggtttgagcattgatcagattcccaacgaatcgaacatctcatcggcactgttgaaacgaggtttgccgtcggcgagcctgttcttcgcctcgtcaagggcctccatggtttcaggcggcacggtcgtataggaaaggtttaggggaatgcgcctctcccggacaatctgcttgtagaaggcgcgggtgaccgaagacaagtccagaccgagatcctcggcaatgtttgcggctttctgcttggtgtccgcatccacgcggactgtgacggatgccatgctcacattaacctccaacatcattacgtaagacaatagtatgtatttgtatgctaatagtcaacattctgcggttgcggcatctcgaccatggtacacatcccgcaagcggattgtttaccggatgcaatcgatgatcggaatgccgaccatccagctgtcggcgggcttgtccagaatggcttctggttcatcgcaacgccagtgcgggttgcagccgtatggctttgatggccggggcaagagagccgacaagcgaggtgacgatggacgcacaggccgcaatcatcgccgccgtatatgggtatgcgggcggttccagcggcgagtcggcgggcatcatccacggaattgcccagaccagcaccgcggagatgagcaccgcggcgaaggcgatgatgaggccgagcagcacggacgagccgatgacctgtatggctatgctggctctggtcgcgcccagtgcgcggcggatgagcagctcgtgcgagcgttgctcgatgccggccaatccgatgttgatcatgccgatggcggataccgacaacagcaatatcgcggtgacggtgacgccgagttggagaaaaccgataacctgctcgtaatcatcggcattgtcggaacggttccatgacgatatgctgccggtcccgacgtcggacaacagatcgtccaacgcggttttggcgtgttgatcgtccacgccttcattgggatggacgaggatggtcagcccatccggttcccaggcttgcggccagtagcgttgcagtgtggtcgcgttgacgtagatggtgggtgtgtccgtcccgtcggcgatgacaccgttcacccgtgccggtacctgttgcggatttcctgtccgggcgagtgccacggtgccgtcatgcacgtattggcgggcgctttcgttgactgcggtttccagcgtggcgggttcgtccgctccggtcagccatgtgccctcgatgatgggggcgggcatgattcttgtccgttcggcgtcggtgatgatgatggtgacgcggcgtatctccgtgttgccgtcaccggacgacgcccatatggcgaggtcgttgaggtgatattgcgccgatgcgattcccggacggaaatacgcgaggcgttcctgcaaagccgtgacgacttgcatgttcgccgatgatggcacgtcgacgatggcgctataggtgggtgacttgcctcccagtcgcgcgttgaccgcttccagatagtcgcgtccgagcgtgccgacgagaacgccggcgatgagggcgatgatgccgatgaacatcgacagggcggtgaggctggtacgcaacgggttgatgcgcagatccttggcgatcatgcggatcacgacagtcgccccctgtcgatcgtcagtcggcgttcgcatcgggcggcgagctgcgggtcgtgcgtgacgaggatgagtgtgaccccgagttcacgaacatgtcggaacagtatgtcggcgaccatgtcgccggtttcggtgtcgagcgcgccggttggctcgtcgcagatcagcaggtcgggatctcccaccagcgctcgggcgatggccacgcgctgctgttcgcctcccgacaggcgcgacggcatgctgcacaccgtccggctcccgagcccgacggtgtgcagcatgcgcgaggctcgtcttctgatgacccgcagggggatgcctccccggtattgcaatgggagtgccacgttctcccatgcgctcagatgcggtatgagggagtagttctggaacacgaagccgacatgccggcagcggaagcgcgcccggtcggcgtcgttccacgcggcgcagtcccgcccgtcataggagagcgttccgtcatagtcgttgttgagcagcccgacgatggaggcgagactggttttgccggatcctgatttcccgatgatggcggtggacgttcccctctcgaacgatgcgctgacatcgtccaccgtcgtcagacgttcgccgtcgggcagccggacttcggcgctcagatgttccaactggatgagtgtgctcatgattgcgctcccggtgtgagattcggagctgtcgcggacaccatgtcaccttcctcgagaccgtcgaggatgatgatcgacgtgccgtccgatgcccccaacttcacgttcacggtggcgaacgaatctccgtcacgcctgctgacctggccggaggcgagcctgccggcgactgcggtgacaggcaggatcaaggcgtcctcgaccgccgtcgcggtcagtaccacggtggcgttctgcccgggacgcgcctgcacgtcttttgggaacaggcattgcagtgtgcgagtcgattccgtcccatgcgcagtcgtcgccgatccggccgtatcttccgctgatgagggcggagtggcgacgccgtcattcactaccgcggcacagtccgtgggcccctgcgcgtcggtgatctggaatcggcccgtcaacggctggtccgggtctatggtcgccagcagcgcggtcgcgtccacgctggcgctcatgccgccataccgtatcgagaacagcggatagtccgcggccatgtcgttgtcctgcgcgaccgtttcgatcacgccgtcgaccggagccgtgacctgctaatcgccgacggtacccaacacgtcgcccgcatgcacgtatgctccttgatcagtcgtggagtggaaccagcctttcgccggagtcgtaagcgagaacacaggagccacctgcacgccggtggaggaagaggataacggcgtgatgccgcccctacgcacctcgaccgtggatgctggccgcttcgccgtggaggaggcgtcggacgatggcgtccgcgacggcgagcaagccgtcatcatcgcgcacatcgtcgtggccgtcacgcacgccaacaggcatttgaacggtgcgatcgcattcatttcgtcggtccgttctcatgccggtaccatgtgcagtccgtggtgtagaagtcccgcatggtcgaatagtcgccgagttcggatttgccgatcacatcgttctcgtatatgccatccttgtcctcgtagtagttcttgaaccagtcggtatccagcagcttgcgcagctgctggagggcgcctcgggctgcttccgcgttggtctggctgttgtcgagaatgtcgcgttccaccgagcactgccagtagacatacgcctgtccttccccacttcccttggcatacagcgaggacgcggcctgcgccttgggtatattcgctggaaacgcatcgccgttcatcagttcaaaggggaaatcctcgacggtcgccttgtattcctcgttcgcctgctgccaggtcagcatgccgccacttcccgaggtgccgccgttcggagtcgtcccgcaaccggacagcagcagcatcactgcggtcagaatggcggccctgcgtcgtgttcccgatttcatcatcatgctccttcggacgattgcacaactgtcgccaaccattagcccacagacggcgatccgggagcaaaagactgtcatgcgcgcgcatgacaacgatacgtcgaggagcatgggatgcgcatacgatgggtggcatgacagacctatcggactcgcataccatctccatcggggtgctggacaacgattcgctcgccctcaacgccatagccgtgatgacgagccgtctctccccgcggttccacatcatctggagcaccacgtccccggcgatggcattgcagcgctgcatgacccacggcgcgcgacccgacgtgctggtcgtcgacatggccttgggaggcatcaccggcgcggacatatgcgccagaatccgtcggcgcactccgacgatcggcttggtgtgcgtcacctcctatgaccttgatccatatcggcaagacgcggtcgaggcgggcgcgcaatgcctgatagccaaagatgacatcgtcaaagagctcccgcaggccatacgatgcgcggcacagggcgagcccgtccccggcaccggattccccaccgcacgggaagccaatcgcaaactcaacgaaggacacgcgaccgagggccggctgccggaaaacgacaagccatcgctgtcctccagggaacgggacgtactgcgcctctacgcgcatggatcatccaccgacgagatagccgcgctcctgaatgtcagcaagggcagcgtcttcacctacgtcaacagggcatgccgcaagctccatgccgccgaccgcaaggaggccctcgccatatgcgcccgatacgatctgctttgaaccgtatacaccacccagccatactggccgcggggctggtcctcgcagtggcgatccccgtagagatgggcgtgtactcatcccagaacctgctgtcatggtcgaccatacgcatatcgctgctcgtcgccgtcctgtgcgccatgctcggagcggcaccggtatgggccgcctgtctgctgttcgcggtctcaggatacgcgttgctgtggctgttctcgccgttgacgaccatcatgatcgccgcactgacctccataacggtcctctcgttcgtcaaaccccgccttggagccgcttccgcactggcggccctcgccgccctcgccgcgaacaacatgcagaacaacctcacctcgtcgaacatcgtaggcatgatcatcatgtgcctatgcccattgtcgctggggttcagtctcaacctgctgttcgcccaacggcaggcgaccgcgacactcaggcaacgactcgaccgcgaacacacggcgcgtcacctgcacgacaccatcagcaacgacctcgcctacatgatcctgcgcatcgaccaggcaagccgcagtgattgccccgccgatcgggagcaatatcagcgccaactcaccgatctgcgcgccatcgccgaaacggcgctcgaccacacccaccaggtgatacgacaacttgaacgcaccgacaaaccagacgatcgcagccgcatcgtcaaaacaaataacgacgacaaaaccgacaggaaaatcgaacagcagcgtgaacggcttgacggcatcattcaatcgcaacgacgtcgccttggcggcctcggattccaaggtgacgacatcctcgggacgttcgaccatccactggcggacgacatcctcgaccttctcgaaggactgctcaacgaactgtacgcgaacatcgccaagcacgccgccccgcacgaatggtacgccgtcacgatctccttcgaccggcggcacgtcatcatttcggcaagcgacgtactaaaggacgaagcggtacggctcggactcggcagcggcctcaagagataccgaaccgttatcgaatccatgtccgggacgttcgacatcaccgatgattccgacaactggaacgcgaacatcaccattccattgtctgtaacacgccggtaaagggaatgacggcctccagctgccagtgggcttgttcggtgtccggctggcttgcgctggtgtgtgttcttcgagcgagtcgatgacctcgtgcgtgtggcccatggcccggctggcggcgtcgcgcaattcgtcgagctgttgctggtattcgtgttcgtcggcgggcatgccgtcggtcccggcgtgaccatcgggacatccagcatgaggattacgcccgtgacaagcgccggccacaggaaccggtccgggcggaacatgccgccgaccaagccggcaagcacagccagagccaacatgatatcgcgcacggtcgcggtgccggggacccgtgccgccatcgagaacacgtactccgcgagcaccgccacggacaatacggcgcaggacgccgcgatcaccggatgcccggcatgccgcaggccaagccggtcggaaagccggggcagagcagatcgtatctggcgcatgcgtccagcacctccttgcggctggcgactcccagcttgtcggccacgcggtgcacgtacgtgaacacgctgcccgtcccgccgctcctgcgacggatgcgccggcacacgtcagcgcccgtgatttttttcccaacgccatatccaacaccagcgcatccggcctggtatgcgggttatgacaatgctcgatcgccaccgcgggcgaacccgtgcccccgcattacataaaagtccttggaaacggccgagatcatcgcgcacatcgcatccagggcgaacggatcattgtccaatacgggcgatacggatcgaccgcgccgcagccccgatcatgtcatcatgtcccatgccgctcatcgtggccacggtcgcagccggacgaaacctgctatcatgcgattacttgacacgatgttgcgcttttggccatgcgcaggttgaatgggattgcgccacgaaaggatatgccatgaacgatctgctgattatcgacatgctgcccacgtacgggctgctgttctacctgctggtctcggtatccgtcttcgtaggatgccgtggcctgcgccggaggacctcggatcgtggcctgctgcgttttgccgtaggcgcgttcttggttgtttccgcgctcggcgccgtgttcgctgcgctggtgtatatcatggcagcgcctttggcgcagccggatatggtcgacttctaccgcacgtaccggccaggagctctgatcttcctgctgggattgttcatcatacaatttgtcttcggcgtcgctgccgtgtatgggggaaagtaacctggtatatcctgcgataaacgcattggcagacacttgctgcctatctgtaaacacactctagataaggcttgcggccgttggccgagcacagtagtagtgtggtctgctgtgtcaacaggaggagtgtgaccaatgcggctgattgagacatggctggcggaccaggaacgcgcgtttgacttgttcgcgaaattcccggcggaggagacgggattcgaaaacccagcggccggcatgaatcgtgaacggttcgccgcatatgtgcgagggttgcgtgacgagtcgatgggcatcggcctgcctgacggctgggtgccggccaccaagtacattctcgtcaacgatgagggcgactatgtgggcatcttcaacctgcgtcaccggctcaccgacttcctgcgcaacggtccgggccacatcggctacggtgtcgcccgcgaataccgcggtcacggctacgcgaccgccgggctcaagctcacgcttgccaaggcccgcgagctcggcatcaaggaggcttacctgagtgtccacaaaaccaatccggcaagtcttgcggtgcagcagcattgcggcgcacgtatcgaccatgaggacaagacggaatactacacacgcatcgccacctgcacggagagcgatggcctctatgcgcgaggcgattgacggcgcctctcgcgtataaatggccgattatcaatcggttttaatcaatctcgcctcggtcgataaagtcgccgtcgaggaaccaataatcgtgcggatttccgcgtaacgccatgaacggcgtgagttccacgccctgtgtctcagctctgctcagcagataggctcggataatccacggatactccagcacgcccgacttgagggtgatgatttgctccacgctgctgccgctgacgccaaaatccctgccgccgttcggcggtcagacccagccggctcatgttctcctgaaattcgcggatagtcgccgcgcgttgctcactgttcaaagacatggcttcatgaatgttgcattggcgccttaatcatccatagttaaggcaccacgcaacatacgattcgcttacccacgcagccatacgacgatggttggaatggactgttcggcgaagcggtctatggcgtcggcggtgacgtaggcgtgggcggtgaggcgcaggtacagttcgccgccgaccgcgctggccgcctcggatacccgacgctccgcgtaatcggcaagatcggacatgtaccggcgcacggcatcacagccccacagtcgctcgatctcgcgcagggactcgggcgcggcgatcggaccgcataaatcctgggtgccttgctcatcgaatcgctccgggaacgggtcagcgaaaccccacgagtcgatcagtggccacaaatcctgaccatcctgaccgccttcgggcggaatcaccagcaatgccgtgccacgcggcgcacacgggaacttatgaaaattgccgacccaccaatcggactgcagtccgccggccggatcggccagttgggcgggagcgtgcgcgccatcaaccaaaatgcggatgccgcggcgatgggcttcggcggcgatgcgctgggccgtaaacagcatagcggtggcggaagtaatctggtccaacacgatgaacgacgtacgctcgctcatctgcgcggtcacggcgccgaccacgccatcctcgtcggcgtcaatggtaactggtgcatcttcctcatccatgcgaatgagacgaatcgcctttcaccccaatgatttcgctctcatggctgatacccgcgtgccgtcatgttccgtaccttggaatcagaagtcgagagtcaaggtccgaaaccgaatggagcggaccgaagcagggagcattgaagatgggatttctcaagaacttttccgaaccgtttgcattcgcgatggcattgtggccgtttgtgtccatgctgctgaccgtgccggtgctggcgttgctgtatcaccgcgacaatcgcatccgactgtcgtcggccatagtggcgtatggcacggtgctgtacctgctcggcctgctgtgcttcacactgtatccgatgccggccgatgcggcagcctattgcgccgcgcaccatctgacgccacagctcaatccattgcagttcatcggtgacatccgtaccgatggtctcaccgccgtactgcaaatcgcgtttaatatcgtgttcttcctgccgttgggcttcatcatgggccgtatctggcgttggccgctgccggttaccgcagtactgtcattcgccacgtcgctgtttctggagacgatgcagctgaccggcctcatgggcgtgttcccgtgcgcctaccgtctgttcgacgtggacgatctcctgtggaacacgaccggcgcgctgatcggattcgcgctggccatgctttcgctgcgcctgattccggcgcgggtcgccgatatgacgccgaccaccacacctggcttcatgaggcggctgatcacgttcatcatcgacatgacgctgatcgggttcgccgtgatgccgacgcatctgttcgtcatgatcgtccgctcaaacctgccctcgggctccaacggctcatggcagtcgatggaaccgttcgactggaccggctcgatcctcttcctggcggcgctcatcctcttcgagggcgtggtgccatggttgcgcggcggctgcacgttcggcggcagcttcacgcacatgacgatagagacccggccgcgcgaagggtggcttcgcgtggcgttctatgtggcgcgcatggcgacgctgatcgccgtggtgtggtggcatagtggcggattcaatctgctggtgttcatcggcctcggcatcttctggctggtcaagcgtcagatgccgtacgacctgatataaaccggcgctccgctgcttggcgttacaggaaaacctccgaccactggtcgggattcggaatgctgcgcagcgggccggccaacgatacggccaatcccgctacggaacagaccacggctacggccatcaccgccgtgaaaccgagatctggctgttgcaacagccagccgaccatcgccgggcatgctgcgcccagtatgccgaccgtggtttcaaatacggcagaagcccgcccctgcatgttgtcgggtgtcttgccgtagagaaagcccagcagaccagcgttcaacgcggggaacggcaggccggccagaatctggcagatcagaatggccgcgtagctgtgcaggaatagcagtggcatctggctgaccacgaacaacgccagcgcgcccgcaatcagtttccctgtgggaaccatatcgactagcttgttggccaacagcgagccgaccaaagtactcacgcccattgccgtgccgagcagtccgatcatgaccgcgttggcgccacgggcggccaacatgatctgcgcgccggtgatactggctacgcaggcgatgttcaccattgcaccgagtatgatcgcggataggaagacgcgcttggtcagggctcaaacggtgaccacggcttagcgcgacgagtcaacgcgcattagctgtctgcgaacgacaccaacaccttgtacataacaatgcccctttgcaaaaaccaaactccaattgttgtaccagttcgagcacgggaccaggcgcgtcactgggcacaacataatcggccatcaatggtttctcggcttcgaggggctgatttcgtccggtggggacatctacttggctttcgaggggctgctcaaacgccaaaccgcgagtataaacggctttgcggcaacgccattacgccattgtggagccttgtctactcgggcatcagccccttgaaacggagatagatctccggcaagtgccaaatcagcccctcgaaatcgagttaggcgttgttttcgcgtttgcgctgccgttcgagtgcgtaataagccgcgtagcagcaggcgacgaacgggatcatgcaatacagggtcgaacgctgcgtatcatcgagcaccacgagcaccagcgcgccgatgcacatcacgatggccagccacggcagcaccgggaaaccgggcgcacgatagccgagctcatcggcgctgtgcccatcccgcgcccattcgcgccggaaacggatatggcacacgcatacggagaaccacaccaccagcgtcgccaaacctgacacggcgaccaacaccagatacacggtcgaggcggcgatcacggaagacagcaacgccagcagtgagcccgccatgctgaacagcacggcccacaccggcacaccacggaaattcgtcctagcaaaacgttcgggaatcagccgctccttggccagcgaccacaccatgcgcgaacacacgtacaggccggagttcgcggcggaaagcacggccgtcaacaccacgaagttcatgatgtcgccggcgaacagcataccgattgactggaacaccagcacgaacgggctcgtatccacgccggcctgatgccaggggatcaaggccgccatcaccagaatcgagccgatgaagaaaatcgccaggcgcagcaccgtggtgtgcacggccttgggaatcgcacgcgagggatccttggtttcgccggccgccacgcccaccacttcggtgccggagaacgcgaacaccacggtcagcagagtcgagaaaatcggcgcgataccgcttgggaaccagccgtcggccacgaagttgcccagcaacggcgcggaatcatgaccggcaatcggtatggcgccgaagatcgccagcaggccgatcacaatgaacgcgatgatggcgaacaccttgattgacgcgaaccagaattccgcctcgccgtacagccgcacggacatgatgttgagcgcgaacaccaccacaatgaacacggccgaccacacccaggacggcgaatgcgggaaccatcgctgcatcaacagccctgcggccgtgaattcggaggcgagcgccaccgcccagttcagccaatacaggatggcgatggtgaacgcggtgccggggccgatgaaccgtttcgcgtacatatggaagcttccggcgtacggcatggccacggacagttcgccgagcgagaccatcacgcaatagacgagcagggagccgaccgcataggcgagaatcgcgcccagcggaccggcctggtgaatcgtatagccagagctgacgaacagaccggtgccgatcacgccgcccagggagatcatcgtcaggtgacgcgactccatcttccgttcaaggccggtatcgtccttgggtgtgccggctgccgccatgctcgggtctcctttggtcgggtgaacagttgtgtctcgtgtcggttgtgcgggcggcgctcgatgccgcctaccatatgatagcggtaacacgaacagcgagtggaacacgaggagtttggaatgatggaactgtatatcggatcgcatctgtcgacggccggcggatggaatgcgctgctggaacgttcccatgaggagggcggtaccgcgttcgcgttcttcccgcgttccccgtacggcaagcgttcgaaggcgctcgacccggccggcgcggcggcgttcggtgcgcgtctgaaggctgagggctatgggccgttggtcgtccatgcgccgtacgtctacaatctagccggcaaggatgaggccaagcgcacattcgcgatcgaggcgttggccgaggacatcgagctgctgaccgccatccgcgaggccggacaggaggtgtatatcaatattcatcccggcgcgcatgtgggccaaggctccgagaccggctgccggctgatcagcgagggactgaatcaggtgttcgagcgcgcggccggcgtcatggtgcttctggagaccatggccggcaaaggcacggaatgtggccgcaatttcgatgagctcgccacgatcatggatggcgtggagaataaggcgaacgtcggcgtcacgttcgacacctgccatgtgttggatgccggctacgatttggtgcacgactacgacggcgtgatgcgccagttggatgaggcgatcggcttggccaaggtcaaggcgattcatgtgaacggttcgcagttcggcctcggctcgcacaaggaccgtcacgccaatatcggcgagggccagctcggcatcccgttcttcacgcgactggtcaacgacccaaccatggccaagctcccgatgattctcgaaaccaaggagcagacgcccgccacgcatcgcgacgagatcgagttgttgcgcggattggtgcaaaagtagtcgtagtcgaccaatgtcgagcagaagagacctgtttttgactgatggccatacgaggttagttatcagcggggtgttgattgatccgtcttcatatacagctgcatagccggttccagctgcaagagctcaaaacagacgcatgggttcggtggaatccaatggctgaataagacgtttgccgtcgctgttcagtggcgcgacttcgtgaaattgcagatgccgggaaagcatggtacccgcttcccgcatggaatctaacagtgcggctccgtcaacggagcggtccagccatgaggcaaccatattccgaggaaccagcaggggcatgcgatcatgcaccttgacgaactcgtccgcggcagggcaggtgatgatggttgcggtcagctgccatggcgatgcgggagacggcctccaccatgagtacaggccggccaaagacaatagttcatcatgtggtgcgtgaaaatagaacggcctgcgacctttccattcgtagtagccggaagcggggatgatggctcgcatggattttgtggattcggcgaacgccggcttgacatgcgcagactccacacgcgcattatatgtggggtagctcagcactttgctggcgctccatcgcggcaccagcgaccaataggcaccggtcagatgacggcggccatccttgccctgtgccaccacgccaatgttctgcatgggtgcgatgttgtaggaaggctgtggcagagtgtcaacgcgcacgtcatcctcgtctaccgcgaactgtgaggccacggcatcccaatccaaatcaagcgcgaatctcctgcacatgcgcccagtctatgccatcaatggaatcaatcccaggccgtatgaccaatattcatggcgattttcctttttgttggccgctctggttccgtagcgatacgaaccaacgaggaatagcccagaatgtaggacgggttcggcaatcgggacggggcgtgacctagagtggcgcatgaccgaacaccaacaaagggaggaccatgtcggttttggacgaactggtggcgggagcgctggaggatcagcgcgcccgtgagctcaccgtatcgcttgaggacgtgaagaaggccgcgctggcggccccggctccgattgacgcgacacgatggcttaagcgcgccgacggcatccccgtgatcgccgaaatcaagcgcgcgtctccgtccaagggccacctctccgacatcccggacccggccgcgctggcccgcgagtacgagaagggcggcgcaagcgccatctccgtgctcaccgaaggccgcagattcctcggcagccttgacgatttcgacaaggtccgcgccgccgtgcacattccggtgctgcgcaaggacttcatcgtcaccgactaccagatcttcgaggcccgcgcccacggcgccgacctggtgctgctcatcgtcgccgcattggacgacgcccagctcaagcacctgctcgacctggcgcacgagttgaacatgaccgtgctgatggaaacgcatacccgcgaggagatcgaacgcgcacgccaggccggagccaaggtgatcggcatcaacgcgcgcaacctgaagaacctcaaggtggacgtgaacaaatacaacgaactcgcggccgatctgcccgataacgtcatcaaggtggcggaatccggcgtattcggcgcggtcgaggtcgaagactacgcccgcgcgggagcggatgcggtactggtcggtgaaggcgtggccaccgccgatgatcatgaacttgcagtggaacgactagtaaaggcaggagcacaagtgaaagcatccgaaacgaccccgctcagcgaacatcagggaccgtattggggccagttcggtggccgctatgtgcccgaggccctcatcaccgccctcgacgagctggagcgcgtgtacacgcaagccaaggccgaccccgaattccacaaggagttcatgacgctccagcagcgttacgtgggccgtccgagtccgctgaccgaagccccgcgcttcgccgcactggtcaagcagaagaccggtctcgacgcccgtatcttcctcaagcgcgaggacttgaaccacaccggcgcgcacaagatcaacaacgcgctcggccaggccctgctcgtcaagcggatgggcaagacccgcgtgatcgccgagaccggcgccggtcagcacggcgtggccaccgccaccgtgtgcgccatgctcggcctcaagtgccgcatctacatgggccagatcgacgcccgccgtcaggccctgaacgtggcccgcatgcgtatgctcggtgccgaagtggtcgaggtgaccctcggcgacaagatcctgaaggacgccatcaacgaagccctgcgcgactgggtcaccaacgtcaaggacacgcactacctgctcggcaccgtcgcgggcccgcacccgttcccggccatggtgcgcgacttccagaagatcatcggcgaggaagccaagcagcagctccaggactggtacggcatcgaccatccggacgcgatctgcgcctgcgtgggcggcggatccaacgccatcggcgtgatgaacgccttcctggacgacgagcgcgtgaacctctacggctacgaagccggcggcaacggccccgaatccggcaagcacgccatccgcttcgcccccggcaccggccagctcggcatgttccagggcgccaagagctacctgctggaaaccgacgaaggccagacgctcgacacctactcgatctccgcaggcctcgactacgcttccgtgggccccgagcacgcatggctcaaggacatcggccgcgtgaactacagctgggccaccgacgaggaggccatgaacgccttccgcgacctgagccagaccgagggcatcatccccgccatcgaaagctcgcacgccgtggccggcgcgtacaaggccgccgccgatctgaaagccaagggctatgacaaggccgtgatgatcgtgaacatctccggccgaggcgacaaggacatggccaccgccggcaagtggttcggctacctgaccgacgatcaggccgccgcgcttgatgtgaccggcgcccacggcaatactgtcgcctgaacaagaagaggagattgttgattatgaccaacgaagcaaccacgccgtccggccagccgctgggcatcagccacaagcccagcaagtcaggcgctatgttcaccaagttcaaggccgagaacaagcccgccttcatcggctacctgccctacggcttccccaacccggacgtctcgcttgacgccttcaagacaatggtcgagcacggcgtcgacgccgtggaaatcggcctgccgtactccgacccagtcatggacggcccggtcatccaggctgccgcctccatagccctgaacaacggcgagaccatcaagcgcgtgttcgaggccgtcgagaccgtggccaacgccggcggcgtgccgctcatcatgagctactggaacctcgtgtaccactacggcgtcgagcgtttcgcccgtgacttcgagaacgccggcggcgccggcctcatcaccccggacctcatcccggacgaggcgggggagtggatcgaagcctccgaccgtcacggactcgaccgcatcttcctggtctccccggactcgtccaccgagcgcctcgaaaccgtggcccgcaacgcgcgtggcttcgtgtatgcggccgcccgcatgggcgtcaccggcgaacgcgccaccatcgacgcctcgcccgaactcctcgtggagcgcacccgtcaggccggtgccgagaacgtgtgcgtgggcatcggcgtgtccaccgccgaacagggcgccaaggtcggctcctacgcggacggcgtcatcgtcggctccgcgctcgtgcacaccctgctcgcggacgacaacaagaccgcacgcgacccgaaggaaggcttgaagctgctcgccgccaagagcgaggaactggccgaaggcatccacaacgcccggtgaacacccggtgcgcctcacgcgggttgtgccgtgacacggtagggtagtcacagagcatcaagcacaacccgcgcgtggacacaccatgagcaccagcaagtagaggcacgatgaatctggcttatattccctcgccgaccttctccaagttcgagatcggcccgttcactatccacatgtacgcgatctgcatcctgatcggcatctgcgtggccgtatggatcctcaccacacgttggaagcggtacggcggcaccttcgaccagattctcgacaccacgctcgtcaccgtgccctgcgcgctggtgggcgcgcgcctctaccactgcatcaccacgccggccgactacttcccgcccaccggcaacttggtcaacatcctcaaggtgtgggaaggcggcatggccatcttcggcggcatctccgtcggcaccttggtggcgttcctgtggtgccgccacaagcactatccgttcgcgatcttcgccgatgccatcgcccccgcgctgcccgtggcccaggccatcggccgactcggcaactggttcaaccaggaactctacggctggcccaccacgttgccgtggggcctgaagctcaacgacgcggacgccatcggcaaatccgaaatctgctattccggcgcgcaatgcccggactacagaaccacgctgttccaccccacgttcctctacgagatgatctggaacctcatcggcgccgcgctcatcatctacctcggccacaagctcgccgaccggctcaaggccggccagcagttcgccatgtacctgatgtggtacggcctgggccgcacctggatcgagaacgtgcgcatcaactactccacggtgatcctgggcctgaggaccaacgtgtggaccgcgatcatcgtcttcgtgctcggctgcatcctgttcgtcgtgctctaccagtacggtccggaccccaagacgcaggcgcgcgggcttgcggcggtcaccgccgacgagctcgaacgccagagcatcgaagaggaacagcttcgccagaagaagcaggccaagcgcactaagtgacaccacaataaacagcgccgaaacagcgcgaaacacgggaccccaagtcccattgcacagataaggtaggaaaccatgagcaatatcgcaatcgcacccagcatcctgtccgctgacttctgcaacctcgaacgtgatctcaaggccatcgccaacgccgacctggtccacgtcgatgtcatggaccatcatttcgtgccgaacctgaccctgggcgagccgatcgtcggccgcatctgtcaggtcaccgatctgccggtcgacgtgcacctcatgatcgaggacccggaccgttgggctcccgaatacgccaagctcggcgccgcctccatctccttccacatgggtgccacccacgcccccgtgcgtctggcccgacagctgcgcgagatgggctgcaaggcctgcttcgccgtgcgtccggccgaaccggtcgagccgatcttcgatatcctcgacgagttcgacatggtcctcatcatgaccgttgagcccggcttcggcggccagaagttcctcgacaaccagatggccaaggtccgccgcctgcgcgatgagatcacccgccgcggcttgaagacccgcatccaggtcgatggcggcgtgagccccaagaccgcgcacatcgtggccgaggccggcgccgacgtgctcgttgccggttccgccgtgtacggcgccgagaatcccgcccaagccatcgacgacatccgcaccaaggccgaggccgcgttcaaggcctgagctccaagcctgaaccgcaatccacctttcatccataaccgcaagaaaagaatctgaatcacatgaagacgtttgaatccctgttcgccgaactgtccgaaaaggcccagacccgccccgaaggctccctgaccgtcgacgagctcgacaagggcacccacttcatcggcaagaagatcatcgaagaggccggcgagacctggatggccgccgaatacgagggtgcggaccgcaccgccgaggaaatgagccagctgctctaccacgtccaggtcatgatgatcaagcacggcctgacgcttgaggacgtctacaagcacctgtgagaggaacgcaaatgctgagaatcgcagtgcccaacaagggcatgctatccgaacccgcgtggaacatgctggccgaggccggctaccgtctgcgcaccaaccctcgccagctggtcgtgcaagatcccgacaatggcatcgagctgttctacctgcgtccgctcgatatcgccgtatacgtgggccgcggcgccatcgacgtcggcatcaccggccaggatctgctcaagaactccggtaccgccgcgctcgagcacatgccgctcggctttggtgcctcgaccttccgtttcgccgcaccgaacgaatccccgatcaccactctggaggatgttcagggcaagcgcgtggccaccacattcgataagctcgtacacgactatctggtcgagcacggcatccaggccgagaccatccacctggacggtgcggtcgaatcctccgtgcagctgggcgtggccgacctcatcgccgacgtggtctccaccggcaccaccctgcgcaacgccggcctgcgcgtgtttgccgaaccgctcatgcactccgaagcctgcctgattcgctcgccgcgtctgaacgagcaggattcgcgtctggccgtgctgacccgtcgtctgcaaggcgtgctcactgcacatcagtatgtgctcatggactatgacattccgatcagcaaggtcgccgccgccgtggccgtgacccccggctttgaaagcccgacgatctccccgctgcacgacaaacagtggaacgccgtgcgagtcatggttcccaaggccaaggtcaaccagctgatggatgatttgtacgaagtcggcgcacgcggcatcatcgttaccgctctgcaagcctcccgcatgtagactgttagtcgatatgaccaaccagaaagtcaacgccagatacagtccggaagcacgtgacatctatttcaccgtgcccaatttgatcagcgcgctgcgaatcatctcgattcctttcatcagcgtgctgatctccaagcacgagatgattgcggcgctagccctgatcgccatttcctcggcttcagacggactcgacggcatcatcgcgcgcagattcaaccaagtgagcaagatcggtcagattcttgatccgatcgccgaccgactgctcattttctgctcgattctggccctcagcgtcgccggcatcatcccatggtggatgctgattatcgtgggactgagggatctgtggatggcgattcaggtgctatggcttgcccagtacggttatggtccgctgcccgtgcatttcgtgggcaaggccggtaccgcgctgctgatgatttccatcgtcggtctgattttcgccgatttgggcaccagtacgtttttccacttgctctacatcgccgcgctggccgccggcatctggggcatcgccatgtattggctcgccggatatatctataccaagcagggcgtcggattgctacgcaaggaactgggggagaagtatggcgcttgaggccacggccccggtctcgttccccatacccaaggagaatgagccggtacgacgccgcgccgtgttctcccactcagtccgaggcgcggaatcgcatcatgcgctttccccggatgacgccgccgccatccgcaccagacgtcgccgtaaaaccaacgacgattcgcttcagctcatcgatgatcttgtcaatcgtccgatggatccgatgttctccgactcacgactggtccatgagcatcgttcgaccttctccatctggtttaatcgcatcgtcgtattcatcatctgcgtcggcgttggctttgcctgcagcctattcgtgcaacagttgcaatccgatccgcgtaagcaggtacggcagactttggccacgcaattggagaatcgcaactcgcagatagacgaactcaccacggacgtcaataatttgcgatcccaagttgacgaacagtccaagaaaatctccggcagcgtgaaaagcgacacgcttatccaagacgaaatggtcaatggtgccacggtggtcgaaggcgaaggaatcaccatgacgctggccgatccaatcgcggcaagccagtcggatcaatcctcctcgacgagagtcggcacctccacgaacatccgagtcatcaccgatctggatctgcaacaactggtctccctgatgtttcaaaacggagccgaagccattgccatcaacggtaataggctcggcgcgcaaacctcgatacgcaaggccggcgggcatattctcatcggcatgaccgcgatacaaagcccctataccattgaggccataggcgataagagcgccttggccgaagcgatgggggagaagagacttgcaagtctttacgattccttcaaggaagccggtatctacccgcaggtgagcaaatccaattcgattacacttgaggcagcagtcactggcgaagtgaagtacgcggaaaggaatgaataatggcagccgttctgggactgatcatcggcgtcgtcatcggcgtgttcgtcaagccggacattccgatcatcgtgcagccatatctgccgattatggtggtcgctgctcttgacgccctgctgggtgccgcgcgagcctatttcgagcgcagcttctccgaccgcgtgttcgtgatctccttcctcgccaacgtggtgacggcaacactgctcgtgttcctcggcaaccagctcggcgtcggttcgcagctgcagacggccgtcatcgtcgtactcggcatccgcatcttctccaacgtgtccgcgatcagacgcttcatcttccgaggctgacaagggtactgacgtatggcacgtaaagcacaatcagacaacatgctggagaaaatgcgcgaccagcatgcacaagacaaggtcaacgaccggatggaaaccgggtcgttccccacggtgcgcaagaagccccggaaggatctcaaccgggccagcaacaaatcacggctactatcctcgattctcattgctctgatgtgcgcgctgctgggtttcgcctacatgagccagatcaataacactaaatccacgtacgagacgatggacgagagcgaactggtgcggctgctgaatgagtcgaacacgcagatctccaatctcgaacaacgcaaaacccagttgaacagccagctcaactcgctgaaatcggcggctaacgagcaggagcaggcgcgtaagatcgccaagcaaaacgaagagaccagcggcttgatctccggcagactcccggcgaagggccaaggcgtgaccatccggatcggacgaggctcgacgactaaagtggacgcctcaatcatgttcaacctcatcgaggaactccgcaatgccggcgccgaggtaatcgccatcaataacgtgcgcgtcatcacctccacctacattcaggacgccgaggaaggcttgatcgtggatggcaccaccatcaagcccacatacacggtgaaggccatcggcaatccgcaggagctgtccaacgcagtcgatatcgccggcggtgtgggcgctcagctccaggtgaaatacggatccaacgtcaacgtgcagccttctgacagcatcattatcgacgaagtacgcgaagctacgcaaaaccagtatgcaaagacggtagaataggggattatgaccaacccgattcctagcgcaggcgaaaccaccattatcggcctgcccgcgattaatgtactgcccattaccaccaccggcgatcgaccgctgactcaagaggatctggacaccatcaccagattgtccgagggaacggcattgctgatttccgccaggggagcggtctcaggttctcgttacttgcttgacgaggatgaaatcaccgtcggtcgtgatccgcgagctgatattctgctcgacgactccaccgtatcccgtcagcatgccgtgttccgcagggtcaacggtcagttctttgtggttgacgcaggaagtctgaacggcacctacgtgaaccgtcagcgtgttgatcaggcgtcgctgaagaacggcgacgaaatcatgatcggtaaattccgtctcgtgttcttcacgaaatccgccattatttcccaatagtccacacccagcacggggttagactgattgcagaaattgcaatcatgtgattacaccagtgtgagtcacatgcgagacacgcatgagttaggggagtgccatgggacagacagggctgcatcttcatgtttcgcttgaggaccgtcagaatctgaacgctgacgcgattcagggggagttgttctccaatgtcgatactgaggagatcaagcgcggctaccgtggcactgtggcctccaaggtggccggcatcacgtaccgacagctcgattattgggcacgcaagcagattgttgagccgtccatcacgccgtctcatggctccggttcacgccgactgtactcgtttaaggatgtggtgattctcgctgtatccaagaagctgcttgatgccggtgtgaatctgcagaacgtgacggcggccatcggattcttgactcaacgcagcaccgatcagctggccaatgtgaccatcatgtgcgatggtcaaaacgtacatgaatgcacaaccagcgaacagatgctcgaactgttgcaaagcggtaaggcagtgttcgccgtgtcggtgggttcgttgtggcaccagattgagacggccttggaacaggaagaatatattgatcttgaggccaagccgctgacgattgccacgggccgtccgattgatgaactgactgccatgaggatgcgcaagaagctcgaggcacagcgcttgcaacgcgcaaccgcctgatacatgtatggttgttggcgacttgccggctttggtcggcaggtcgctttgttgtatgtgttgcttttgttgcctgccatcttatgtttttatatgttgcggtgattattatgactgattggaggaccgggtgaacgggattgttgtcggattgttgccgggcgttctgtggatggtcgccgtcatctttgctgtgtccatcatcactataacggtcagccgaggccatctgttcacgccgaaacgccggcgaccgccggtcgatccggtcgactggtcgatggtgaaaacgcatttcatgtcgtttgcggcggcgctgattccgtttcccgtattgacgtttacagcggatttgatggatgctcgcatgctcgcgttctacgaccacgcgcaattgcccggagcaatcatcatattcgtgctggtgctgttggaactcatcgccatgtatctgcaggcacgcaacgcctcagaaaccgaaatggacaagcgtttgggcgttgcttctcaccggaataaggatgatgttgcgaagtagccgattctctgcggcgaggctaatccgcagctagatactactggttcggctaaaatcaccacatactattaaccgataatgtacgctgtgcgacagtgatttgaccggacttcaggaatggctttatttcaacggtttgaagccatgctaatcagcggtttggaccggagcctgccaaaggtagccaaacccgtatatgacaattggctatgggggtgaagcgacccacggcctcagcttgcattgccctttgccgcgggtcggtttcatcatacccggcactcctgcccggcgagtttcgccaagctggcgtcgggcacatcgaaccacgccccgcgtttggcggacgacaccagctccgcgcccaacccgtgccccggcgtccatctgcggacgagccccgatgcgtcgcggtccaccatgccgtgctccgacctccagaagccctgccattccggcgtctcgcggctcctgtcgaagtcgaagcagccatccctcagaagggccatgagatcgggttcgacgggttcgccggtcacagggtcgttgacgaccagactcaggtcggcagcgttgcgcctcacggcggagattcgccatgacttcggcagaccgccgggctcgaacgtcacgagacggtcgcccggcaccacgcgccaagtgtccgtcagaccgttgcgcgggtcgcggtcgggcaggtcgggcgtcgggcgcacgtcgtcggggccttggtcttcttggagtgcgatgccatgttcagccttcctgtagctgtggatggctgtgcgaggaaaggcggttcggaaggggcttggcgaaggggccggggtggcacagttttcggacctcccggaaaacgcatgaggcgtttttaaaggttacatataaggggaagaaaaatttcttttaggtacttgctttcctaaaactgatgtgatacaatgatttaatccagaaaaggagtaaaaaatatgcggcaagctattcttaaataaaactataatcaaatagtgggaacaaaggattatgatagctccttttgtaggggcttagttttttgtacccaatttaagaatacttttgccttatcaattttgacatatccccaaaaacagcaatcacaaacaggtgtatgctgtatatgtgtatgtccgcaacttataatccccagtggtaaaagtattttactgctggggatttttatgccctttggggctgtaaagggaggacaatcacatgaaaataatcaatattggaattcttgcccatgtagacgctggaaagacgaccttgacggagagcctgctatatgccagcggagccatttcagaaccggggagcgtcgaaaaagggacaacgaggacggacaccatgtttttggagcggcagcgtgggattaccattcaagcggcagtcacttccttccagtggcacagatgtaaagttaacattgtggatacgcccggccacatggattttttggcggaggtgtaccgctctttggctgttttagatggggccatcttggtgatctccgctaaagatggcgtgcaggcccagacccgtattctgttccatgccctgcggaaaatgaacattcccaccgttatctttatcaacaagatcgaccaggctggcgttgatttgcagagcgtggttcagtctgttcgggataagctctccgccgatattatcatcaagcagacggtgtcgctgtccccggaaatagtcctggaggaaaataccgacatagaagcatgggatgcggtcatcgaaaataacgatgaattattggaaaa

SEQ ID NO: 46 - DNA, 54925 bp, Unknown
  R30_18m  MAG No. k141_17777
agcaaaacgcacgacggaagttgtgcgttttcttgtatgcggtgccctaaagtaagaagtgcttgagtttctttctgacgcacgaaggagaggcagtccgatgaaagttgatattctaacccgcgaatacccgccgcatgtctatggtggggccggtgtacacgccgaggaactgtccaaggtgcttgccgagcgcatcgacgtaaccgttcgtgcgtttgatggcaagcgcaccgaggcggacattcctgctatcccgaatgctgccgatgctaagggcagcttgaaggtcgtcggctatgacacgccttttgagctggctgatgccaaccccgcattgaagaccttcggcgttgatttgcagatcgccaatgatgtggacgccgacatcatccacgcgcacacctggtatgcctgcttggcgggctacatggccaagatgctgcacggcactccattggttattaccgcgcactctctggagccgttccgcccgtggaagcgtgagcagctcggcggcggctacaatctgagctcctgggctgagaaggatgcttacgagcacgccgatcgtgtgatcgccgtttccggtggcatgcgcaaggatattctggctgcttacccgaacctcgatccgaacaaggtggttgtggtgtacaacggcatcaccatggccgacttcgctaccccggcaccagacgatccgggttggaaggtgttcgagcgttaccacatcgaccgttcgaagcccaccctgctgttcgtgggccgtatcacccgccagaagggcctgccatacctgctcaaggcactgcacctgatttccaaggacattcaggtggtgctgtgcgccggtgctcctgacaccccggaaatcgccgaagaggtcaagactgcgttcgccaagctggatgaggaacgcggcaacatcgtctggattgaagaaatgctgccgaagcctgagctgaatgctttggaacacggctgtgatgccttcatctgcccgagcatctacgagccgctgggcatcgtgaaccttgaggccatggcctgcggtctgccggtcgtcgcatccgccactggcggcattccggaagtcgtggtcgacggcgaaaccggctatctggtcccgatcgaccagctgcacgacggcaccggcacccccaccgatccggacaagttcgtgcacgacatggccgccgccatcgacaggatcatggctgaccccgaactcgccaagaagatgggtcaggccggctacgaacgcgcccgcgacgtgttcagctgggagaccatcgccgacaagaccgtggaagtctaccagtccgtgctcgacgagcagaagaagtaagtagcgctgcaacgagtgccccccctcagtccggctgcgccggccagctcccctcaggtaccggtttcttggctcccctctctgcggggagctgtcaccgcagtgactgaggggagtcctcagaccgcgaatcataggtagtatttcactcatgacaaacaccgtcctccaactcgacaacgtcgaattccggcgtaaccgtcgtgtcatcatcaccgacgtgaacctcaccatcaacgcgggggagcgttgggtgctgttcggtccgaacggcatcggcaaatccaccgcggtcggcatgctggccacccgcaccttcccctcggaaggccgcgtattcatcctcggccatcaactcggcaaatacgacgtattcaaactgcgcacccgcatcggtctcgcctctgccgacctgggccggcagttccccgagttcgaggacccgctggacgccgtggtcaccggcctgtccgccgtgaccgggcgctggcgcgacacctacacgcaagaggaatacgcccgcgcccgccagctgctgcgcgattttcgcgtctcctatctggaaggcaaggagatgtggcgactgtccgaaggcgaacgcacccgcgtgttgatcgcccgtgcgctgatgggcgatcctgagctgctgatcatggatgagccgactactggcctcgacttgggtggtcgtgagcaggtgatgcgcacgctgagccgaatcggcgaggaaagctccgagcgtgccgtggtgctggtcacccatcgcttggaggagattccggccggtttcgaccacatcgccattatgggacgcaagccgattcccgctgaggacgccaccgaagcgggcgtggactcaatgggtaatcccggtgctggcaccatcgtctacaccggttcgttggagaatggcctgaccgacgaacgcttgtcggaattgttcggtatgcccatcgaagtccagcacacccacggccgctgggccgcctacgccgtgtgatgcttgtaggtttttaggcgggattttcttcgccccctctggagggggctgtcagcgtaagctgactgggggaggcccaaccagttacgaaggcaaccatgacaaccaatagcaaactcgtattcatcgatatcgacggcaccctagccgacgaaaaccacgtcgtacccgaatctgccagaatcgcttgcaaacaagcccaggccaacggccacaagctcttcatctgcaccgggcgttccgtgccgaaaatcgaacgcagcatcctcgacctcggtttcgatggcgtggtttccgtggcgggtgctcaggcgaatatcggagacaggctgctgttccagcatctcgtccctcctgaagcggtcgatgcggcgatggcgtattttgccaagcatcatatcgagagctaccaatggcaaggtgcggatggcatgtacatctcggaaggctaccgtcaacatctggaatcgaaaggcaagacctggaattgtggcgaattcgcgcgattctggcacctgttggatgaggtggaggtgccggctggctcgactttgggacagacgattcgtgtgagcaaggggtcatacttcacctcgccgaatcctgacgtgactttcgaggagactcaacgtaatttgagcccatggtttgagctcgtgcatggttcgtatgacaagatttccccgaacaatggcgagttgctgattaatggcatcgacaaaggtaccgctgtgcgcgacgtggcttctttgctgggctatgccattgccgacaccatcaccatcggcgactccgacaacgacaccgccatgctcaaagccgccggcacatccgtagccatgggcaacgccatccacggcatccaagccttctgcgacttcaccaccaccgacattcacgaggacggcctggccaacgccttcaagacgttgggactggtgtgaggctatgtcgtttgctctcagacggaggatcctttcgtgctgtagtattaataaataagttgaatatatactgaacggggaaggagggaacgatcttatgccgacgataatgaaagaacagatggaagtcagcattcgtgtcactcctcagcgggcttttgatttcatcaagcagcaggtagacgccaatgaaggctttgatgaggatactcgaccagtgcgggtgcatgattcagcttatttgaagcaacttctggagagctgatgagctccgccgtatgtgtcattttcgattgcaatatttatatcgatgtggcagaacgtatgctgcgccgagcatagagaattgtgaattcaaaatggtttgttcatcatgcgaagatagtggtcatctgtccgtcgcggttgcgcaatttacggtggcggaggagccggaacggaatctggagatcatcgacggattcgcgcgtgatgctgcggtgggcgatagggaagccgatctcattactgctgagctgagtcgtgagtgtcttgattccgcgcgtcgaacattgccggtgttgcagaatcgccgttttgccgatccgcagttgtgtgactgacctctgaataactttactggcgctgttgataagggttctatgatgggaatcatgaccactactgttgatagctctgattcaatgccggaacgtctgcaagaggggagcgaggcgcccgatttcactctgccggcggttatacctgggcttacagagagcggatcaatcaacctgtctgacgtgcttgatgccggccgcagggttgtactgtacttctacccggccgcgatgacgcccggatgcaccaccgaggcctgcgattttcgagataatcttgctcggctggaatcgcagaatgttgtggtgctcggtgtctccaaggactcgcttgacaaactgcgcaagtttgcacagcgcgatcatctcacattcccgttgctgtctgatcctgacctgaccgtgcacaagctgtacggcgcatacggcgaaaagaagctctacggcaaggtgcacgtaggtgtgattcgctcgacgctcgtcatcaatcccgatggctccgtggcgattgcgcgctacaacgtgcgtgccaaaggacatgtcgattcgctgttaaaggcactggagaagctggagaagtagcgcgttctcgttgctcggacacagtggttcgtgcatagcagttccgtgcggtatgtgccgtatgaaccactgccgtatgaaccaccggttgacttctcggactcaccggcaaatagtgagaccgtgggcgcgcagtacgtctatggctggcatgtaatcgagcgatgttgcggtgggattgagcatcagttcgcggatggcggcggatgctgagggctcgcttgtcttcgaggattctgcggccgggaagagagcgtcggcgattagggagatgatacgggaacgtgcatcgccggcattggcattgttgctgctgttgccggcgtcggtagtggcggagttgccaatagtagcggagctgttttgtagagtcgtatccaacgctgtgacaagcggctccaggttattctttgtcgcctcggcaatgtcatcgagctgatcgaataaggcgaacagccatgcacgacttcgctcctcatcgttgccggtcgcaagcctttcattggtgacgcgcacgagttcgtcaatcggtactgctggcgtctttgccggatcgcgatgctcacggttgtcttcgatatcgcccataagatgctggatttcgcactcgtcctgcaatacggtggtctcggcaaatgcggtggcgatggcgtctgcatcgatgaacttgccaccttcggactggaagcgcacgcgcttgggctcactgtaataatgcgacatgccgaatgtgatgtactgaggcatctcatcctgcaattgcttgaccgcatccgccaccttgcgcatgtccgcaagctgctgatgcaccacaataaaggcaagtattgctttggcatcggcgagagtgagcgactgcccgatactggctccatgatgatgttcgtgatgcgcaaacatgttcttcagcgaatcaaacaatcccataatgtcctccttcggactggggcacaatcggctacatctgccgcttactgtagtcctgaatatgtgggaatggtccatggaacgccgaaagcgaatattgacgaatgcgtgtgctgagttcttttgacttagatgattggaggaataactgaggaaatgaataacctcccagcgattttaaaaagcacttttgcatgattagcgaggcaaatcctctggtgaatggagattttggctcactgatgggcggtcagtgaagtgttcctacggttgagttgagcttttgcttcgctgagcagtctcagtggggcaaatcttcggatgggccaaggtattgctttgctgagaggccgcttagcggggcttttcctctactggctctctgggttgcgccactggtgatgattcagcggggtgttccctcaggtttgtcgaggtttcgcttcgctgaacagatctaggcggaacattccctctagtccgtcgaggttttgccctgttgaagtagtcctgagcggagcaaaccatcgattaggaagaggttttgattcgctggtgagttctgagcgggtcatttcttcgggctgattgaggtttagctcctgctgagcagagttgggcgaggcgaatctgtgggcgagtcgagaatgtgcttcgctgggctgcacctcatcgaagcgtttcttcgaattggtcgagaaaacgcttttggattcgctgattgtcaatgaatgacgagtcaacaccacagatatgcgcggacgtgggcttatcgatgatgtgcttgggacggaactgttggcataaggcgctcgcagtgagcgaacattcctagtgttgggccgttacgcttcggctgagttgggaggcggccttccagaagtagatggccgaggcgatggacgtggccaggccgacgatgagtaggaatatgcccaccactttgttgccggggaagttggcgggtgacagggaaatatctgccggatatatcaccaccatgagggtgagcgtgccgttcagtccgattgagcaggctacggtgagggccgagcagagacgtacgagtcccagcatggatttgtatacggcgagtgatgccgcgcggccggtctgttccttcatgatgccgtgggattcgagggtagctgtagtagttgtgtttcgaggtgttagccaacgtgtccttgcgcgcatacacgttgatgagcgacgtgccagtaatgaagagaacaacaaacttgaataaagctccgaaaatcccgctataggggtcgaagaggtcgcagacaaggctcagcgttccaggagcatacgcgatgaaaatggtcaatgcgctactcaacggtgacgcctcccatgttgtttattcttgccagtcaggtagggcaagaatatgctcagtgattctccctgttcgcgtattacggcttcatatagatacggcgcatgacgaattcgactatgcgatccggtaggaaacgcttgagttgcatcagggccttgtagctgctgtcgacggcgatgcgcaccggaggattgcgtttgccgagcgtcgcgacgatgactcgggccacgctttccggaccgtcaccagtctgctcgtcatgagccatttgcccgaccgaacgttggcattcgtcgtagtacggtgaattggctggttcggcgaggatacgcgagccggtgaatccagtggataggtcacccggttcgatgattgtggcggtgaggccatgacggcgcccctccaaccgcagcgcctccacatacatttccagcgccgcctttgtggaagagtagtgcgattggaacggcaaacccagccgtcctccaatcgagccgacaacgatgactcgtccccgcttacggttgcgtgccgcggtacggcgcagcaacggcagtgcgatttcgttgacctgcgacacgccaaaataattcacatcgaactgcttgcgagcgagcgtcattggtgtgcattccgcagagccggcgatgccgaatcccgcgcaatggacgatagcgtccaatcgggggagagcgccgagaatgcgcgtgatgtcagccggcttggtgacgtccatttcgtaggtaaacagttcgcctcggccaagacgctgagtctcaggaacgctcccgtctgcatcaagtcccaccgcaattacacgccagccttgcgcagcgagcatcctcgcagttgccctgccgataccactcgtgcctccggtgaccaatgccaccggccgtccatcatccttgattggttccatgtgtactattatcgcgcggtggtggtgtcggaatcacggtatggtgatagcagccgcatggaacaagctacttgctaggcgaagattgagcatcgtcatccgtcttacgagcattcagatgccggtgctcgtattcctcgaagtcatcacggacggcttccgcgggatacttgctcttggtctttgcgagcttgcccatgacgatgtcatccatatccacaccaagcgcatcggccatcatgatgcaatacgtaagcacatccgctagttcttccctgacatgtccctcatccatggatggcgactgcggcgtccactggtagcattccagcaattccgacgcctcgatgctgatggacttcgccaggttctcaggagtgtggtattggccccagccacgctccgacacaaaatcacgaatcgactgaatggtactgtcactgatcatgactgacattataggacttgctgaatgttggtcatgtaccagagctcatgatggaccataatatgattatgaacagtgagagcttggcgccgtttgtcatcaacctgccatatggtcaatacagtagggaagcttttgaaaaggcttttgacgaatccctcgagaagcagatggggcgcagtgttaatgattctgatctggaacatttcatgctgcgatatgtgttggcatatccaacggtttatgtcgtgtattcaggaaagaccaatcgctattcgatgaagaacgaatatacggtgtacgtcggtgagaccaacgatatacggcatcgtacattccagcatcttgaaagagatgctaaagaacgcgaggactggaaagctgtagctgatgctgtctcgcggaatgatgatgcatatcggcaatatgttatttcacatcccaaattcaataagtcgttaaccctggatgtcgaaaaccgtcttatgcactatatgtccagtaccgattcggtgaaaaggctcaacaatcgacggaccaatgcgcaaggcgattattacaccgcagaccagtttgatcggattttctcgcaaatctggttgagattacacaaggaagattctgacctgttcccggcggaggagatcatccgagattccgcgttgttcaaggcatcgccttttcataaactcagcgatagccagctcgaagccgaagaatctattttggtgcaacttgccgccttggttgccgatagccggcaacagaagaaagccgatgagcaatcttcagaccgccatccgaaattaatctttgttcaaggtgctgcagggacaggcaaaacggtcctgttaagccacctgttctacagaatcgcggctgaaatcggcatccaaggcgacacctattccgaagacgaagattatcctgagctgtcacaaacggcgaacggccggctttcctcatacattcttgtcaatcataaggaacaggtgcacgtatataatcagattgccacgaaactgggtttgcagaagaaatctgatgaagtggtcatgctgcccagtcagttcatcaatcgattcagcttacgcaatgagcatggtcgaggcattccagaccaaccgcaaggcctggcggacatcgtgctcatcgacgaggcccatttgttgatgacgcaaggaaatcagggatattccgggaagaaccagctgtatgacattctgcgcagagcccgggtggtgattgcggtctttgatcacaatcagattatgcagtccagccagcagtgggacccagcgatgctggaaaaacttcagctggactctgattcgactcagatcgcatgtgcgaccgggaaaatcggcgcattcaaagcggttgatttgggcgccgaatatcatctgccgtccatttccgtggacattgcgcatgtccatttgaaaaagcaattccgtattgccgcgagtaagtcgatgattcagtggattgaccgattcgcttcggggaaaggtatcggtcctatgcccgttgatacgggcgagtatgccgcagatggtgaagtgattcgagaaccttatgacgttaaggtgttcgattcgccggttgatttgtttaatgccattcacgcgaaagcccagctgaatcccgatggttgggatggggctggactgtcccgtttgttggccacctatgactggaagtattcggcgaaatctgagaatcagaatgatccacatggcttttggaatgtggaactgcatcgcgatacttccggcgtatggcgtatgggacttgcggatgaccatggattcgatcattccgcaataagttctgaccaattctgcaagccttggaactatcagctcgaagattccgctccgaaaagcaggaaaggcatcgacaaagaactgtcttgggcggagaagccgtacaccatagatgagattggctccatcttcaccatccaagggtttgatttgaactatgccggtgtgatcattggaccctcggtgacgtatcgtaacgggggaatcgtgttcgatgcaaaggccagccaaaactatctggcaaccaataagcgcaaagatttaggagattttgccgaagaaaatttgaagcatgagttgaatgtcctgctcaagcgcggcgtccacggtctgtaccttttcgcggtggacgaaggcctgcagcagcgtttgaaggagtgctgcatccattaaggtatgtgacggatattgtgctgaaaatgcacgcgaagcgcacgcagatgatgttgaatgcgctgaaaatgcactcaacatgccgggtgtcgtcgttcgctatgccaaaggcaagggattcctcatggacgagcatttggccaaggtctgggtttgcagccagctgaccaatatcatcaggaatctcaacgaagaacaggctggcatttctctgcatagtcaatggatatgtgccgaatgccgtaccgcgttgccaatgtcgtcactacagcgcaaacgccagctcctcccgcaacgcagtacgattcggataacgctcgacaatctcgtgtgccagcacacgggtctcctcatcgccgaacactgcggcgaaacgacgcagctgtttggcgatctgctggtatgtggcgcggcgtgccgtcaatgtattgtcgacgccacgttccaccgtaaaccggaacgcgggcgtgcccatggtgccgtatggcatcgcgtcgaggattatcgattttgccgattcggggtgttcgatggcgatggtgcgcagcaatggcagcggcgggtaatcgacgatggcgcaataagtcagggccgcgtccgaaagccgctcgtccacgatgagcttctcgtaagcgggattgcgccaactgctgtggcgctgtgtgccgcctttggtggttatttccggctggtacttgatgcggtcgatgatgttccgggcgcaatctctggccagcccatcagccacgtcatgccattcttctgcgctaagaccgccgtagatgcgtaacagattgcgtagtttactcacgtaatgggtatcggatctgtcgttgcaggaaagaatgtagtaccgatacacgttggcgagcagtccaacgtcattgagtccctcggcgcagcattccatgatggtatgccatccatggggcagcaggtccggcagcagaccgttatgccgggcatcgatatcgacatcttccatatcccggctcgacagaaggaaatcttgtgcgagcatgtatgcggaacgcaagtgcccttcatgaatcatgttcgcagcgttcatcagtgtgagggccattgactccgagtattcgctcagaagctgctcgcgtccagcgtcatcgttggatagagcgtataggtcgtaggcgctcatgagtgtgaacaactgcaatacgtgtaacgattcatccggaatgaagtcggtttcgtcgtctacttcgctcgtatcctcgttatcctcatcctcgtcgtcctcgtcgctttcttcgctctcttcgttgaacgagtattccagattgcgcgttatcgtgttctcgatcacgtcataggcccatatgcgtttgttatcatattgggcgaaagcgagcgcgctggaaatcagcaacatactgttcaatggttcgcattgccgcatgtctttgtcgttcgcggcctgcgcaatggtgttcaatgccttgccggcggtagaggagtcggcgaattccgccacattctccatatagcatcgcacgcgcatcgccagatcatccataagcgtgggcaaaggttcggagccatcatcgttctcggacgagagcagaagcgcgtggacttcgtgtatgcacagtcgcaggttgccgcatgcgctcgcgtaatcactggattgcagggcattgcccgcgatagcctgcacggttttgatgaattctgtgtagtcacatgatttgctgtacgtatcgctgtgtttactgatatgaataatgaaacgttcatggcatcggcggattgtgtcggagagcatggtttgtgcgtcgatcagcgggattagcggtcgttcttcgtctggctgggcgcagaacgtctttgcggcttcgcgcagttgggtggaccacaggaacagcagatggcctttgccctgctctgtgcgcgcgtcgaggtgttgctggatgggatccagcacggtgcgggggagtgcgatgacgccatcgtgagcgttggcggtgtcatcattgtggtgattgccgtgcgcgccaatgagctgtttgcgcagttcgtaaagcacggcacctatatgcttgcaatatggtgttctctgatacgggcaggtgcacgcggcggattgtatgcgaatcgaattgtcgtcggttgtggattcgtggtcgctgttactgctggtagtggcttggtcatcggtgtttgcttcattggcgttctcgccgtgagcgtctttgccgaggcggatgtcaacgtcataacagtcatcggcactgccggacacctgcgcgtgatacagctgcggcgcaatctcctgcaccgaactcacgcggcccgattcccagtaatcggtggcacgttcaagaatcaacggtgtgccttcgaacatgacctcgaattgagccagcgttggcttttgcggaacaaccatactgctgattgtagcgggtggagtgttactcaccgcttggcggtgcatactggtctgatgtagtcttgtttccactgggtaatcgcattcggggaagaggcgtcaatggctgtactgacagatgctgaagctcgtcgtatgctggaactgctgaaggaagctttgtctccgaagtccatcaccctgaataaaggcgagaagcaattccaattgcatcagataagtttgtagtcaaatgaatcgtagtgtttacgacgagaagaaagtatgacgagttctgattctgactcattaattcgaagttacggaaaatggctgtctgataacacgacttatacgcaactggatgagtggtatgaagtaatgttccacttctggatgaagacaacaattatacgcagttctacgtgaagccttgggagaacagcgtgacgttctctgatggctgtgccacattacgccgtttggagtcgcatgggatgactgtgacggaatcgcgtttggcagtgctcaaagatattctgaatcagtttggtattgaacgtaacggcgacgagcttactctgacgagcgatactgctgattttgctgatgccaagaatcggttcctgcaagctatcatcaaagttggtgatatgtctatgctggccaatcccatgtgcagacgtattttgcagatgacattcgtatgttctttaatgcgaacaacatacggtatgtggaaggcgctcagttccgtggcaagtctggtttgctgtgccaatatgactttgtgttgccgttcacgagtaaacagacggaacgattctgcacatctattacgcggccttcccagcgactcatttccagtaccttgttttcatgggaggatacgcaggcggcacgaaagacaccaagtgaactggttgttttcctcaatgattcggatcggcgcattgacaatcagctaataaccgctttggaaaagtacaatgcgtatcccattaagtggagtgagcgggaatttaaggagaacttgtacaagcttgcttcgtgagtggtgtttgtggccttggtcgggagcgaggtttctgctgtttgccgtgttgacctcccctcagtcgcctacggcgacagctcccctcggggaggggagttaaggaagcgcttaacgtgcgtggggcttcagccgctcccaatacgcccgaatcgcgccgaacgaatacaccgcgatcgcgacccaaatcaccatgaacgccgcgtagccctgcgcgcgcatcggttcgtgcagcaggagcacagccacacagaactggatcagcgggttgagatattggatgaaactcacggtcaggtaatggctgtgctgcacgccgtaggagaacatggccagcagaatcgcggtggccaggacggagaacgccactaacagcgcgaccatggccgccaacgtggcgaccaaacgatacgcgagcacgctgatggcattcatactggacagtgcgcgccagtacagcggcagcacgccccagccgatattggacacgagcggcgcggctatccccattcgcgtctgctcgacggtacgaaccgaagtcacgtctcaccaccatagcgactgatcacatgagtgtcccgcacctggtcacatggcatattggacttgctgatgatgaacagtaccggttattgttagagtcttttccacaggacacggagattgaacagatgattcggccttttctgagggcgcgaatcagattcgtaacgcagtggtttgccccagactctgttacggtgataataacttcatcgttgataagggagtcttcatggcaggcaatggcaacacggcatttcgtttccgagtcactttgcgccttgacgggcgtgaatgctggcgggagattctggtgccggcatcattgacgttcttcgatttgcatgcggtattgcaggaatgctttatgtggtacggcgagcatctgttctgcttctgcgccacatttccggatgggaagcaggtgcaagtggaagaattgtggggagaggagccctcataccatgaggcgaaatacgaacaatatatgccggtggagccgttgccggaagttcgcattgcttcggaaaccgagctgggcgacgtgtttcccaaggcgcgtaccgctcgctattactacgattatggtgacgattggatccatgatattaagctgctgcgtacctaccgcagcgtgcacgttgcggatcctcagctttgggatggggcaggggatgcgcctccggaggatgtcggcggggtgtatgggttcgatcggttccttgataccttgggcaatcccgaagatgaagaacatgatggcatggttgagtgggccgaggaccagatgtgggatcgtttcacgctgaaccgccatcgtgagcgtctgttccgttggcacaagcaccgtgacatgatgttgcagtagatggcgtggctacaatatgagcagctgtcagcggaatagccgtttgtggcttgcgggctaggggctgaaaatgctataaatatattgctttactcggaaacgagaaaggctccaagtcgccggggggctcccccggcattttttgtcaacggggacgggggtgcgatgccgtctgtattgagcatcttcgctgatgagagcggtgagtggggtaaacgatcagaatattatttaattactcttgtttttcatgaccagtctaaggatattagtcttgccttagagcggtaccgccagtcgttggctgactatggacttcctgatgtccctttccatgctgggccgctgcttaccgggcatgatgcttacgaagggatgagcctatcggagcgtaagaggcttctgggtttattcgttatcatgactcggcggctgccgattacatatcggacgtttgtgcatcgtaaaagtgattttgacgataaccgccaacgttttgaagcgcaactcaaacgcgatattgttaatctacttttggcgcatctttcggatttccattcttatggcactgtcaaggtgtattacgacggtggccaacagatagttactgatgccctgcgaggcgggattgagtatgcactctccatagatgccattgtctatcgtgacgcttctccacgcgactaccggcttgaacaagttgcggattttctatgcacccttgaattgacctgtgagaaattccggaatggggaacaaactgaaacggacaacaagttttttggtgattggaaatccttcagagtcaattatcttaagccgatccgcaggaaaagattggaatcataaatttggcagtgcccatatatattcgggacacaattgaataacacgaaatagcaaacaaaatccccggacctacacaatcatcgccacgacaatctcagaaaacaccgttacggcaatcagtggtgcggtgccgtcgatgaaggcgggcatggggggcagatggcagtaggcgaggtagcaggccatgtcggcgataagcaaaatcagcaggatgatggccaaaacgatggcggcggttgccccgagagctccggaactgtgcaacatagtcagcgcacatagttccagcgtgatccacatgacgatgagcaacagttccgtggtagtcggccgttgcaacagtcgtgaagtaagcacggccagaatggtataggcggcaacgccaccgaccgcgaaccgctgaatctgctgatttcgccggccctttaagtccctcaactccatcaatcgccgtctgacccatcacatcacgctttcatacacattgccgattgacagtcctagaacacagtctagaactgtcatggcatgttcacgcagacaggggctccaacaaaattggctaaaagagaactcggcaacctataacaaggacgcgcccgtgtgcccttacgttcagctccgctcacgaatgaaatcgaagatcacgtcgaagacctgctggctccagaaatcgtactcatgttcggcgccgtcgactagcaccagctgcgcgtccacgccgtgcttgaccagccggtcgcgcatcttgacggattgatggtaggggaccacggtgtcggcggtaccgtgcaacaggagcatcggcggatactgttggtcatcccgcacctgcaggtaggggctcatgtcagccgcgcgctgacggacctcggcattgatgccggtctcatgggtcgcgcccaccacggccgcgaacgggccgaaataatacagccggaatggattggtctcatcgtcgaatgcgtcgactgcttcaagcatgtcggtgggcgggaagcagctgaccacgtacttcaccgcatcgctctcatcggcattggtgccgtcctcataccgcggatcgtcggcggtcaaccccaccagcagcgacgtgttgccgccggacgacgtgccccagataccgagacggtcggggtccacgtgccattggcgcgcgtttgccctgagatagcggatggctgctttgacgtcctcgagatatgcggggaacatgtcatggggatcgctcgaggcatcgcgatgattcaccgtggccgccacaaagccttcgcgggccaaagccgagagctgcgggatctcgtagtcgcgatgcggcgtggtccaggcgctgccttgcacgaatatcacggtggggtagcggcggtcatcgtcatcgccggtggattgtggtgagatgatatccatcaccaggttatcggccccggtcttgtacgccacgttgcgggtcagcgtggccaatccggcaagcgtgggattgtgcgggatatggatggcattgtttgcgccggcattggcatcggtgactttggctgaatcggtagtgttcatggaatccccctagctctgttgctatagaggtcatcatacaagaaataggcatgattacggcacaacgatgtctcggtcacagcgaagacatgaaggcgcgaagacgcgcccggcagcgcgcgctgcctgcctgcgagttgccttcaagtgcacttcaagcgataaggtgacataagccgcggcaatggagattgctgcccggcaacgaggcggacagtgcccgttcgccgattcgcgataacagaaatgagacactatgaagactcaggaaatcggacaatccggcatgattgcgtcacgagtggcgctgggcgtgatgcgcatggacgcgttggatgccgccgatgcggcacgtaccgtggccgtggcccatgattccggcatcgactatttcgacacggcggaatgcatacacagatgctcgacgctgaaatccaattcaatatggcgagcgatcccgcagccgatcgcaccggtggcatcctgccttattcacggctgaagcatatgaccattcaggcatggtgcccattccaatccggcacggaatacggtccgttcgtcggcaacgagcatttccccgagctgaacgccgaattgacccgtcttgccggcaaatacggttccacgcccaacggcattgccgtcgcttggattctgcgtcatcccgccggtatccagccgttgctcggctcaatgacaccggagcgcatccgccagatggcggccggtgccgatatcgaactcgaacgccgtgactggtggtcgctgtatcaggcagccggcaatccgttggtgtgagcgagagatgacgagaccactgccgttgaggcgcgtgttcagcgtgcatacatctcaacggcagttaatgctgtgtcaatatgcccgaggcgagagcaatggcatgaaaacatgaatactctgggaatcacatcagaacgacggcatatcgagcaagggaacggaagcgtcggtcttagtagccccatccgcaatcgagctaacttcgtgattgcggaaccactcgacaacctgtgtttcactcaccggcatcaaatcccaagcatccaagccaacattcagtgcctccgggcgtgcaccatctggcgaaagctgatgtgtatgtccatacggcacgcgccacgccattccgccattgttgagccgcttctacttggaccggtacctctttgaacggagatattccatattgaagctattccggcatcatatggcacgtaggaaatcccggatatcggcgatttcctcatcacagatggcatgggccatgccggaatactcgcgataggtcagatgcccggcccgttcaaggacctgatgggccgtttgctggtcgggcatcggaatcgtgcggtcctgcgcgccatacgccaggaagaatcgggtaggggagtcaagcgccgcctgttcctcgcccatgaacgaaggactgagcaggatcgcggcatcgaacaacgtcggatgcaccttgaccagacgatacgacagataaccgccttgggagaaaccgatcaatatcttcctgcgatgggcgaatgccgaggcatccagcagtgaagccaccgcatccccgaccgccgcgcattcgcgttggcgctcgtccacgccgcagccgtcgggataccagtaattgccgcccatatagggcctcgcgtaggtggcacggaacgagatatagctgggtacggcggcaattgcggacggggccgcatcggctcgcgtcggcgcatatacggcgtcgagaatccgcaccatctcgctttcgtcgttgccgtaaccgtggaacatcaggaaaatggggtcattgccgccggcatcgatctggcttgtcatctgcattcgcatcgtcatcacctcaccaacgagcttacatgcattagacttgtagcgattgacccaccgagcacgcaaggagcaagttatggagccgaggcgcgggcctctcaccgcaggcgagaaggtgcagttcaccgaccgcaagggcaagaagatcaccgatcagcttgtggccggcggctccacgcagaccgagcatggcctgattctgcatgacgatgtgatcggcaagaccgaaggcaccgtgatcctcaccgtgcatgccaagcgcgaggcacaggtcaatcaggtctaccccgagaaagacaagaacaagccgtggaaatcgtcgcgcgccatcggcggctgggagtacgcggtgatgcgcccgcgactggccgattatgtgctttcgatgccgcgcggcgcgcagatcatgtatccgaaggacatcgcccaggtcattcagctcggcgacatccgctccggcatgcgcgtgcttgagtccggtgccggctcgggcgcgatgagcgtgaacctgctggacgccgtgggcgagcgcggccatctgaccacgatcgagctgcgccccgaattcgccaaagtggctcaggccaacgccacgctgtattatggtgaagcccccagctggtgggatctcaaaaccggcgacttcgactccgtggccgccgaactgcccgaacactggttcgaccgtatcatgctcgacatgctcgacccgtggaacagactcgagcaggcataccgcgtgattgcccccggcggcgtgttggtcagttacgtaactaccaccacgcagatgagtcgactggccgaagccctgcgcgcggccggttgctggaccgagccgcagatccaggaatcgttcgaacgcacatggaaggcccaaggcctcgccgtacgccccgaccaccagatgatcggccataccggtttccttgttatctcgcgcgccatggcctccggattcgaggcgctcagaaagcgcgatcgcgtgaccaaggacacgcagaccgacatcgactcgctcaccgacgaacagcgtgaggcgcagatcgaggaactggaactgcgcgacatctccgaccacaaactacgtaaggtgttgcgcgacctcgaccgtcaggtgggagaactcggcaacacgcatgaataaccgcccgacgatgagtttgtgaacgctcacacacctctatactggaagcaacaccacaccgccacaccgggcagacggttcgtgaagggagccacggatgggcatcaagctgagcaaagtcgccaaagcagcgaaaaaatacgaccatatcctcatcatcatgaggcatgccaaggccgagccgttcggcgacaagggtgactcggagcgcgagctcaccgacaaaggtctgaaacaggcgaaggccgtgggcaagggcatcgagtcgctgggactggtgcccgaccagatctcctgctcgtccgccacccgcacgcgccagacactggaccgcatgctcaagacctttggcgacaagccgatcgtcgactaccgcatcagcctgtatgacgggggagtgcaggcggtgttcgacgagctcgcccacgtcaaggccaagaaccgcgtgttcatgatagtgggccacgagccgactgtgtcgatcagcgcccaatggctcgcctccgccgactccgacggcgaacgactcgacctgctcaacttgggactttcgcccgcatccatcgtgatcatgggatcgaacaaaccgttcgacgaatggcaggtgcacagcggcgaactgctcgcggtcatcaatgtgaaagacttcgactaaagcggatataaattccatctataacgacactctgcggccatttataaggggtggaatccggatgttttgctaccctaagtcgggttacgaacgcatacattggaggattcatgtccactctgacttccgtctccggcttcccccgcatcgggcagaaccgcgaactgaagaagatcatcgaaggctactggaagggtgccaacgacctcgccgccgttaaggccaccgccgccgaactgcgcgccaagcactggaagctgcagcaggccgccggcatcggcctcatccccagcaacgacttcagctactacgatcagatgctggacaccgccatcctcctcaacgtgattccgaagcgttacgagcgtctcgccttcgataaccaggaggacacgctcttcgccatggcccgcggctaccagggcgacaagggcgacgtgaccgccctgccgatgaagaagtggttcaccaccaactaccactatctggtgcccgaagtcgagtcggccgcggagatcaagctcaactccaccaagccgttcgacgagttcaacgaggccaaggcgctgggcatcgacaccaagcccgtgttcatcggcccgtacacgttcctgaagctcgcccgcaccccggaagccaccgaactcgagctcgacaagggcctggtcaacgccgtggccgccgtctacgccgaagtgctcgacaagttcaacgaactcggcgccgcatgggtccagctcgatgagccgtacctcgtgctcgacaaggagccgggcgatgtggagctcttcaagaccctgtacaccaagatcctgtccgccaagggcaacgtcaaggtgctgctcaacacctacttcggccacatcgccgacgtgtacgagaccgtcaacctgctcggcttcgacggcatcggactggacctcaacgaaggccgtgaagagaacctcgaagccgtcgccaagtatggcgtggcctccaacaccgccatcttcgccggcgtgatcaacggccgcaacatctggcgcaacaactacgccacctccctcggcctggtcgacgccctgaagcaggtcaccgccaacgtggccgtctccaccgcatcctccctgctgcacgtgccgttcagcactgaaggcgagaccggcatctcgtccgaagacctcaagcacttcgcgttcgccgtggaaaagctgaccgagctcaaggaagtcgccgctctggccgacgccaccgaggacgagaagaaggcatccgccgccctcgccgccaaccaggccctgttcgacggcacccgcgtggccgccgacccggccgtcgccgagcgcatcggcaagctgtccgacgccgactacgtgcgccagcctgcccgcgaggagcgtcaggccctgcagcgcgaggccctcggcctgccgctgctgccgaccaccaccatcggctccttcccccagaccaaggagattcgcgccgagcgcgccaagctgcgcaagggcgaggtcaccaaggaagcctacgacgagttcatcaaggcccagatcgacgccgtcatcaagaagcaggaggagatcggcctcgacgtgctggtccacggcgagttcgagcgtaacgacatggtcgaatacttcggccagaacctcaacggcttcctgttcaccaagaacgcttgggttcagtcctacggcacccgttgcgtcaagcctccgatcgtctggggtgacgtgtcccgcgccaacccgatcaccgtggaatggtctgcgtacgcccagtccaagaccgaccacgtgatgaagggcatgctcaccggcccggtgaccatcctcaactggtcctggccgcgcgaggacatcacccacgaggaacagaccaagcagctcgccctcgccatccgcgacgaagtgctcgatctcgaggccgtcggcatcaaggtcatccagatcgatgaggccgccctgcgtgagaagctgccgctgcgcaagtccgactggcacgtcaagtacctcgactgggccgttccggccttccgtctggtgcactccgccgtcaagccgaccacccagatccacacccacatgtgctactccgagttcaacgacatcatccgcgacatcgacgcgatggatgctgacgtgatctccttcgaagcctcccgtggcgatctggtggtgctcgacgccattcatgacgcgcacttcgagaccgaggccggcccgggcgtctacgacatccactccccgcgtattccttccgagaaggaaatcgaggatcgtatctacgagatccttgacaagatggacgtcaagaaggtgtggatcaaccccgactgcggtctgaagacccgtggtaacgccgagacctggccgagcctggagaacctggtcgccgccgccaaggccgtgcgcgccaagctcgacaagtagcggaaatcaccgagctccctctgtatgagggagctcgggtttatgtaaggaaatcagcatgcattccccgatgttcacccttgaggtctttcccccgaagcgcaacgctcccgtggacaccatctatgacaccctcgacggcctggaggggctgaaccccgacttcatttccgtgacctacggccacggcacccattcggatcgcaccgccaccgcgcgcattgctcatacgatcagcaaggagtacggcattcccgcagtcgcgcatctgaccgcgttgtattccgacaaggcgaaaatcgacgaggccctcgacatgttcgagcaggccggcgtgagcgccgtactcgcattgcgcggcgactacatcgacggcgagcagctggtaggcgagttcaaccacgccagcgacctcgtgtcatacatccgctccgtgaagccgggcctcaaagtgttcggcgcctgctacccggaaggccactaccaggctgactcgctggaccaggacatcgaaaaccttaagatcaaggtcgatgccggcgtcactcacctgatctcccaactgttctacgacaacgaggacttctatcgcttcctcgacaaggcgcgcgccgccggcatcaccgtgccgatcgaggcgggcatcatgccggtgcgtggtgccaagtccgtgcgtcgcatggccgaacgcaacgcctcgcgtatcccggacaagctcaacaccctgctgaacaagtgggaggacgacatccagtccctgcgtgccgccggcatcctctacgcttccgagcagatcgccgacctcgtggcccacggcgtggacggcgtccacctgtattcgatgaaccaccccgccaccacgcgccgtatctggcgcaatgcggaaccgttgttcctcggtacgcaaggttgacgcatatcgcagcgcggcgcatctcaatgcgtcgcgccgcacgttaatctgctggcgaaacccagagttcccccagcggccgatggatatcatgaacgtacaagccaaccaaagcgatggaaggaagtccgttatgtgcactggtgtccgtttctccgatgatgagggcaacacctatttcggccgtaatctcgactggagtttctcatatggggagaccatcctggtcactccgcgcggctaccactatgacacggtgttcggtgcgggcggcaaggcgaagccgaacgcggtgatcggcgtgggcgtggtcatggccgataggccgatgtatttcgactgcgccaatgaacatggtctggccatcgccggcttgaatttccccggctacgcctcgttcgtccacgaaccggtcgaaggcacggaaaacgtcgccacgttcgaatttccgctgtgggtggcgcgtaatttcgactccgtcgacgaggtcgagaaggcgctcaggaacgtgacgctcgtctcccagatcgtgccgggacagcaggagtctctgctgcactggttcatcggcgacggcaagcgcagcatcgtcgtcgagcagatggccgatggcatgcacgtgcatcatgatgacgtcgatgtgctgaccaatcagccgacgttcgacttccatatggaaaatctgcgcaactacatgtgcgtcagcaacgagatggccgaaccgacttcatggggcaaggcctccttgaccgcctggggtgcgggtgtgggcatgcatggcatcccgggcgacgtgagttccccgtcgcgcttcgttcgtgtggcctacaccaacgcgcattacccgcagcagaacgatgaagccgccaatgtgtctcgcctgttccacaccctcggctccgtgcagatggtggacggcatggcgaagatgggcgacggccagttcgaacgcacgctgttcaccagcggatattcgtccaagaccaacacctattacatgaacacctatgatgaccccgccatccgttcctacgccatggccgattacgatatggattcctcggagctcatcagcgtcgcccgatgactccttcccggctcatgccccattcggagggcatgagcgtatatagtggaatcttatggaatcgtcgatgttcaaacccagctccatggatctcatcagggcaggtctgcaagacctcgacaaggcccgcaccttgttcgaccagctcaaggcggacgacattcccgatgagcgatgcgccgaactgctgagcatgctggcccacgcctgcgaccccgatatggcattgagcaatttcgtggatatcgtcaacgcgatgcaatccagccagcgcgatctgaaacacgtcatccccgacaacgacgccctgaagcgtctggtcacggtgctcggcgtctccgacgcgatgggcaagttcatgcgcttcaagccgcagcttgtggaggccgcagcagtcgacaactgcaacagccatctgttcaatcacgcgcaacgccgtgcacgtctgctcaaggcggtcggcgcggacccggacgaaccggccatgcccgtcgcctccaaggatctagccgaagcggccacggccttgcgttccagctaccggaaccaactggccgccatcatcgcccaggatgccgtggcagacgacccggcctccatccaaccgaccatcagccgcgaactgtccgacctcgcggacgcggcgctcgaaggcgcgctggccatcgcccgccacgaaaccgagggcagcgagcacgtgcgcttcaccatcatcggcatgggcaaactcggcgcacaggaactgaactacgtctccgacgtggacctcatctacgtggtcgaaccggccgacaaggacgtggaccatcagacgctgatccgcgtgggcaccaagatgggcaccatgctgcagcgtgtctgccagtccgccatcatgggcgtggccgagcagccgctgtggcagatcgacggcggcctgcgcccggaaggcaaggacggcgcgctggtgcgcgtgctctcctcgcacaagaactactacgagcagtgggccgagaactgggagttccaggcgttgctcaaggcccgcccggtggctggcgaccccgacctcggccgggcctacatggatatgactcggccgttcgtgtggagcgcgtccaagcgtaagaacttcgtctacgactgccagaaaatgcgcaagcgcgtggaagatctgattcccgcacctctgaaggatcgcgaaatcaagctcggccgcggtggtctgcgcgatgtggaattcaccgtgcagatgcttcagcttgtgcacggccgtaccgatgaatcgctgcgcaccagcaacacgctcgactcgctgcagcgcctgtccgaaggcggctacgtctcgcgcaaacaggccgtgcgcatgtcccaggactaccgcttcgagcgcgtgatggagcatcgccagcagatctggtccctgaagcgcacgcacctgttcccggacctcggccgggcctcggtcggaggcctcgaaaagaagcgcgacatcgacgtggatgagctcaaccagaaccaggagctgcgtcgcctcgcccgcgcattcggcctgcacccggaagaactcgtcgacaaatacgacgacacccgtcgcgaagtacgccacctgcacctcgacatctactatcgcccgatgctgccggtcaacgcccagatggagaacgaccagatcgtgctgagcgtcgaggccgcacaggaacgattcgaatccatcggcttcggcgacccggacgccgccatccgccacgtgcaggcgctcactgccggcgtggggcgcgcggccaaaatcaaccgcatcatcctgcccgccgtcttgcagtggctgggcgagggtcagaacccggacatgggcctgctcaactggcgcaagctggaggagaacttcggcaccgaatccggctacctcggcttcctgcgcgactccacctccgctgcccagcgtctgtgccacatcctgtccaactcgcgattcctgggcgacgcgctcaacaagtcggtcgaatcgatcagttggctcggtgatgacggcaatctgcaggcccgcacgcgcgaggcattggatgtgcagaccggctcggcgctggaacgtttcggctcgaacatcaacgagttcgccacctccatgcgcgccatgcgccgccacgaaatcgaacgcatcggcctgtcttggatgagcggtgtgatcagcgactccgacagtctcaaggccatgaccgacgtgtatgacgcaatcatcgacgcctcactgacctgggccgtgcgccaccagatcgccgcgttcggcgtcgaaaccgcgccggccggcatcaccgtcatcgccatgggccgttacggcgggcgcgaagtgaacttcagctccgatgcggatgccattctcatctaccgtccggccgacgatgccgacgacggccaagccaacgccttcgccaagaaggtcgtggaagacctgcgcaacatcctgcaaggcccgacgacgctggaaccgaagatcgaactcgacctggacctgcgcccggaaggcaagaacggcccgctcgtgcgctcctacgcctcctgtgaagaatactacgaatcttgggcctcgacctgggagcgccaggcgctgctgcgcgcccggtacgcggccggcgacgccgaactggcgcgggacttcctgatcaacatcgccgacccgttgcgctacccgaccacggagctgaccgaggccgaattgcagaacatccgcaagctcaaggcccgtatggaggccgagcgtctgccgcgcggcgtgcgtcgagaacgtcatctgaagctcggcaagggcggtctgtctgacgtggaatggaccgtgcaactcatgcagctccagcacgccggcgatatcaaagatctgcgcgtcaacggcacattggaggcattggacgtgctggaggccaagaagctcatcagcgctatcgatgcgattcagctgcgcaaggcatggacgttgtgcaccgcggcccgcaacggcaactatctgtggagcgggcgcgccaaccaggccgatattctgcctgatgacatctattcgctgggcggcatcgccgtctacctcggctacggcgcccaccgcggccagcatttcgagaacgacctgctggccgtgatgcgcaaatgccgtgacgtatgccagcgcctgttctacgggcagaccgaagacgaggcgactgcggcaaccaccgccacggcctccgacgcaacgcagcagccgcaaaccgcgcctcgcccgcgtatgcacgtgatcgcaccgcgactggagcggaaccgacgccgcgcgcagcgatagacctttcttgtattgcgttcactacgttcattaggtcgattcatcgttcattaggtcggtccgccgccgcataccttgttggaatggcggcattccaacaacagatacgagggtgcagtgacctagtgaacgtcaaatcgacctaatgaatgagctctggcgttccaaagcagatatcagctatacagacacagcatattcgttggattttcaggtgaacactcggtgaatgcggctgtccgaaaaatggcgtaagttatattaggtcacacaagggtggccacctgaaaaccacgagcgaaaaggtgagccttgtctgaagaaacgccaatggtcggcaaaagtgtcgtaacgctggacggcctgtctacaaaccagattctcgacctgctgcataaggccgaatacatcgattcccaccgcaaagaggttgcccatacctgcgatgggcgagtgctggccacgctgttctacgagccctccacccgtacgcgcctgagctttgagacggcaatgctgcgtctcggcggcaaggtcatcggattcgccggcgcgcagctggcctccgtgaccaagggcgaatccatcgccgacacgttgaagaccgtgtccaactacgtggacgtggtcgccatccgtcacccgaaggagggtgctgcgctggtggcctcccgcgccgcatccgtgccggtgatcaacgccggcgacggcggccacatgcatcccacgcagacgctggccgacctggccacgctgcagtcgcgcttcggccgcatcaccgacctgaccgtgggactgtgcggcgatttgaccttcggccgcaccgtgcactccctgatcgagaccctgtgccgcttcggcaatgtgcgcttcgtgcttatcagcccggacgagctcaagaccccgcagtacgtgatcgaccgcatcaacgccaccgacaactgctcctacgtggaagtgcgcgacctggcctccgtgatcggcgacctcgacgtgctgtacatgacccgcgtgcagaaggaacgcttcttcaacgaagacgactacctgcgcctgcgcgacacctacattctcgacgaagaaaagctgcagctcgccaagccgtccatggccgtacttcacccgctgccgcgcgtcaacgaaatctccgtggacgtggacgacgacccgcgtgccgcctacttcgaacaggtcaagaacggcatgctcgtgcgcatggccctcgaaagcaccgtggtgggcgacgaactacccggatacgaaccgctcaaccccaaggaggttcaggcctgatggaagtcaccagcattcagaacggcatcatcatcgaccatgtgccggccggaacctcgctgaaggttctcgaatacctgaaaatcgacccggccaaaaccaagcttgcgctcatcatgaacgccaactccaagcgttacggctccaaggacatcatcaaaatcgaggatgacaaggacatcgacctcgatgtgctcggcttcgtggcccgccaggccaccgtagacgtggtgcgcggcggcaagatcgtcgaaaagaagcagccgaacctgcccgagcacatcgtcggcgtgatctcctgcgtgaacccgcgctgcgtgaccaccaccgagcccggcatcaagcagatgttccacctcgtgcactccgaacggctcgaataccgctgcgactactgcgacgaggaagccaaactgtgagcatcaccctacgcaacatcaaggtctggaacaccggcgaagtcatcgacctcgtggtgcccgggaccgctgccgcctacttcgccgacacctccgccgtggctgacggtgccgatatcgacgccaccggactgaccgtggcccccggtttcgaagacccgcacgtccacttccgcgatcccggccagacctacaaggaatctatggtctccggctgccgcgcgtccgcatccggcggatacacgaacgtgctcatcatgccgaacacgttgccggcactggatgggcagaccgtgtctgacctggaagcggccggtgcgaaagaggttctggatgccggcttcgacaacgtcatcgacttcctgcagcagtacgatactgcgcacgatgttcaattgccggttcgttacgatctgtgcgtgtgcgcgtccaaggatcgcgccggtcatgaggcaagcgacgttgccgactggctcaggtacgtgcccggattcgaggacgacgccaagacgccggccatgctcacgcaccccatcaccgcaattagcgacgacggttccgctgtgacgccggagatcctggaccaggtgctggagaacgtcaaggcctccgacctgtacctaatcgagcattgcgagcatcacgatacaggtgccgtgaacgaaggcccggtctcgcgcgaacttggcgtgcccggcattccggaagacaccgagctcaagatcgtggcccgcgatatagaagcggcccgccgcactggtgtccacgtacacttccagcatgtgagcactgccatctcgttcgaggcgattcgcaaggccaaggccgaaggattgccaatcacctgcgagaccgcgccgcactatctggcgttgagcgacgaggcgctgctcaagtacggcacgctcgccaagatgaatccgccgctgcgctccgaagcggaccgcaaagccaccatcgcggccatcgccgacggcaccgtggatctgctggccaccgaccatgcgccgcacacgttggcagagaaggaactcggcttccttgaggcgcccaacggcatcatcggactggaatgcgcgtacggcgtgtgccacaaggtgctcgtcgacggcggcttcatttccgatgagcgtctgatcgagctcatgtccgtgggacccgccgaactcatggggcatgtgccaaccgacgtggccgcgctggtcgaggactacgccgaacccgcgcccactggggatgatccggatggcgtgattgcgggggagagcgacgctcagccgcagcgtgaaggcgtcaaccgactgctcgacctgagccgcgtggatgacgccgacaatgtcgacctcgtggtgctcaacaccgctgaggaatggaccgtggaccctgaacagttccactccagggctcgtaacaccccgttcggcggctggcaggtcaccggacgccccctcgccacgatcatcggctcccagctgatgttcagccgtctgtagataacataaggagcagcatggatcgcctgatcgaagcgattgacaacactcagaaccccagcgtcgtgggcctcgaccccaccgaggcgttggtaccgccgcaggtcgtggcgagctttgccgacgaggtgcgtgactcggtcgaatccccggaggaaatcgaatccgcgcagctggccgtcgcctacttcgaatacaaccgcacgatcatcgacgccatcgccgacatcgtgcccgccgtcaaaccgcagatcgccatgtacgaggcgctcggccccgccggcgtggacatctacacgatgacctgcgaatacgcggcccagcagggcctctacgtgctcggcgacatcaaacgcggcgacatcggctccactgcagccgcctacgcccaccacctgaacggcgtgggcgacttcgacccgtggcatgaggatgcggtgaccgtcaacccgtatctcggcaccgacggcatcaccccgttcgtcgaggccgccgccgaagccgacaaggacatcttcgtgctcgtgcgcacctccaacccgtcctccagcgaactgcagatgctcgacctggccgacggcacgaaggtctacgagcatgtggccgatctcgtggaaggctggggcgccgagaccatcggcagccacggctactcccgcgtgggcgcggtggtcggtgccacccaccccgaggaaggcaaggcgttgcgtgaacgtatgccgcacacgttcttcctcgtgccgggctacggtgcgcagggcggcacggccgcggacgtggcaggcatgttcgacaagcagggcagcggcgccatcgtcaactcgtcgcgcggcatcatcggcgcatggaagaagagcggcaagtactccgaatccatgaccgccgacgaggcgctggaccttgtggcgagcagcgcgcgccaggcggcgctcgacatgcgcgataatctgcgggttgccgtatataggtaggtagattgtccggctgtgggctatacgtgagtgtgggctggaaaccggagccgagtgtgtttaactacccctcagtcaacctgcggttgacagctcccctgatagggggagcttgatgtgctgaataggaatgaaatgacaactttcacccccacccatgatgtggttgcggaggcgactgcggccggattcttcccgccgcgccacaacgtcgaaatcacgcaggttacggaactgaccgaccgcgtgatgcgactgacattccgcgacccgttcatcgcctcccacgccaagcccgcccagttcgtcaacctgttcacgcacgacgacttcatgctcatgccgcgtccgttcggcgtcagcgaagtcgacggcgatgaagtcagcgtgatcttcgccgtcgtgggccacggcaccgaacagttggcagggctgcaggccggcgacaccgtcgacgtgctcggcccgctcggccgcggcttcaacctcaaggaagacgccaactacattctcgtcggcggcggactcggcgtgcccccgctaatctacgccgcgcaaaagctcgccgaacacgacgcctcctttgccaccgccgtattcggctaccgcaacgaccacttcgctgaggaatacgtctcccggtacgcggactggtcgtggagcatcgacgacgccgaaggcaacgtggtcgacctgctcaacaaactcgaacaaggcgacgacctgaaggcctacgatcgcaagccgatcatcttgtcctgcggaccgctgcctatgatgaaggccgtggccgcttgggccgccgaacgcggcatccccgcgcagctgagcatggaacagcgcatgggctgcggctacggcacctgcgtgctgtgcaccatcgacaccgtggacggccgcctcaaggtctgctccgacggacccgtgttcacccgcgaacagctcggatggggggagtgacgatggccgcaaacaaccagtccgcgcagggcagcgacaaccacatcaacctgtacgagccccacgtgtggaagcaccacaccaaggtggccggtctggaatggaagaatccggtcggcaccgcctccggcaccttccagtacgccgccgtccgctggttctacgacgtcagccagctcggcgccgtatgcaccaagggcgcctcgcccgtgccgtgggagggcaatccttcgccgcgcaccgccgaatcgccgtccgcgaacatcaacgctgtgggcctgcagaatcccggcatcgaccattacttggccgaggacctgcccaagctcaaggccgcgggcgcgttcgtcatctccaatgtcgccggacattgcgacgacgattacgcggcggtcgtggaaaagctcgccgactccaacgcagacatgctggaaatcaacgtcagctgcccgaacatttccgccggcggcatgagcgtgggcaccgacccggtggccctcgccaacctcatggacaggctgcgcccgatgaccgacaagccgatgatcgtcaaactcacgccgaacgtcaccgacatcaccgtgccggcgcgcgcggccgtggaacacggcgccgacgcgttgagcatgatcaacacgctcaaaggcatgcgcatcaacattcgcaccggccagccgatcatcgccaacgtcaccggcggcgtatccggcccggccgtgctgccggtcggcctggcagccgtctatcgggtgcgcaccgcactgccggagattccgatcatcggactcggcggcatcgacagtggtgagaaggcgctcgaatacctgtacgccggcgcgaacgccgtcgaagtgggtgcggccgcgctcttcgacccggtggccccgctgcgcgtcgcccgcgaacttgacgacctgctggacagccgtcccgaactcgctgctaaactggccgcaggacagacttggaggtaaggaacatcatggcagaaacacttgcacatcgcttcactgaattcctgttggaatccaacgcgctgaagttcggcgacttcacgctgaagtccggccgcaagagcccgtacttcatcaacgccggcgccttcgacgacggcaagaagatcgccgcgctcggcacgttctacgccgaaaagattagccaggccatcgtgcacaacacgattccccgcaacatcgacaccgtgttcggccccgcctacaagggcattccgctggccgtgtccaccgcgatcgcgctgaacgccggccacaacatgaccgtcggatacaccttcgaccgcaaggagaagaaggaccacggcgacggcggctggatggtcggcaccccgctgaccgacggcatgaaggtgctgctcgtggacgacgtgatgaccgccggcaccgccgtgcgcgaagtcatccccaaactcaaagccgaggcgaacgtcgaggtcgtgggtctcgtgctctccgtggaccgcatggagaagaccaaggactccgacctgtctgccgtgaaggccgtggaagccgaattcggcttcccggtgctctccatcgccaacgtgcgcgagatcttcgacgccgccgccaagatgaagaaccccgacggcaccccgctgctcagccacgacatccagcagcgcgccgccgcctaccttgaggaatacggcgcctgatcgtcttcaacctaaaaccaaaagcgggcttgcgagcccgtttttttttattacgttccatgagcagcagtaccatattaaggcagaagctttggcaaggagcgtgctatgaactggttagttggtatagggctgtttgcgctcgtggggatatgcagttacttcggcatcgagcatcatctggacagcaaagcgaacaagttgtcgcaaggtaatgaagaagaccgccgagatgctgccgaattacgtgatatcgccgccaaaatcgatcacggtaagtattacccgatgctgtaacgggcaatctgggcctaaattgatgctatctccgtttcgaggggctgatgtcgtggtttccagagatctacttccgtttcgaggggctgatgcccaagtagaagcagcatgaaaatggcggaatgacgttggggtgatgccgctcatactcgggatatgacggatgaacagccccttgaaacggagatagatgtctccagaaggccaaatcagccccttgaaggcgagatagggttttaaactctgggaccgactcgcctgtgatgaaaacccgctcggcgtagaattaccgtaggttcgttacattcgaacaaggaaggccgccatggggaacatcaccgacgatatccggcaacatttcgacaccttcgccgcactgccgttcaccgaggcggacagtctcgccctgtcccagctggcctacgcgcgcatgccggataacgtgccgcgctatcacgaggattcggcggacgtcagcggcatgattcccacggtctccatccgcgacctgctacgcgccgaatgctatgacgccatgttcggcaaggtgtggtcgccgcagatgaacgtcgatctgctgcgtgcgatgggggagagcccgcgctggcgcgacctgcgcgtcggcgaatacgtggatgaattcgacgccgaaaccaccaaacagttctcggcctgcgtcttcgaactgggcgacggcacgctgtacgtggctttccgtggcaccgacagttcgatcgtcgggtggaaggaggatttcacgatggccttccgccgtccggtcgcctcgcaggaggccgctgtgcggtatgtgactgatattgccggccgctgggccgggccgattatggtcggcggccattccaaaggcggcaatctggcggtatacgcggcggccaatgtgcccggcgaaattcagggacgtatcacggccgtgtattcgcacgatggtccaggcttcgatgaggcgttcttcgatgaggatgggtacgcgcgcattgcgccgaaaatccataaatcggtaccgggatcgtcgatcatcggcatgctgtttgagactcgtgagcatgtggaagacggctatacggtggtcagcagcgacggtgccagcatcatgcagcatttcgcattgcactggcaagtcgatcatggccaattcgtacaggctgatggactgacaagtagcgcgcgatacctggcacgcacgatcaacggatggatggcaaaatacgacgacgagcatcgccgcaagttcatcgaaaacctgtttgccatcttcgaggctggcggatacgacacattcggcgacctcacttcgcatttgacacagtcactgccgattatgctcgccgcggcccgcaacattgatgtcgaagatcgcgacgtgatgattgaagtgctcaaaggcttcgccacgacagccgccacgtcggtaatctcggccaagtagccggaggccatcaaactggttttgccagtcagtctcaatagcgcaagagccggcccctgagatactcaggggccggctcttacttccatttccccagcggggttggcttaatcgcagtatatctcactgctgaccatgactgttttacttactcctaatcaatgagcttgtagccgtgatcggcgactacggacttgagcttggtgaggtaggtttcggcggccttggatagcttggaacgctcgttcgtgatccagccgaccagcatcgtttcgtcggtgtcgagcggcacggtgacgatcttctcattgttgaggtcgccgttgtcgatgccggtgcacaccgtgtagccgttgaggccgatgatgaagttcagaatcgtggcgcggtcggtcacgttgatctgcttgggggagtattccggccagaccgcctcctcatagaagtagaacgagccttcctcgccctgttcgtactggatgaatggatagggcttcagatcctccatggtgatgatctttttggcggccaatgggttgtcccgtgagatgaacacgtgcaggggggcgcggaagagcggatggaattcaaggtgtttctcgcgcaggagtttgccgatcacgtccttattgaagtcggacagatagatgatgccgatctcggactgcatgttcgccacctggttgatgatgtcacgtgtacgggtctcacggatcgtgaactcgtattcgtcggacttaatggagttgatcatctccacgaaagcctcgacggcgaacatgtagtgctgggtggagacctggcacagctgcttgcgcggtttggcgtgcttgtaacgctcttcgagcaggtcggcctggtcgagcacctggcgggcgtaggtcaggaattccgcgccgtccacggtcagggcgatgccctgcgaggagcgggtgaaaatctcgatgcccagctcgttctccaattccttgaccgacgagctcagggccggctgggagacgtacagggcatgggaggcctcgttcatcgagccgcactcgacgatcttgacgatgtatttcagctgcagcagtgtcataaagtctatttatatcgctagggatggtcgccacacgggtttataacctcatcaatccactatggcgacacaatatgagatgcctcgcatatcgcggacgctgtgtaacgggatatgcgccacattggtaacctgaggcaggaccagtacgatgccatccagaccttctccttctccagtatcgaccgcttctccacgccgagcctgatgaccaggctcggcgccgacgtgatgaacatccagaacgccttcatgatgattctgcgcatggtgccgcgtgccgcgtcgttgaagtgctcaccgaacagtgcgacatgccggtcgccaaacggccggtcaccgtcgtcaaggacgggtccatagacttcaactgccgcgacgcaatatttggcgacttacaggcgtacgccgagttcggcgagcgattcgcgcgcctgcgacgcgttctcgaagaggatgctgtggatgccgacctcgttggcgccgacgacgttcttggcggtgtcgtcgaagaacacgcagcgctcggccgtgaggtcgaaacgggtcaggaccagctcgtagatgtcggcgttcggcttgtgcatcttctccacgccggagaccacggtgccctgcagcagctgttcgaggcgcgggtacttctcgaaggccaggtggaaggtctcatgcgaccagttggtcagaccccatacgccgtagccgtgggccttcaaatccgccagcagttcgaccatgcccggcagcgtgcggggcagcgcgtccgcgtagtggccgatgtagaacttgaagatgtcggcgagttcctggccttgttcgcgtaccacatccgggtagatgtccgcgaaatcctcgccggcgtccatgcggtcctcgtagtggaagaagccgcaggggtcgtcgtcggcgcagatgcgttccacgatttcatcggggaatcggccttcaaggcatgcgcgggtgttccagtccagcagcacgccgcagaagtcgaaaatcacgtcggtgatgggggagttggccatgatggttccttgtgtgtttgggtcgttgggtgaggtctgcgatttagtgtacggggtttgtgtataggtcggggtatgtggagtttgaggcttatgtttctctccctccgtcttggttttgccgaggcacctccctcgtcagagggaggtcaacaaggttatgcgatgacgtcggcgatggcttcggggatggcgtggatcacgtcgccggccacgattgggtggccgagcgtcatgaagcgctggcgatgctcgcggccgatcagttccggctcctgccagccctgctgctcggattcggaggcgatcgccgccgccaggccatgcaggtaggcggccgaggccacggtctcgcccgtggtggccacgtcatcctgctgggcgagtagggcgccggtcagaccggccagtacgtcgcccgcgccggcggtgcccagccaggccggcgcactgcccgacgcatagacatggtcctcatccaccacgatggtcaccgcgcccttcagcaatacggtggcaccggtgagctcgtgggcgcgcttcgcgctggccaacgggttcagccgcacgtcgtcggcggtgtacggctcgtgcgaatcggcatgctccgcggtgctggcggtggtttcgaaccggttgagcagtttcgccatctcgccggcatgtggcgtgatcaccacctggccgggcacacgctccggcagcaggtcgagtgcgccggcatccaccacgattggcggcatgtcgtaggcgtccttgttctcatcctcgctgccgagcgcgtaatgcttgagcaatgcggcgatggtgtcccgctgcatatcgccgtcggagccctcgacgctagcctcgggcacgccggaccccacgacccaggactgcacatgtcccttgccgatcacggcttccggcagtgcggtgagcaccatgttctgcgcgcgctccgggcccagataccggaccatgccggtgttcgcgcgggcggcggcgctggtggtgagcacggcggcaccggggtagcgctgcgagccggtcaccagaccaaccacgccccgggaatatttggaatcctcgaaccgggggagacggaccgcgtcggacgcgaacgaattatccaccacctcgacgtccggatccttgtcgtcgatatcgaatccgaaatcgaacaactcgatacggccgcaggcgaacgtggcgggcggcagcaccgcgcacggcttcatcgcgccgaacgtgaccgtgaccgtggccggaatgtacgggccgggcagagaaccatcgttcacaccgacgccggatggcgtatccacagcaagtaccagcggaaaatcgcctgacgactcacggttcggcagggcgggctcatcgggagcctcgccgtcgagaccaagggcggaggcgagcgcggcgggaatgccgcgtagcgagccttgaatgccgatgccggtcatcgcgtcgatgatcagatgcgatttcctggccacggcgatggcggtctgcaatcgctcaccggcctcaccggcggaaaacccggacgcgcagccgggaatatcggctgccgggtcaagcaccagcaccttgccgccggcgcgcacgagcgcggcgaatccggcctcatgcagcgaccggcccacggcgatggcagtgacgttcgcgccctcctgggccagcgcggcggccgcgaacagaccatcgccaccattgtctccggccccggccagcagcacgatcgacgtgtcctccagcgccagatcctcgtcgtccagcatgccggccgccatgtgggccgcggcctgggcggccatgcgcatcagcggcacgcctttgtccagcaggggtcgctccatggcccggaccgtatcggagtcataggcgctgtgcagcagcagttcgcgatgatcggcgtcttcggtgtattccatggcaacccctttcttgtgtttgttacttgcggcccgtgtttacaggccgtacacctcgtgggcgaacttttcgagcacggggatcgaacgcttgactttctcggtgtcgatgcagtaggccatgcggaagtatccgggcacgccgaagctgtcggacggcacgaggatcaggtcgtattccttggccttcatgcagaacgccacggcgtcgtcctctaacgccttggggaagatgtagaacgtgccgccggggcgcaccacgtcgaagccgatgccggtgagcgcatcgtagagcaggttcatgttcgtctcgtagacgttgaggtcggcggtctggtcgatgactttggctacgcccagctgaatcgagctcggcgggcagttgtggccggtgccgcgcgagatctggcccatcatcggcacgagcaggtcggcgtcggtggctgcggggttcaccgcgacgtagccgatgcgttcgcccggcaggctcagcgacttcgaccacgagtagcaggtcagcgagttcgcatagaagctggccgggtagggctgggtggctccgtcgaacacgatttcgcggtaaggttcgtcgctgatcaggaagatgtcgtggccgtactcggcctgcttggcggtcaggatcgcggccagacgcttgagcgtgtccgccgaatacaccgcgccggacgggttgttcggggtgttgatgagcgcggcctgcacgttcgggttgagcgcggcctcgaacgcctcgaagttgatctggaagttctcggtgtcggccggcacgatggtcagcttggcgccgatgcccttgacgtacggctggtattcggggaagtagggggcgaaggtgatgatctcgtcgcccggcttggtcaccgcgcgcatcgcgtgggacagcgcgcccgccgcgcccgtggtcgggaagatatggttgccggtgtatgccatgccgaaacgttcgttgaggttttcggcgatcgcgtccttgacggacgggatgccgagcgagggggagtagccgtggatggccgccggatcgccgttttcgtagaggtcgaccatggcgtcggtgaaggatttcggagccggcaccgagggattgccaaggctgtaatcgaacacgttctggtagccgatttcagcaccgcggctcgtggcgtactcgctcagcccgcgaatcacggacttgccgccaagcatggccttgtattcctcattgatcatggctgttctcctcgcatggttgtactggtatgcaccacgctactactatcgcggccggtttgcgccatttgccgcgccgtacctaagccggctgttctatttgttctattagttctatcagtggagtttgaaccggcatatacccttgcaataaagccatttgtagggtctggggctttccggggttgcttgtctcatagattttcagcctcttgatatttgcggttgatggctgtgatgtgcgtgggtgatggctgttgaggcatcatgaggatcttttcgactgtccgccgtcgccatgccgccatgatgcctacagaaagtcgagttgcgtatttccgccaagcagggtggtgaccggtggggggcgatcggtgggggtgaccgacacccgctataggcagcaggcagccgcacacatcccaatatctgtgggacggcagacgagtcaatcgtttgtcgtccgcgccgtccctcaagggcgcgggatggcagacaagtcaactgtttaacgtccgtagcgtcccacaccgacgactgtagaaaccgcggaataacgccgattctcgctgcagctccatgactatgcacaaccgttcatagcgagcgctgtgggacggcgggcggaaaacggccgaatccgcgtgccgtcccacacctcgtacaatccgcgttttgggaaagcatcaccgtaaggctgacgcgcatccgcatccacagcaggagccttaccggccgtaatcccgcactcgattattttttctgacaggaaatcgaacccgaaacactaacccatgcccgccccaccgcaaacagcgaataaccaaaaaaatgcatgctctatccttggtgccgaataatgagagcctgactgtagtggctacgggtagctatatcggagaaggattcgatcagaagcgtttcgacacgcttctgcttgccgctccggtctcgtttgagggtactctctcgcaatatgtagggcgacttcatcgcgagaatgatggcaagaccgaggttcgtgtctatgattacatcgacgtgaccgtgcctttatccgctgtcatgtatcgaaaacggctgaaggcatacgcaaatcaaggatattcggtaaatcctgaccatactgacaaaatggacatgctcagtgcaaaggcggaagcgttgcgcgcttgcatgacggccgcgacgcagggcgaagatgctgcggatgcgttgctcgacacccggtctgacggattattcgaaggcagcatcgttacagccacgaattatgcagagatactccgcaaggatattgccggttgcgcacgttccctgattatctcggctgaatatgtatcacaacagggactcagcgcaattgacgatgaattgctccgactggccgacaggaaagcgctcatcgaagtttatgtccgtttgccggcgactgctgcggtggcaaccagaacacgaatagaacggaatattaatcggctgcgtgctattgggtgcattgtccggaccgtcgaatcgtgttccgattttgccataatcgatgacggattgatttggtttggaggcatccctttacttggcaatccaaggagtgacgactgtgcacttcgattcaaagatacgaaaatcggcgagaatctagcagatggactgaaacgacggtcgtcctgagtcaatattcagttaagataatcgcgcagtacgagggcgtgattgatatgcgggtccttggcggcatagagcagggtcacgtcgggatgctccgcgcagatgtggcgcagattgtccacggcggcattggcgtcgagctcggcgatgtaacgcatgcggaattccgcgaatttggcggggtcatggccgaaccatttgcgcaggaggggagagggagcgacgtccttcagccacaggtccaacgccgcacgctctttcgtcatgccgcgaggccacaggcgatccaccagcacccgatacccgtccgacgcagtcggctcttcatatatacgtttgattgcaatacccatacgccccatgattggcgtgcgcttgccggaagtcaaggggagacgcgatccatctacccgttcgatttctgggtgttctgtctaaggccttgtgctatgacagctagcgattcagcagcttttggtgatatcgtccaaccggaccgccttgcccctgtcgaaggtgttcatagtgagatcgacgggtttggtcttgatgaacgctgacagcgcggtgtgcggcgggttgtcgatcaagtgggtgatgggggcaatcgcctcctcgacgctgacgcccacaatggcgtaaatggcacgcgccagcagcttcatcagtggcgaatcgaaactgttcaatgcctcattgctgcgcacggcccaagggttgaacaacacatagtggatgcggcctccggtctgctgttggttttccgcgaagagcactcccagcagatcgttcagacgactcgtacagatagtcgcgcaatgctagaacgtgattgatgtgcacccttcattgacggtctctcaattgatctcctgcgattcatgccgtataaggaagttctcgaccaaggcgatcatcgtgtccttccccgcaggtgcggacagcgcaatcatcagcgtcatcgccgccaaggcgttaccctccacaagcaggggagtcatcgtcgcccagtatactgttgccgttcaggaaatacacaaacagtgcggcggcacaacgtttattgccgtcggagaacgggtgatccttgacaacttgatacagcaggttcgcggctttctcccgggtggaacggtacagttcttcgcctccgaacgtctggcagagtcctgcgacgattccttggaacgaaccgttgcgttccctcccgaacagatcggattgcgtgtagaacggcatcgaccggatgaacagcatcgcgtcctcataggtcaagacccactgggactcgtcgcccttgggtatagggacattgcctgtgtcatagtcgttaagcagcacaagactcggcaaatatcgttccaagatctctgcggtgccagcaatttccggttcggtggacctcgatagcaccttgacgacggcgtgaagtgcgtcaagccgcttgtgattgatggtgtaaccatcaacgagatgctgcttcagaactgagttggcccatcgccgggaatagacgccttccttggatttgacgcggtatccgaccgacaggatcatatccaagttgtaatgctcgacttggtatgtcttaccgtcagatgcagttgtcgcaaattttgcgacaactgaaaattcattgagctcttccctcaatgcattgccgatatgcttgccgattgttttgatatcgcggccaaacagcaatgccaattgctgtctgttaagccacaccgtgtcctcgtccaccttcacatcgaggtgcacggtgtggtccgcgctctcgtactgccggtcgagaaccgggtggcagcatcagcatgttctgtacgacgaactcgccagcgaggaaatccagcacactcaccgaaccggtctttccgttgactttcatgaaatcggagttgaacaggttcacggccggcagcatcagtatgaatgacggcggccggatccaaagccgcgaccgccgcacgtttcgcgacaccgagcggccggccaagctcgataaccgtgatccgcttctgttcgccggcgaattcgtccgcaagccggccgcctttgatgaacaggaatcgcctgcacaactcctgcaattcgttgagctgatggctggagatgagcatggcgatgctgcggtcgcgataccgccaaagccccacaagttcaagcaccgggcggattgggaggtgcgggcggcgggtcggacgatcacagtgtgacccgaatacgttcatgaatcatcgaatcacacggcgaggtgaaatcggggatggcgcggcatctgacggaaacgggtatgagacgggccgacgggccgggcggcgaacagggcgaatcgtcgccatcgtgctgatcatggcgttgacggtgggcggcgcgttggtggtacgccatctgggcggcgtgctgcagtcgcagttatcggcgagtgtgtcacggctgaccgcggggcgtgcaccgtatgtgattcacaacatggcgcagcagcagcgggaaaacgactacttcgccttcaagaagcacgtgacggtcaccgggcactaccgtctcgacgcttcgaaagtgccgcagaacgtgctcaaggcttggcggtgacggtcggggcggcgtcggcattgccggctttggctccggctgcatcagctgaatcggtgccggccgcactggcgttagcactatcgtcagcgttgacaccgccggctttggccttggcatcagccgcgctcccgccatcgatcaccagtcgcagatagtcgcggtcggcggacttgcgttgcggcacgaaacgactgatgatggagtccttcttgccgcggtttttcacatacaggaagccgaacacggagaacacgaccgcgccgatgaagttgacgatgagatcctccatcgtgtcgatcagaccgatgtcgagatacccgccaagacctaggtcgtggccgttgaccgcggcctgcgtgatgtcgttgaggtggatcacgtgattggtgtgcgtggggtcgagcatcaccgagctgatggagtgcacgatggcgtccttctgcatgtcgactccgaacatctggtccatgccgaattcgaagaactcccagatcacgccgatggtcatggagaagcagaaggagacgattgccagatacaggggcgaaagctcgaacttcacccgaccggaccggttgagcaggtcgaccagcgagaagccgatcgccgcggcgaggaagccgttcatcgtatgcaacaccgtgtcccagaacgggaagatctcatagaacgaactgatctcgccaagaatctcggacgagaacacgaacaccagcacgatgacctcaagcaccgaaggcagctcgatgcggaaccgcacttggatgaacgccggcgccaacagcagcagcaacgtcaggatgcacaggaacacgttctcatagttcccgttgaagaactggagcacggccatgacgagcaccagtatgcgcagcacggcgtagaccgcgaacgagcttttatgctcgcggatctccatgcgcatggcctggcccatggttttccagcgtgcatgcagcgacggcttgcgcggcttgccttgctgtggctgaccggactggtcgttctgcaggttggcgtatgttgccgtttgcttccgcgattgtttctcgatcatcctcgcctctttctcgcactgttctcgcgccagtatatccgatttacaagaaaaagcattcatctggggattttgagtcaattctgtaatgcattgcagccatgcttttcgtttactagatggattcgttcgtccgcatgaatcgaatttgacccttaagagcatatgatgcataaatacatggaaaggagaagttgatgactccgattgaactctcgacccgtcgtcgagttacaggtctgacctcggacgagttcgctaggctgttcgtttcactgcagcgcgaggtggacggcgaggccgcgcaatggagcgctacggatgtcgaatcctgggagctggttggcccgccggtgactgccgagcagcatctcatcgacacgtttgccgcggccaatgaattcgtatccacgctggccgatcggctttaccacacgattatgccggttacggaggattcggtcatcaccgcatactccgatgacatcacgttctggggttcccatccggatttcggcggtgtgccgcacgcgctctggaacatcgccgcattgcaggcggcggaatgggctcgcaaggagactggcatcacttgcgaactggatgtacgcaagccgttggtgtgaactttggaattcgaaatcgccgcgagaagcgaatgtcgtttttgaacatttgcttgtgctgccgattattgaagtgactcattgagatagtcgcgcagtaccaaggcatgattgacttgcgggtctttggccgcatacagcagcgtcacgtcgggatgctccgcgcagatacagcgcaggtcttcgacggcggtattggcgtcaagttcggcaacgtaccgggcttggaattcagcgaatttcgcggggtcatggccgaaccatttgcgtagcgagggagaaggggagacggccttcagccacaggtccagggccgcgcgctcctttgtcatgccgcgcggccacaggcggtccaccagcacgcggaacccgtccgatgccgccggctcctcatatatgcgcttgattgcaatccccatatattccatgattggcgcgtgctcataaaaagtcaagaggcggcgcacggcaaggagcaatccgttgctgcgggaatgtggagaaccattgagattgcagtctgcatgagccgttgaaattcatttgacggttgccgagttgacggattccattcactcacgctatgtataattattcgtgagctggatatttgcgcgggaacgtcgcaagtaaggctcaccacaactcaagaataatcgaacagtattgtcagcaatttcagtagttccatgcacacatgtactaaggagcaaccatgagtttgatcgatgatgcgaaggatcttgccaaacaggccggcagcaaagttgccgatacggcccgcgatatcaaagacaaggctaccgacaaggcctctgacctggtggacaaggccggggatgcgctcgacgaggccaaagccaaggcggatgtcgccaaagccgaggccgccaagaaggccaccgaggtcaagaacgacgccaaggaggctctccgcgagaatgcggagaactgattcgtggctttgatcccgcaatgagtgcgaggggcggtgacgttcggttatcatcatccgaacgtcaccgcccctcgcggtctattatctgtttgccggccttctattgacctatgcatggggatggacggcattccaatcaaatatggctttttattgtgttgtatctattgttcggatatgcgcaatccgcaatgcaaagaaccggagctggaacccggaacaaaatgcaatcgttcaatcagtgttgattggaccacggcatggatagatcgtcttcgctgtcagacgcttttccgcgtttccgccaccattgttgcaggaagtaaatgccgtaacaggccacgatgaacacgagctcggccacgagcgcgaaccgctgctcggcatcgaaaaccaccagcacgaacgatgcggtgcacaggatgaacgccgcccaggacacatacgggtagccgggcgtacggtatttgagctcgtccacgccatggccggccgccagccaacggcggcggaacacgatctggcagtaggcgatggcgatccataccaccacggcggacaggccggaaagggccaccagcaccagatagacggtcgaggcggccaccacggacgagagcagcgccagaaggcctcccgccatcgcggcgcacaatgcgagcatcggcacgcctcggcggttcgtcttggcgaaccagcgcggaatcatgccctcgttgcccatcgaccataccatgcgcgtggaggcgtacaagcctgaattcgaggcggagagcacggccgtgagcaccacgaagttcatgatgtctcccgcataggggatgcctatgccgttgaacacgagcacgaacgggctttcgcccacgccggccttgcgccacgggatcagcgcgcacatcacggtgattgagccgatgaagaagagcaccagacgccacagggtggtgtggatggctttcggcacggcggtttgcgggtccctcgtctcaccggcggtcacgccgatgagttcggtgccggagaacgcgaagttgacggtcagaatcgtggcgaacaccggcatgaagccgttggggaagacgccatccttgatgagattgccgaacatcggggcatgttggtagccggcgaccgggatgacgccgaagatggcgagcgatccgatgacgatgaacgcgcagatggcgaacaccttgatggaggcgaaccagaactccgcctcggcgaagaaacgcaccgacaaggcgttcagggtgaagatgagcgtgatgcacgccgcgctccacgcccatgtgggactgttcgggaaccagcgctgcatgagcagcccggcggcggtgaactcggatccgagcgccaccgtccatgtgagccagtactggatcgcgatcacgaagccggtgccagggccgatgaacttctcggcatacacatggaaggagccggtcaccggcatggccacggacagttcgccgagcgtgagcatgaccaggtagacgatcagcgcgccgatgccatacgccagaatggtgccgatggggcccgcctgctggatggtgtatccggagctcaggaacaggccggtgccgatcacgccgcccaacgagatcatctgcagatggcgggattccatgccgcgcttcaggttggtatgcagcgcgtgctcgcctttgccgtcatgtggcgactcggactggctgatttgcgctggttggttcacctgttccggctggttttgacggccatccgtctgaatctgcggttcctgctgcgaggacggcgactgtgccgccgtgtcggtgtcgggctgactcatgtttctctctttgccatgcgtgcgttccataggcgtcgtcgtgacggcccggaatagtatacccgtactgaggatatagctgcgctgcatgatgctgagtcaaaatcagcttcaaggggctgatttggcgtttgccggaggtctacttccgtttcaaggggctgttcaactggcggaacgcagatagaaatggcattgttctatcactattccgccgtttttaaccagtggctactttggcatcagccccttgaaacggaagtagatgttccgcaaagtcaaaatcagccccttgaaacggagataggcactcgcagcggctacttcaccttctggatacgcagcacgaacacggcagcgcacacggccatgacgatggagatggcgaacgccggcgtgtaggtgccggtcgtggtcttgaccacggaggtgatggtgggaccgactgcttggccgagcgtggtggccaagctgaggatgccgaggtccttgccagcctcttccttgttcggcaacacgtcgacgttgagtgcctggtcgatggccgagtacacgccatagccgaagccggcgatgcccgcgtacaggtacatgcccgtgacactcggcatgatccacggggtgcggcgtcccatcttggaacgcgtgtggtcggagaggttgccgaacacgaggttggaaaccaggcccacgatggcggtgaccgagttcaacgtgccgactgccgcatccgggttagcgacgccgatgtccttgaacagctggggagcaacacggtggccaccacgtacaggccgctgctccacagaagaccgaaagccagaaacccgacagtaaatcgaatgttgtttgtttttccatgttctcggacatgttcgatgacctcctatggttttcgttgacgttttggttattttgtcgaccatctcatattggtggaattccgggctttttgggcgtgctgttgcctttgttgcgccgttgcgatatcggtcttgtgaacggttaatctactcaggactcaaaatacattccagcccgcggcgcgttcggtgttgcaggacagtaattcgaggatgagcgactttgatatgcagtgatacgtcagtggcggagcgctacaagtcagcgctacaagtcatggtggatgagatgtgattttcgtcgaattggtcagtgcttttggacaataccgaattggtgtcgaatcgggtatatactgggaccgtcttccaggcggaaatgtggttcagaaggaatgggtagaacatcatgaacggcattgcacttggcacccggctggggtttgccgtatgcgtgctgctgatgatgccagttcttctgcccgtggcctgtgcggagtcgttgcggcagcgtttggtcggtgcgtggacgatggctgcctcgcgtgggcgggtactgtcgcgtccgatgccgatggcggacatcatcgtgttgatgacgttgttgttgtcgttgagtgccactggctgctggattgccggcggtgattcgcagactgccttggccgccatggtcttcgtcgccacggtgacggctgtatgtgcgtgctgcgcggtcgtgctgttgtcgttcgtaggttcggccggccgccgaccgttgcccgccagcttccgcttcgatgcgacggtgatgaacgccgtccgctcatgggcccgcccgcaatggatgccacgctggccccgttacacgctccccgattcccgaatctgatttagcttctcttttcagctctcatcgttgcgccccacggtctaacgcaattgtgttgtttaggcgacatgtggatacgcatttatgcgatgttcttgtttccccctaatttggttcccctctctgaggggagctgtccgcgaagcggactgaggggagttcccagctgttgccgtaccagattgcagttgcttgaactcggaaacacatcccagattcgtcaattcatcaggaatcccaatgaacttcatcaatatcctcaaccacatcctgcgacccctagaatgggttgtcgcccaactgctcaccctgtttcaccacgccctggtcacgtttggcatgactgctggccccagccccgcgtggggcatcgcgatcatgtgcctcgtgctcgtcatccgcatctgtctgctgccgctcttcctttcccaaatgcgtgcgatgcagcggatacaggtgctccaaccgcagattcaacgcatccagcacaagtacgccacgcgcaaggacccgcgttccaaagaagccatgcaacgtgaaatcatggccttgcagcagcgacataacgccaatccgcttggctcctgcctgtcttcgctgatccaagcgcctattctgtgctcgctgttctacacgctgcaatccctgcccgcaatcgccgatgggaatgcggaaccgttgggcggcatcgaccacaccatggcgggcgacatcgaatcatcgtccatattcggcgtacgcatcgccgactcgttcggcacggttgcctcgccgcagtcacgcatcatcatcggcgtggccgtggcgttgatgtgcctgacgttgttcgtgatccagtggatgcttattcaccgcaatacgtcgaaagatgctatggtctcgccgcaattccgtgtgcagaagatgaccgtgttcgtctttcccgccatttacgtggtgtcgggcgccacgttgccgttcggcgtgctgctctattggttgaccaacaatctgtggaatctcggccagacgctctgtcaattgcgatggttccccacgcccggttcggcggcaggcgagcgcaaggtcaggcgcgactgcgagcaggacaaccgtcgccgtgccgcagccggtctgccatccctagaggaggagcgtgcgatggccgcccgcgaggaggcgaaagcccgacgcgagcgcgaaaagtcggccgccagccgcaaccgcaaacaacacaaaaccccatacctcgccaagcgctcaatcgtgaaacggtaacgcactactcgtctactggctcccctctggaggctgagccgttaagcaaacagcgaagctgtttgtaagcgagggcgaggcgacagccgagctatgtagcgcggtcgccagaccgtcttcattacggctgaactggcgccgtagatgactgaggggagttttgctaaggtcgcatgatgttgtcacattgtttttcaatggttttcacttggcgtgtattgactgattacattggagtacaacgcaattgacctatacggataaatttcgcagctcaaagatggggaatagtgtgcgtgctgtgcgatgctccgaacgagcatcttgatgttctgcacgaagcatgaggttcctgccccaacgatccggcatgcagtcttgaaagatgcgatgcatcgcattatgctcggccgggaacgttccgggg

SEQ ID NO: 47 - DNA, 20725 bp, Unknown
  R30_18m  MAG No. k141_17800
aaccccatcaccatctactttttaggaaacatcttcgctgagacctataagttgatccgagagtacattctgctgttggggagcaggattggcgtttattttattcctcgtccgccctgttctggcgcagctgctcaatgagatcgatgacggtttcgagttcaggagtcacatcgtctgaaggacgaacgttatcctcttcgtcgtccatctcatcatcctcatcatcatcggcaacggtgttgttgaggatgtcctcttcggtggcctcgtcgtcagcatcagacttggactcgtcgctggaatcagctgcatcaacatccacaacggaatcggatgcgttctgtgcaacagactcatcaccggcagactgggattgcgaggtcccgtcgcctgccgcctcctcagcgggctcagtatcgacggcgttcccgtcaacagtcttctgtgcttcgatatcatcaccggcaggctcgcctgtcttgtcggtttcgccttcggcctcgtcctgggcaacctgctcctgcttgcacggacggttggcaaccacgtcgatatgcagatcgtcaaaggctggcttggactgcacccacagctggcttggctcgggaggttcgatttcggaatgctcaccgcagccgtggtccagggagaccacgcggccgtcatccggactccacttgttggcgcacacgccgaacatacggtcgagttcgcccgcgagcggcacgaagaaaccacaggtggagcacaggttgccttcggcggttttggtgctcaacgctttggggcctcgcggaccttcataccagcgcttggcagcctgcgcacgacccaacgaggtcagcacgtgacggcgggtcagtcggaaggtctcgacggcatcgttgacatcctgcagcgaggattcctcgacttcgccttcctcgatgcgctcgtcatccggatcggtaccgatcgaatcggtgggagccagatctgtgggctcaaggcgatctttccaaggaatccacttgggcggcatcaacgcgccctcagtggggatcaaggaggattcgttgacggtccaggagtcgatctcctcgtcgtgatacagcgtcaccgaccattgccatccttcgtagccacggatattcgcggcgaagcggaagtcagtgacgtgatcctcaagatcatatgaggtaacgaaatcccccacctgatcgctctcgtcggccacttcgagcagcacggcgcgcgcgatggcgtgagggtccggtgtcacgatggtttcggtggtatcagtcatagatcagatcagtcctgtacatcgaattgatccgccaccgcacgcagcaacgtggccagctttttgctgtcggcagcagatgggtaacggtgacggcgcaacgtattgccggccgcatcaagcatcttgataaggtcctcgcagatggcggccatgtcatccgccttcgggcgggtggccttgaccaagctgggagtggaggcgatcaggcgaacatccatggcctgcggcccacgacggccatccaccacggaatactccaccttggcccccttgcgcaacgtggtggcgccagtgggtagggcctgagccggcaggaacacgtccttgccttcctcactggtgatgaagccataacccttggctgcgtcaaaccaacgaactcgaccggtgggcattgcgaaccttccttaatcctcaatggaaatagtaaaccgaaggtacagtttacctcacagggcttgacctcacgctttgggctgagtcgcctgagtcttacgctcagagctgaaccaagaagtcttctgtttggcgtccttggttttgccggtgggccgcttgggctcaggagcgacgatctgctcaatcggcagcaccacggtgaaggtcaggcctcccccatcggtgccggtggcgcagataaagccgtgatgtgctttgaccacggattgcgcgatggccatgcccaaaccggtaccacccttttcgcgggcacgggatgggtccgcggtgtagaagcgttcgaaaatcttcgagcgcgattcaggcggcacgccggggccatggtccacgaaacgcaatacggcgtatcgatagccggtctgcatcgaggcacctacttcggcggcgtcgatgaaccgccgcattgacgcgtcgctggcgggcatgcgagcgagctgtcttggatcgatggcggccggcatcacaccgagcgcggcctcggcaggcgaatcggcaggcgtgtagcggtggatgttgcccacgatgttggtcaccacctggcgcagtcgagaggcgtcgccgggcagcacgacctcgggccaatcgccttcggcaaggttgaattcggcgggatggttcaaatcgcgcgccggttcgagggaaatctgcatgcggcgaacggcacggtccgggtcgagcgcatgcaagtcgtcgacggcgtcggtgaccagcgacgagagtttcaccgtgccggtcacatcgatgccgcgcccctcatcgagacgggccaaagacagcagatcctcaacaagaacagtcatgcgctggctggaccgttcgatatgttcgatggactcgtccgcacgctccaaggcaccaggcatatcgcgctgcatcttatacagctccgcatagccatggatggcggccaacggggtgcgcagctcatggctggcgtcggagacgaaccgtttcatcttgtcggtggtctcctcctgttcatggaaactggattctattcgggtgagcatggagttcagcgaggcggccagggagccgacctcggtgttttccggcgcggaaggaatacgttggctcaggtcgccggcggcaatctttgcagcggttttctcgatgcgcttcagcggcgtcatcgtgtgctggatgatcagcgtggacagggagccgccgagcagcaccacggcgatgccgaccacaatgcagtatcgggtgagtgtgttgacggtgtcgatctggtcggccagtgacaagccgatgtacaccacggcacggtccttgccgttttgctggaaggtcaccggcagaatacgccatggtgccctcgccgtgacgatggcggcatggttggcattgacagtggggttggccagtaccttggcgatggtgtcagaggaattggagtttccgttggccggatcgttctggctgtccgcactgtcggactgcaccgtgatgatctgcttggccactgcctgcgtagtgaatgcctggccgagcgtgatgccactggtatcaccataggtaggaagaatcggcaccgatacgataccgtcctgcatctgcggcatcagcggggtcacgaccagaggattgccctctttgtctttggtgccgtcggtatattgaatctgcagaaagtacgagttcggccccgatgagtcattttttgacagcagatcgatattgttgaccaccagctggctttgcgagcttaactgggtgtcggttttctgcagcatgtagttgttcaccaacgcgcggatggagaaggaaatcaccgacacgccgataagcagcacggcgatggtgcaggccaccagcttgctgctcaacgagatacggtcgatatgccgcatcagtatgtttttcttacactcgcgccgctcttggaaatgggcggcgaacggcggcattgcaggcatgggattcgtgttcggggcggcgttcggcgtgctgctcggcggtacgccgcctgactgcttatcggggatactcatgagattgcgatgcgttatggatggggcgactagttcttcggttctcgaatcatgtatccgataccgcgcttggtttcgatcagcggagtcaccttgcgcttgccgccttcgccgtcgtcgacctcgatgccgtcgactttcttgcgcaggtaggagatgtacgattcgacgatggctgcgtcgccgccccagtcgtattgccagacatggtcgagaatctgtgccttggacagtactcggccctcattgtccatcaggtagcgaagcagcttgtattcggtggggctcaggtcaaccggctgccctgcacgggtcacatcgtgggagtcctcgttgatttccaagtcggcgacgcgaataatcgggtcgtcttccacctgttcgcgggtacggcgcagaatggcgcggatgcgagccacgacttcctcgaggctgaacggcttggtgacgtaatcgtcaccgccgacggtcaggcccatgatcttgtcttgggtgtcgtcacgagcggtgaggaacagcacaggggcgttaatgccttcctggcggatgcggcgggtgacggtaaatccatcgatgtcaggcagcatgacgtccaacacgatgagatcaggctgcactttttcgataacctcaatggcttcggaaccggaagcggcggtgtttacctcgaatccggcgaagtgtagggaagcgaccagcagttctcggatggacggctcgtcgtcgacaacaacaatcgatgcttcaataggcttactcatgcttcctagagtgtcgcgctcttctgggcgtttcctgaatgtcatcttggagttcggccttggaatccttcttgatctccttgcgccgacgaatcaccaccatgaccacgatgatgatgaccagcgccaccaacaccacacccatgatgattatgcctacggtcaccgtggatgatgaggtggaggcttttttggatttcacgatttgatccatcattgccgttgccgcgccagaccagctcggcgggttttccagtaacggctgctgtgcggcttcggatagcttatcgacggttttgttatcgagaagccacttatcggagttcttggacacgacgaccaccaggttgccgtcattcgaggccacggcaagcatcactgtgttcggcttgggattcatggactccatcacggttgccgcccagtcttccggtttctgttgactattgaaactggaaagatacagcagatgcacgtgtacaccggtttccttctcggttttggcgatggcatccgtgacttcggccgcatgggagcccaggagattttccgtatccgtgatgttctcggtgatggtcacgccgctgtcggtgctgctgctggagctgtcagagctgtcgcccgagttatccccataggcatttgcggttatccacattgcgttcatcgctactgcagcaagggcgcaaatggcacaaacaagccattttcggaccatattcccgaaggccgaacaggacggctccgaagataggaccacaatagttgtttttccgtcttcccgattcgttgttgacatatcctccaccttagcggccggtattggcaagcggccgccatacataccattaaccctctagaaaaggagcaacgatgccccaatatcaggtagattccgagcgaatccaatcatcctcggccgcagtggccacttcgatctcgcagatcaggcaggccgtgggcggcatgtacaccaatctcaatgccttgcaggacgcatggcgaggttcggcggccacccagttcaccgcggtagccgaacagtggcgtgcggcccaacagcagatggaggcctcactcgagtccatccaacgctcgctgacgcaagcctccaccgtgtacgctgacgccgaaatccaagcttcgcgcctgtttgccagctagtttcttggctctcctccctgaggggagctcgatcgcgaagcgaaactgagggagtatccctacaccgcagctccccttagtctcactgcgttcgacagctcccctcaaagaggggagccagaatacaaaaaaggggactcccgaaggagtcccctttcagctcaatcagctagcgatcgcttgcggatcagtagcccatgtcggcaccggcggccggggcagcaggcttcggctccggcttgttggcaacgacggcctcggtggtcaggaacagaccagcgatggaggcggcgttctgcagagcggagcgggtcaccttgaccgggtcggtcacaccggcggccagcaggtcttcgtaggtgtcggtggctgcgttgaagccttcgccatcaggcagggaacggacggtgttgatgaccacgtcaccggacacgccggcgttctcggcgatctgcttgatcggggcctcgatggcgcggaacacgatggcggcaccggtagcctcttcgccggtcagggaggcgacggcctcggccttctcggccttggcagcagcctgaacgagggccacgccaccgccgggcagcaggccttcctcgatggcggccttggcgttacgcacggcatcttcgatgcggtgcttgcgctccttggcctcaacctcggtggcagcgccgaccttgatgacagccacgccgccggccagcttggccagacgctcctgcagcttctcacggtcgtaatcggagtcggtgttctcgatctcagcgcggatctgggccacgcgagcgtcgatgtcttccttggagccagcgccctgaacgatggtggtctcgtccttggagacgatgaccttcttggcgtggccgagcacggaggtgtcgacggactcgagcttcaggcccagttcgtcggagacaacctgagcaccggtcaggatggccatatcctgcagcatggccttgcgacggtcgccaaagcccggggccttgacggcgcaggacttgaaggtgccacggatgttgttcaggatcagggtcggcagtgcttcgccgtcgacgtcctcagcgatgatcagcagcggcttgccggtcttcatgaccagctcggccacgtgcacgatgtcctgctgggaggagaccttgccggaggtcagcagaatgtacggatcttcgagcactgcggtctggtcgtcagcgttggtgacgaagtacggggcgatgtagcccttgtcgaaacgcatgccctcggtgaagtcgaggtccaggccgaagcggttgttgtcttcaacggtcacaacgccgtcctggccgaccttgtccagagcctcagcgatcttctcgccgacctcagggtcggcggcggagatggtggcggtagcagcgatctggtccttggtctcgacgtccttggcggcggcgacgagttccttgacgatgacctcggtggccttctcgatgccgcgacgcagggcgatcgggttggagccggcgaccacgttcttcagaccctcgtgaaccagggactgagcaagcacggtcgcagtggtggtgccgtcaccggcgacgtcgtcggtcttcttggcgacttccttgaccagctcggcgccgatgcgctcgtacgggtcttcaaggtcgatttccttggcgatggacacaccatcgttggtgatggtcggagcgccgtaggtcttgtcgagcacgacgttgcggcccttcgggcccaaggtgaccttgacggtgttggcgagcttgtcaaggccctccagcatgccctgacgggcttcctcatcataagagatgatctttgccatggttgcgtattcctccaaatggctaggtataccggttatcactcgcaagcgtcgagtcgtgacgaccagccgtcagctgccgattatcactctcgacctccgagtgctaacccagacattagcactcgcgaccgccgagtgccaacatcatcggcggcgattgcgctttgggcatgaaaaggccccaaccgtcgaaacggtcagggccttcaatgcacatccttgcgtgcgtgttgctcactcggagcgggcttcacccgaagacagcttgacaacatcctttgcctgcgtgcctttgccggacgaagcgggcgtatactccacgcgatcgccctcgtacagcatcttgaacttattggtgctgccgtcgtccttgatttccgcgtagtgcacgaaaacgtcctcgctgccgtcgtccggctggatgaacccgaaccccttcttggcaaggaagaacttcacggtaccttgtgccatatctgatctttcctttgttcccttaggcgtcgcgacacaaaacctatagggaacgtagaaagaaccgcatcgcgctcccctacctcgcgactagatgacgattgtacagtgacgagggaacaatcccaaccgcagtggcacattttcggtacgaattatttcatagacgtgagaacgctcacagttttcgatgtattccacgccgatatcaggggcgcatcaacaacgctagttgagcagcaccaccgtaatgggaacggcgagtccttgcacctgctccacagccgaaatgccaagcgtggtcgccacatcttcggcggtggctttatcggcttcattctgataccataccacggaagaagccggcaatgtgccgcgcggattggtcgcctcgacgctggtgtaaccggcggtctgcagcacatcggcctgctgacctgcatatccttggattcctgtggcgttgaccacacgcacctgcgtggccttattcacagtcgcggtggctccggactgctgagactgctgatcggagtcttgattctcattcgaggatgtcgtatcactgttggtatcggattttgccgaatccgaagtcgagtccttggacggatcggtcgaagtggacgaggaatcatccttggtgctgtttttggtctcagccttgctggacgaatcggacttggaagcagtcccggacgtggtcgcagtctgggacgatcctcctattgcattcctgtattccccggaaatccatgcccagaccccgacaccgcacagtgcggccaccagaataacgacgatgaacgggcagaggcgggccactgccgaacgagcgccacggtgaactcccaccggtcccttcggaggattgtcgaaggaatccggttcataggattcgtaggtcatcatgtcgcgtgccataatcgccctttcttcctgtcaaaactacccatgagtgtaatcggcaaacaactcatcagtccaccacaccacgcctcgtgcaccggatatgcacgtttgactacagtggtgagtcatgatcaaaccattgagcgaactggtagagccggggtgggcccatgccttggccgacgtggagcccgccatccaccatatgggcgattttcttcgtgcggaaaacgccgccgggcgcccgtggctgccggcaagccacaatattctgcgcgcgttcaccatcccgttcgattccatcaaggtgctgattgtcggccaggacccctacccgaccccgggtcacccggtgggtttgagcttctgcgtggcgccgaatgttcacccgctgccgaaaagcctggtcaatatttataaggaattggttgacgaccttggggtgcccatgcccaccaacggcgatctgacaccgtggacggaacgtgaggtgatgttgctcaacagatgtctgaccgtcggcgtcgggcggccgaattcgcatcagggcaaaggctgggaggaagtcaccgaggccgcgattcgtgcgttgaacgcgcgcacggacgccgacggcaagcccaagccgctggtggcgattctctgggggcgtaatgcgcaaagcctcgagccattgctgaccaatgccttcattatcaaatcgcctcatccgagtccgctgtccgcttcccgcggattcttcggctccaaaccattctccagagccaatcaagccctagtcaccatgggtgccgacccggtggattggactctttagacagaccaacagtcattgtgagtagttacagtgagggcatgactttgttccccacgcaaccgaacataccttcgccgaccaccgccgcacgaccggtcaccgttcccgcgcccggcgtatcggctccgctgggtgccgatgacgccaaacgcgcacgtatcctggccgacgccattcgggcgaggttcgcccagacactggtgggtcaggataatctacgcgaatcgcttatcgtgaccttggtggccggcgggcatattcttatcgaatccgtgccgggcttggccaagaccacggccgcccagacgctcgccacctgcgtatccggctcgttcaaacgcgtgcagtgcactcctgatctcatgccatccgatctggtgggcacgcaggtcttcgattttgcgtcgcagaagttcaccacgcagatcggcccgattcacgccaatttcgtactgctggacgagatcaaccgttcgaatgccaaaacccagtccgccatgcttgaggccatggccgagggtgccacgaccatcggcgggcagcgtatcgccttgcccaagccgttcatggtgatcgccaccgagaatccgattgaggaggagggcacgttcaacctgcccgaagcccagatggatcgtttcatgatgaaggccgtcatgacctatccttcgcccgacgaagaggctcgcatgctggccatgctcacccaccgtggctccgatatgatcggtcccgacaccatcaccggcgaacgcatttccgtgtccgacgttgattttctgcgcaaggcggcacgccgcgtgcatgtttccgacgcgatcatgcgttatgcggtcgatatcaccgccacgtcacgaggtgccggctcccgccccatcaagggactgtcgtccttggtgcgtttgggtgcctcgccgcgcgccaccatcgccttgacccgtatcggccaggcgaaggcgttgctgtccgggcgcgactatgtggtgcccgaggacctcaaggcgttcgctcatgaggtgctgcgccaccgtattatgctgacgttcgaggcactggccgatggcgtggtcagcgatcagatcgtcgacaagatcgtcgaaacggttcctgttccgtgagttccgattccgttcgcaagaaaatcgaggcccttggcactcagctgagcctgcctaccgtaaggaaggctttgggcgtgctggagggcgaacacgcatccgggcgtcgtggcggcagcggcgatgcgatggatgtgcatgcctatgagccaggcgacgaatcccgtcttatcgattggaagaccagcgcccgccaaggccgccccatggtggtcgagcgcgagcgcctgtcgacgtcacgggtctggttgctgatggacgttggcctggagatgactggcgtatgcccttccggagaacgcgcatggcaggttgccgccaatgcgctgcgtatgttcgccgcactgtcgttgcgccggtcggacgatatttcgctggtgttcggcgatgagtccagcatcacccgcgtgccgttcaacggtgggttcgcgcagttcgaacgcacgctggacaaggcgcttgatcgtgattgggatcatcaccgtaatatcgacgcgctactggaatatgcgcgccgtatcaaggatcgtgaggcattgatcgtattggccaccgatgagcatgcgatggaggagcggcatatcaccacgatccgtcgtattacccgcacccatccgatggtgctgatcgatgtggcgacgatgaatccgttcaaggccgtctcatcccgccacgctcccgccgacggcttgagtgcacggcgtgtgccggcattcctgcgcaacgccaaggcagcggccgaggtcgatactcatcgcgcgtatatggccgcggctttggaacaggagctcacccgtgccggttcccatatcattcgagccgcatccagcgaatccatgttcgatcgtttcgtcgccctggtgtcccgggcattggcccgcaccacacgcaatagactgggcactgcacccgaactggtcggactgactttggcgggtgatctatgatgcacagcatgttccccatcatcccgctcgccactgatcccggcgatctcaggcccgtggagtcgttggccttgaccactcccctggtgatggccatcatcgcatgcctgttgctggcggtaggtctgatcgcgttgatcatcatgctggctcgccccgcacgcaaacctcggaacagcgaccgtgcgcgtggcactcatagcaatgccagctccaaggccgagtggcgtgcccgcatcgacgatgtggtggcccgtcatgaatccggagcactgccccggcatgaggctttcgtcgaattggccgtcatcgcccgtgatttcgccggtgccgcatcaggcaaggagcttagttccagtacgctgaccgatttggcgtacctgaatcgcacgcccgcgaatcgccaaggattggacgcattgaagcagaccattagcgcgttgtatccaccggaatttgccgatgatgcccgcaaccgaatcgcccagacgaccagcgtgcagcaggccgccgaatgggtggcgaatctggtggaaaggtggcgttcatgatgctggcatggcattggccttgggccgctctggccggcgtcttggcagcgctggcgattatcgtgctgattgtcgtgttcgcccgccgtaacgccgccgacgacacccctgtattctcgatggacgacgatctcaataccgagcacgcttcccgtctgttccgtcaatggcgcgctttgggccgtctcgccatcagcgtgctggtgcttgcgctggcgctggccattgtgctggtggctcgccccagccaagtggatgccggtgacgaacgcgcttccagccgagatatcgtcctgtgtctggatgtgtcgggatccacgctcccctatgatcgcgaggtcatcgatacctatttggaactggtcaagcatttcgagggggaacgtatcggtttgagtatcttcaactcgacctcacgcacggtgttcccgctgaccgacgactacgaactggtcaccaaacagttgacctccgccagcaaggcgctgaaaggcgtcgagtcgcaggatgacatcgataagatgtccgatgccgaatatcaggacatcgccaattggctcgaaggcacgcagaaccgcaaggacgccacctccttgattggcgacggcgtggtgtcttgcgcggcgatgctccccggtttcgcttatggcgaagccaatcatgcgaatgccgaccgtcagcgtgcggcatccatcgtgctggccaccgacaacgtcgtgtcaggcaaacccacctattcgctgaccgaagcgttggacttgacccagcagaccaaaatcaccgtggacggcctgtattccgggccgaaagccagtgaatcggaccaaaccacaacggatatgaagtccgcgatcgagtcgcatggaggcatcttcctcacccaatcgaacggcgcgtcgatagatgagctggtacgggatattcagtcgcgtagagatacggatgtggagaacaaggcgaaatcctcaatggtggacgctcccagtctgtggacgcttgctctggccgtgatactcattatctggatcgtatgtgcatggaggttgaggcgatgaacggattcaccttctcccccgccttgggctgggtcgccgacggactgctggcggccgggctcgccgtactggccattctcgaaatcgtattgtttgttcgccgccgtgcttccagtgacgagaccgtgtgggcttgcatacgacgtacgcttatgctgctcattgtcgcggtgatggtactgactcccagcgtggtatcgtctaccacctcacaggtcatcaatgccaccgacgtcatcgtggcggtggataccaccgggtcgatggcggtggctgatgccacatacgggtccgagaagaccattacccgcatcgatgccgcgcgtcaggccgtgcatgatgtgaccgctgcttacccggacgccagtttcgcggcgttacggttcggtgcttcgggaacacttgatgtgccgctgaccccggatgcgccggccatcgataattgggccaacacgttggcggtggaagccacatccgtgtcggcgggatccagtctggatgctccgatcgatcaattgctgctgaccgcgaagtcgattcgtgaagcgcacccggatgatgcgattgtgctgtacctcatcactgacggcgaacagacctcgaatgtgacgcgtcgtacgttctcgtcactgcgacagtatctcaatgatgggtttaccgtgggcgtcggctcgaccgagggcggcaagattcccgtcatcgccgatggcgtcagtgccggcgattccaacaccacggaccactgggtggtcgacccggataccggcgaacccggcatctccaagatggatgagaagaaccttaaagacattgccgacgagatcagtggcacgtatgtggccgtggacgcttcacagactttggcggattcggtttcggccaggtcgtcgaagcagtggcgcatgaccaccacggtcaaggagcgcacacgcaccacgccggtggtatggccgttggccattgcgttggcgatattgcttgccatggaagtcggtgcatggatcgcgacctcaaggaggctgctgtgaggaacagtaacgaaatccacgagaacgatggctcggcgaatattcggatgcgggcgaaatgcccgctttgggcacgtatcgtcctggcttgtggcaccgtattgctgctgctggttgccggcgtggcggcagtaaacctgtccgcttcgattacgttcaatcaggccaccgcatcattgaatgccaatatcaaagcggctcaggatgagtcgactgatatcaccacgctcaaggcgcaacagcagcagaccgatgcgcaattcgccgaggccgggcgaatgcgtacgcttctgttgccgcaagtcaaggacgccatcgacaccaatgcttcgatttcttccgagctgacgaagatcaccctgaaacaggccgaggcgcagaacagcggttccgattccgggcaagcccagtcggcgcagcaatccgagagttcctcagccaatgccaaaaagggcggcgcgttgaccgacgagcagaagaagcaggtcgaggagctgatgaaggccaatcagcaatccaccgatacccagtcgaacaccacccaatccgagcagaaggcgacgcagaacaagggtaccggggccaccaagccgtggtaagcagtcgttcacggttgctctttttctcacatcctcacgggtcatggccttatcgcggctgtttcccggtttcggctgtcggctttggcgtttgtctgatcccgatagcccatggctgatccaaggtgtgcccaaacaggctatttgtggataatcgttacggctatacacaacacttgtgaataacttcgctcaaaatcggcaagctagaaccacattggtcgttccggctggacaagcatgagtcctgtccttttagctggatatatgaatacctacaccagcaccccagcacccatcgatcccgccggcggctttgccggcaatacggtgacgccgttcgattacggcacttgcccttgccatgcggcggtacagcgtagtcgcgacctcgtgtccgtccaacgtgcggccacactggcgcaatcggaccagatggcggtggccgtgaaccgctcccgcaacatcgtgtggaccggtaaagccgccgacctattccgatcgcggctcagtcgcaccgcacagtattcggccagtctcgcgcaagacatggagaccacccaccgattggcttgggggtcatcatgagcgagcacgattactggcaggtggaatcgtccgtttacggcggagtgggatatgcgccagccactcttgaagaatatgccgccatagccaaggctctcgatgacgaggcggcaggatttgcggccatagccacggcttgggaatcggccgcattacagttgcagtcacatcggcatagtgcgccgatgtgcgtcaccttgcagtcgggcgatccgagcgccgttgttcccggccatgtcactgcaccatatgccgcgctgggcaatcggtgttatgaccatgcaacggcatgtcagcggttgagcgatgatctgcgtggcgcggccgatctgctgattcgcgcacactctctgtattctcaggcggagatgacggctcggcgcatgtttaccgaattattgcaggccggtacacaggccaaaccgggatatgccgcggtgggtgttgccgctgtggcggcgggcggctttctggccggctgggctattgacggcaaaccgaacccagcatggatgtccacgttcacctatccgttccaggaaggagtgctcagcggcgcgggcggaatcattggcggcgtacctattggcaagagcattgcgcacaccgatgaggtcaacaaggctgcggggaaaatcgccaatttctccggcccggcgaaagacgtcgtccaaggcaatcatctgaacgtgcgcgaggtgcaggcgaatgccgacgtcgtccgtgcaagcagatcggtggccgagtcaatggagaatctgcgcaggctcgccgaagaacggctcggcaaaatcgagctgaacagcggactcgaatatgggaccatcgccattcaacgctatgaacgggctgatggaaccaactcctggctggtcaccatcccgggtaccgatggacaacctgactcaccattcggctgggcgcagaacgtggaactgatgagcgccgatcaggagcgccgcaggaaagcggacagcgctcgcacggttgccgaggcgatgcgtcaggctggtatcggcaaggacgagcccgtggcactgatcggccactcccaaggtggcatcgttgccgccacgcttgcctcggattgggcagaggaatataccatcgagcatgtggtgacagccggatcgccggtggccaatcatccgattccgcaacgcacgtgggtcaccagcgtggaaatcgatgatgaactggtcgccgcgctggatggtgccgccaacccggtcaccgataattggctcaccgtgcaagggcatgtatcgcccgcgcccgcggcaacaccatccacagtgcattcggacgtctcatgcactcccggcgcaacacccatcaacggtctgaccccatatgacgccgcatccgtggctggttcgaccaacggcagggagttgtcgcattggctcaaataccatcaggccgcttatcagaacgccaccgacctcggctcccccgccgtgcagcgccacgaagcgcattttcaggaagtcatcaacggagaactcaaggaaacccgctattaccaaggccgcatgacccagtccacaaccattgctcccggcgagcgcaccaccgagttcagcacgttcggcggttaaaagtaaataccacacttgacagagttgtcaagaaaggagttaacaatataatgacgagtaggagatggctcatcaaactgatgaagcaagcggcgaaacgcaagaatattacgtttgagagtatcaggcaaagagggagtcatgagatattccaactcgatggactcgtgattcccatcccacgccataacgaaatcgacaacgacctcgcgaacatcatttgtaaggaagcagaagccaaactcgggaaaggctggtatcaacagtgaaaacatatcaggtcatcgttcgtcctggcgaaaaatactggattcttgagattcccggtatcggtttcacgcaggcaagaacaacagcagagattgaaagtatggcacgcgaccttatcaccgtcatgacgcaagatgctgatttcgcactcaccatagagacaaaactgccgcaatccgtacaagagcaccttgatgaagctcggcgactgcgcaaggaagaagcggaatgcagatcgaacgcagcgcgggaaactcgcgccgcggcacaagaactatatggcatgggtctcgccctacagcaaataggcgatatactcggggtctcacggcaacgggcacatcaacttgtcaatgctgtcaatgcttagcatcaatcggctacccccacaatgcaatcaccgcagagacgcggctagcgccactttcccgggattgttgcgctaatgcacccacatggccctctattggcgttactttccaaggaatgttgcgctagcatgcccgtattcccctctattagcgctactttcccgggaatgttgcgccgcttttttatcaagagacgggtattggcgcatcggctacggactctctagcgatatacatggtatcgatatgattaagattatcgtcagaagacccgttttcaatcatctctagaatctttcgcgcgctgttcactcccatttgttctacctgctgagaaatcgaagatatccgaggagtaatcaattcgaatacttccacatcgtcgaatgagacgatggaaatatctataccaacattcagatgcagagtatgcatcgcccccatgcctgctaaggtcaaaggagaattagcgaaaaataacgcactcaccccttgtgaatacaacctactaatttcttcacacaccacatctctcgacccgtatggatcataattggcaaaatataaattgctctctccgaacaatgctgaggcaaaacgtcgaaagacacgctcacgctcaataaataccggggaaatggcagacggtccgctaacaaatccgacttttttatgtccatgatcacgaatatcaattaacgcttccagcaatccttgctccggattcgaagcaatgagaggaaccccctgcactccggccgcaggacgatcaacaaaaatcactggcagcccatgatgtagaagagattccagtgcctcactatcaggaccttgcggcacgataatagctccatcgatatgctcagccaacaatcgacgcagtaacatgtcttgctgttgcaaatcatttgaaaatgatccaattaatgtcgaatatccagatgcaaataatgtgctctgcactgcatgagccaaattcgcaaaaaactcattacgaatatccgaaaccagaaaacctaccgtatacgaacgcgatgaacgcattgtacgggccatcgaactaggaatataatcaagctctttaatggccgcttcaatcttcttccgcgtgggctcagagatacgtcccttaccgttaatcacctgagaaacggtggagacagagactcccgcgcattttgccacgtcgctgattgttatgtaggacctctccatagcacccgactatacgtgaagacaccgattcttgcacattcagtaattggcccttcgctgtttggtgtgggtggggaccggtcaggtggtgacggttcgcaggtcgagtttgccgcaggtcaggtagatcatcgtggagaagtactccatgttgcgggagccccgggcccgggtcttgacgtgctggatgatgctgttgaggccttcggggatcgcgttggtgtgccggtggtcgaagtaggcgagaatgtcgtcccagtggcggtggaactggcgggcgagggttttcatgggttccaggcgtgacctcatcatccatgagcacaggtgtttgagaccgtcctcggcctcgacccggttggcgctggtgtcgtagatgtcctggagggtctcgcgcatccggtaggcgcgcgcggtcttgagccgttgccgttgcaggccgcgcttggtctgaagctggagttcggtcaggctcgcctcgtttttgagccacaggtacttcgtccttttcaacaggccgttctcccggcccccggccttcccggccttgtcgacggcctcgttggcgtgctcgatcacatggaacttgtcgatgaccttggcggcgtcgggaagccattggcggatgccctggcgaatcccaggctcatgtcgcacgtcaccgggcgcacgcggttggggtcgccgttgtggtccatgaaatcccttgcgaaccgttcgatggtatgcgcgtccttatccggcgtcacgttgatcacgttgcgttccaccaaatcggcgaccacggtgatgcagttgtgtccccgtcggctggtctcgtcgatgccgatcgcctccacgcccgcgtggtcctcgtacaggcgcgcctcccgcacgtagtgcgtgatgaaccgccacaggcgggtgtcgtgctcgccgacctgttcggcgacgtccgcgaccggctggcatttcgccagttccacgaccatggcctcgaacaggagcgcggacgccgctgcccggcctcgcccacggcaccggcactgccctgacgccatgcgcggggcacgccacgcgcggcactcccacgtggatgaacgccttgtactggaagaagttcaggtgacgccacacgcgctcccgcacgtcatgcaccgggcatgcctcctcacggcacccggcctcggggcagtagaagcgcgagccagactcgaagctgatcgcgacatgcagttcgcgtttgccgtcctccccgtcgcggaactccacgcccgacacactccacgggccgggcaactacaaggcggcggtgaacaacgaagtggtatccataccaccaaactagccgaccggtatcaccacacgaccggcctcacccacaccaaacagcgaaagaccatttaatatttagtaatggggtatcgtgactgcaatcatgacacccctggaagaggaagtgaatcccatgagatccccctcatttgatgaccatgtctagccgaaattacaagcagtaggcatgatcacgattgatgcaccaggctcagcctttctttttcttggagagtaggtcgtaggcgacggcggcgatgacgacgaggcccttgatggtcttgacccaggcggcgtccacgcccatgatggacaggccctggttgagcacgcccatgatcagggcgccgaccatggcaccggggatggtgccgatg

SEQ ID NO: 48 - DNA, 32128 bp, Unknown
  R30_18m  MAG No. k141_19268
ctcccacgtgtccctgaagtagcggttgtcgtagttgaagcgcaccggcaggcggttgatgatgcccgcgggcaggtccttcggatcggtctgccactgcttgcccgtgtagttcttgatgaacgcctcgtacaggggacgtccgatcagcgagatgcccttgtcgttgaggttctgaggatccttgccggccagctcgccggcctgccgggccacgagggcgcgcgcctcggcgggcgtgtaacgcgcgtggaagaactggttgatggtgcccaggttgatcggcagggggtacacctcgccgtcgtgcgtggcgtacacgcggtgcacgtaatcagtgaacgaggtgaacctgttcacgtagtcccacacgcgcctgttggacgtgtggaacaggtgggcgccgtacttgtggatctccgcgccggtctcctcgtccatgtagctgtacgcgttgccgccgatgtggtcgcgcacgtcgatgatctccacgcggaccccgagcctctccacggcctgctgggccacggtcaggccgaacaggcccgcgcccacgaccaccagatcgggatactccgctttaggcataatcacttacctcctatacagcgaccaataaaattattatggaattttttagaagcttttcgtgtatttcttgccaccaaatttcgctctcaaaaacccaattcctttggaccaccaatccaccggttctggactcatggttgttaattccgcgtatgacactttatttgtttgcagccacacatctagcaacatttcactaatgcgtccaggatatcgagcgttgaaagcgtcgtactgggcggaatcaatacgccgcaccagttcttcaagtatcgggaacagccatgcacagtattcatcgaagcatcctgctcgcatgatgaacatgttgaacatgtgggcggtcttcgatcgcattacttggtcaaaagccggtaaatagtcaggctgattggaagctatgatcttgcgagtttcgtccagctgctccacgggcaacgtatgggcataatgagaatagatggtttcaatgaagtagttgcgttttctcggaacaattacatccacaccaggctggccgtttgcaccttccaatactggcaatacgtcagcaacggtagctatacgattgaacctatcacgagagaataaccgcttggcaacattgcgcgtagcgaagtgacgccggtaatgaaccagtcccttgtattcggcgttacaattcttccacatccaatacagtcccgtaagctcagaatacaaggcattcagagcagagatgttgtcccccgtgttgtccggagtgaattgtgcccccaaatcgatatctggatgcaatgcctttcccacatgcatcggcatatacattgaatccgcaggcatacggtatggcttatgcgccgccacggcaatacaaatcttcttgttcttctcgctcatgcatggctccgaacgaacggggctcgtaccactccccgatctttttgtgtaaacgttagcattataacagtattataacggcatggtgagaagcccgttgtctaattgaaagtgcagcacccgttagattggaaattgtccggataaccaaacgaaggggtgttgcactttgggccaggtgtattcgcgcctgtcggaagaggaacggcaggtcgtccggattgagatgggcaacggggcgggcgtgcgccgcatggccatggtgccgggacggcatgcgtccgcggccggccgggagatcagacgcgacacgtggttcccgtccagcgagagcgaatcgtgccggccgtgccggcccaggcggctcaggacgggtccgtggacgggccgctgccacgtggccgggcccgcgcgccgcaggcccatgcgccgcgaggcggttgcgcgtagaccgcggcgcctggcggcgggccgcctgtgggcgtgggtcgcggagcggtcgcgccggggccggtcgccgccgctgatgtgcgggcgcctcgccatggagcatcccggcggccccgtgatgcgctgccgcccggaggccgtctgccggtgggtatacgccgacaaggccaggcgggagcggcgggccgacggcgtcatcggcacgggctgcagcctgcacaccgaggtcgagcggcgcacccgtttcctcatggccgcgatcgtgcccgacaagaccgccgccgcgagcgtggcggcgcagaaggccatgttctcccggctgccggccgccgcccgcaccggagtgacgcatgacaacggcaccgagttcgcccggcacgccgagctgcgcgacgaaccgggcatggccacgtatttcgccgacccgtgcagctcgtggcggcgcggcggcaacgagaacaggaacggcatgatccgccgctacccgcccaaacgcacgcccatcgccccccccctccatggcacgcgaactgctagaatcagccgagaacaaggatgttgcacttacaaatagataacgggtatatttgaacgagactatcttccgcatctggaagtatgaagtatagatacccgtatcacaaataaacactcataccgtataagcatactgacgcgtaatttgaggccgtaccggggcttcctcaacgcggtagtgcttacgcatgctggtcaggatggtgcgcagcgctttgttcgtctgctctgctgcggtacggaactttgcgtattccttgccgtgcggatcttcaatatcctcaggctcagggagcataggccgaataatggacgcggagttgatcactgactgcaagcgttcctgaatggtcaagcccttgaccagtccattgcgcgcgcagtactcacacatgttcgcaaagtcgcccagcaggaacgtgtatttcacagcagtgggagccaacgtgacaatgtctttgcgctgatccttttcaaagcacaggatcagatcagcggactttgccatcggctgcgtcaggcgccgagagcggaacccactcggttcgattcctacgctttccataagcagggcgctgttgggatcaatctgatgcatgggcaaaccatgcgtacccgcgctggaaacctgcaccgtggtgccggaaagataacgggtgagtagcagctcgcccatgggagaacgacaaatattgccggtgcagacgaacataatgtgcatgggctcagtccttcttcatacttacaacgctaccttgcgggcctgcgtacaaaccactagcgtcccattctagtccgatacgtcggactgtgaccaatccgcgtccgcccaccatcacttcatcttcacagaatgctaatgggaaattcgtttttttgagcgattttgctataggggggggggcggactcatggtagggtgtgcaacagagatgaaattaacatgatttccttgcagtttcaggaaataccttaaggggacgaagttcacgtaccatgtcaagaatcagcaccacggcatcagcaacggctcaacatatgagcaacaccacagcagagactgagacactgcaccgagtgcaaatcagccgtactcaggcagcacatacggattctcacattgcggacgcaactcctgatacggctgcaccaacattttttgacggcacttacttctcatcttctccggatggcaccgttactcataacgatgctggcgataggcctcatctcaccgaatattcagtgcccaaatggcgttatctgtacaatacgaccatggtgattctggatctgctgatgaccatcatcgccacctgcatcgtattcgcgtgcagtccaggagcatatgccaatgtgcagaacatgggaccatccgattatggtgtattcagtttcctgagcttggcctgcatctcctggctcatcagcctctatgcagctcgaagctacgaacgccacactatgggcgagggatacggactatatgccaagctgcttaatgcggcctttatcgacttcattatgctctgtacattgggctacttgttccatctgaatgtgccgcgttccctgaatgtatttattcctatcctttctctcatcctcgttatcgttgaacggtggctgatgcgtcgtgcgcttcaccgcaatcgagcaaaaggtgagttcaactaccccactattatcattggctctccggagggcatcagtaaaacgctgaagcagctcaaggcatgcctcagcctggggtatgcacccatcgcggtctgccctgttgcctctgtgtgtgattcggatgatccgaatgctgctcaacatcttgtatcggttccgtttattcctgccaatgatgaagaagcgcggctcaaggtgttggcgttgaactcccatttgcctcagaccgccaagcggatgaaggttcgcactattctgatcgctgatgtgctgacgcgtgattctgaaaccatgcgtactctttcgctcgctgttgaatctatgggcatcgagctggctcttactgcatccgttgcagatctgagcggcgcaaacctgcagctacacaatgacccctctatgccgattttgacagcccgacttgcacagtattctctgccgactcgcatctttaagcgtgtgtgcgatatcgttctctccctggtggcaatcattctgagttcgcccatcatgctatgggctgcatataaggttaagcgagaagacggtggccccgtgttctactcacagactcgtatcggcatctacggcaagcctttcactatgtacaaattccgttccatgcggctgaacgccgataagatggatgccgaagtggctgccgcagctggcgtggaactgggaacaacattcaaggtcaaggacgatcctcgtgttactaaaattggtaagttcatccgcaagacttccattgacgaggttcctcagttcttcaatgtgctgaagggcgatatgtctatggtgggtccgcgtccgcaacgtcaatatgaggttgaccagtactcgccattgtattccactcgcctactggtcaagccgggtatcaccggcccttggcagatttccgggcgtaatgatttgtctcaggaacagtctgaatatgcagatgtgtcatatattcagaattggtctatcacgggggatattgcgattctgctgaagacagtgggcgcggtatttaatgggactggtatgtagttctgcaatgtagagggcgtcagctttttgctgacgccctcttgtttttggtctctctcctcaggcagccgtttgtggctgacagctcccttgtcagagggagctctttttactattgatggagcagacggcggtgtcggtggtgacgccggaatcggtccagcccataggagtttggtcgatggtgaggccggagacagccttggtggatgtggccacgtcgaaggaataggtgacggattcgccgggcgctatcgtggcgatgctcgcatacacggttttaccattcagtgtttcttgacgactccccgtcactgaaccaccactggtcttaagatttgagatagagcccccggcgggcgcataaatcaaagttttttccacaccttgtccgccggatccaagaatatagctcgttagagcaccaatctggctgttctcaagtgtatttgtcatcttatattccacatgataggtctgggaaccatcattaccacaggtggaacgagtcaccttcgaagtacgatgaatataccatcccatctttgacggattctgctcagtcacatacactcccacctgcggatgctcttcactgctcggagtctgtgcagtaaagcctgcatcactaatggtttttcagcagtctcatcaaatgcgtacatggagaagtggcggccttcggccatgctgcccatgagctgggcgaccttggtgagtttagatgctcctatacattgtcaagcgtttgggtgtgttgttttgggttggttgtcgagtgtatccactggatggcccgttgctcgagttcgggaaggtcgcgtgcgccgcgttcgatctcgctgatgcggctcgagggcacgcagagcgcctcgccgatctgttgctgggtgatgttccggctgacgcgtagttcgcgcagcttggcgccgcgttcggccggggtcccgcgtccgacctcgccgttgcgtatgctgatgagcgcccggtatgcctcgcgggcgatgaaccgtttgacgcagcggatgatctcgagcttgcctttgccctcgcgggtctttttggccatgtagtcgcgggtcggcttgtggtatcgcaggcggacgatggcgatgcggtgcaatgccatattgccctgccggttgccgcctttgttgagcctgtgtcggttggtcctgccgctggacgcggggatggggcagacgccgcagagtttggcgaacgcggcctcgcttcggatgcgttcggggttgtccccggcgacgatggccagggtcgcggcgatgacggcgcccgcgcagtacatgtcgagcagcggcctggcgtgttcctcgaggatcaggcgcatgcgttcctccaggagaccggcctgccgtttgagcgccttccatgccttggcggcggatttcagcgcggccagcacgctccgctcgaccaggccgccggccggtctgcattcggcgagcctgttcatgcgggtctcgctcctcaacccccggtaacgttccctgatgggttccggggcggtgacgagcagcccgttcgtcgaattggagatcgcggtcatcgccgacaccagttgggatcgctgcgcgttgaggtggcgcagtgcctcgacccagccgtccgagcttttcggcaggctcgtgccgtcgccggccatgacgctacgggcagcggcgaccgcgtcgaggggatcggacttgccgtccctgcggcgcacgcttcgcctggggcgcagcacctcgcgcacctcgtatccggcggcagtgagacgacgggccagggccgctccgaacgagttcgtgccctccacgcccacggccgcgaccctgcccggcccgggcagcatgccgatcagcctgtcgtatccgtccgggtccgccgtgaacgtctcggcgcccagcggcctgccccgctcgtcgagcaatgcgatggtgtgcgtgtccgtgtgggtgtcgatcccggcccacatcacttcgttcggcggcgtcatcgttgtcgttcctttccatgtgttcggatgcctcccgggggcttgcggcgcagacaggacgttgacggggcacgctaccatggttcttgcgggatccgacgggagcggccacgctcctatgaggtcatgcatccatggcccacgggtcggcggccatgggcgggacaaatcaaaataaggacagccaccggaaccgatggcgtcagtcaaatgtggggtcaccgcccaagccgtcatccaccattatcaccgatcagaaaccggcataaccattatcaacgtcaagttgtcttgtgcggtgtgagctctgagctctcatgaagcactgggtcgtttgcgccgcagattatggtttttggggacggtgtgtgttcttcttgttgtttgataactcaagagtgagtgatctgctggcatgtcgcttcagcggttgcgtatcggggaagatacggatggattgtaccgtgcaatcgatgccgtgggacgggcggagtattcgtattttgggacatggagtccattcttgcgtcgcaccccgcacggggtgcgacgcaagaatgcgccaacgtctactgcgcgccgatcgcggccttgagctcctcgaccttgtcggtcttctcccacgggaactcaacgtcggtacggccgaagtggccgtaagcggcggtcttcaggtagatcgggcgcttcaggtcgagcttgtcgatgattgcggcggggcgcagatcgaagaccttgcgcacggcggcggcgatctggccgcgcgtcacgccttgctcggtgccgaaggtctccacgttgacggacaccgggtcggcaacgccaatagcgtaggcgatctggatctcgactttgtgagccaagccggcagctacgatgttcttcgcaacccaacgggtggcgtacgcggcggaacgatcgaccttggacgggtccttgccggagaacgcgccaccgccgtggtgggcggcgccaccgtaggtgtcgacgatgatcttgcggccggtcagaccggcgtcggccgccgggccgcccaggatgaacgaaccggtcgggttgaccagctggcggtagttgtcatgcggcaccttggaacccagcacctcatcaagcaccgggtcaatcacgtgcttcttcagctcaacagcaagccaatcctgcgtaacctcaggatcatgctgggtggagatcagcacggtgtccagacgaacgggcttatcgttatcgtcatactcaatggttacctgggtcttgccgtccgggcgcaggtgcggcacttcaccggacttgcggacctcggtcagacggaaggcgaggcgatgtgccaaatagatcggaagcggcatcagcgtcggagtctcgtcggtggcgtagccgaacatcacgccctgatcgccggcaccctgtgcttcgtaacgttcttcgcggctggcggcggtctcctgatcgccagtcagacgggcaacgccctggttgatttcggcgctttgctcggtgatggccaccacaacgccgcaggaatcggcgtcaaggccgacttcggaggaggtatagccgatgttgcgcagggtttcgcggaccttggactgcacgtcgcagtaccccttggacgtgacttcgccgaagaccaggaacacgccggtggcggcggaggtctccacggccacatggctggacggatcctgggccagcagatcatcaagaatggcgtcggagatttgatcgcagaccttgtcagggtggccttcggtcacggattcggcggagataagccgatgttcttctgtcatatcatccctttcttcaggacttatcgccccgcggggtgcgaggcacaatgatacggtgtcaatttttacttgtcactgcggaagcgggcataaataaaggctcgtgccaaccagcgcggtggctcgagccttacgtcttgttcgctcctgatgatgagttatagctgattgcgataactcaggcaagcgtgtcgctcaaaatcagttgtgagagaactctcacaccatcattcggcgacgaactgtccaaacaatccaaacgaatcgtctgaatcgatcagttgccctcgttggcgtcgtcctcgcccaaggtctcctcaagcagaccctcgtcgatctcgcggaaggcgatggacagaggcttctcgttgttctggtattcgaccagtgggccgacgttctgcagcaggccctcgttgagctgcgtgaagtaggagttgatctggcgtgcgcgcttagcggcgaaaatggccagcgcgtacttggaatcggcgtgcttcatcagatcgtcgatcggcgggttcgcaagaccgtcgggtgtcgggtcagtaccaaaagccattgttcttatctccaaacattggaaaatctatctcaaccgaagcaagtgtagccgtttggggggacttctgtcagccctataccggactctcgccagaggaatgtattccaaaaaatatgtgtaagaaacgttacgtttttgcagattccattattcgactcttgacaagtggcgtgtccctcgcaaaggcttgaatagagccatgactgaaatgcgatctgcaaaaattatgtcagggcgcgtctttgcaggcgcccgagccctctaccgtgctgcgggcgtcagcggagacgacatgggcaagaagcccatcatcgccatcgccaactcgttcgatgagttcctgcccggccacgtccacctcaacaaggtcggccgcatcgtttccgaggctatcaaggaagccggcggcattccgcgcgagttcaacacgatggccgtggacgacggcatcgccatggggcacactggcatgctctactccctgccttcccgcgacatcatcgccgacaccgtcgaatatcagtgcaacgcgcactgcgccgacgccctcatctgcatcccgaactgcgacaaggtcgtgccgggcatgctgatggcagccctgcgcctcaacattccgaccgtgttcgtctccggtggcccgatggaggccggcaccacggtgctcgccgacggcacagtcaagagcaccgaccttatcgacgtgatgtacgccaccgctgacgacagcgtctccgatgaggaactgctcaactatgagaagaccgtctgcccgacctgcggctcctgcgccggcatgttcaccgccaactcgatgaactgcctgaccgaggccatcggcctggctctgcccggcaacggcaccatcctcgcctcccactcctaccgcaaggacctgttcaagcgtgccgccaagcaagtcgtcaagatcgctcaccagtactacgacgattccgacgattccgtgctgccgcgctccatcgccaccaaggaagccttcgagaacgccatgaccatggatgtggccatgggcggttccaccaacaccgtgctgcacatcctcgccatggcccagtccgccgacgtggacttcaccctggacgacatcgagcgtatttcccacaccgtgccgtgcatctgcaaggcctcgccgtccggcaagtgggagatttccgacgtgcatcgcgccggcggcatcaccggcatcctcggcgagctcgaccgcgccggcaagctgcacaccaacgtgcattccatcgactacccgacgctggaagccaagctggccgattgggacatcatgcgcccgaactgcaccgaggaagcccagcagatgtacaaggccgctcctggccacatcatctccccggagccgtggacgcacaccaccctgttcgactcgctcgaccgcgaccgcaccaacggcgccatccacgacatcaaccacccggagattcacgaaggcggcctcgccgtgctgcgcggcaacctggcccccgacggctgcgtggtcaagaccgccggtgttccgccggagatctggaagttccgtggaccggctctggtggtcgactcccaggagcaggccatcgaggtcattctgaacgacaccctgaagcctggcatggcgcttgtgattcgttacgagggtccgaagggcggcccgggtatgcaggaaatgctgtacccgacctccttcgtcaagggcaagggcatcggcaaacaggtcgccatgctcaccgacggtcgctactccggcggttcctccggtctggccatcggccacatggcgcctgaggctgccaacaagggcccggtggcgctcatcaagaacggcgacatcatcgatatcgatatcgaagcccgttccgtgaacgtcgaactgactgacgagcagctggacgagcgtcgtcgcgagcttgaggctggcgacggctacgtggctcaccgcaaccgccacgtctcccaggcgctgaaggcgtatgccgccttcgcccgctcggccgacaagggtgcgacgcgtgacccggagctgatcaacaagctctccggtctcaactgatcgccgattgcatagctgaaaggcccggcatcttctttatgaagatgccgggcctttactgtgcttccgaaggcgggagcgatattgcttgttatcgcacgcaggcggcgggggagaggcgtgcgcctcgggcccagtcggcggcgcgcatggccttcttgccttgcgccttgacttgggtgagttccagcggcgtgctgccggtaccaacccacacgttcttcttgcccaccttcagctcgccgggctgaagctcggccggagtgttgggattggactggtcggccggttgtgcggcgagaatatgcagggcgagggatttagcggttgactcgtcattatcggcgattggcccttccgcaaacagttcggtccatgccccgggatgtggcgtgcaggcgcgaatctgacggtcgatggcctcggcctcgtccgtccaactgatgcgggcgtccttcaccgtgatcttgtgcgcgtattccaggctctcggccggctgcgcggtgaatgtggcggtgccttcacctacggcggccagcgcatccacatacatgggcgcgccttcctcggccagacggtcaagcagttcgccggaagtctcacggccggtcagttcgatggtcagggaagcgacgatcgggccatcatccaaaccctcgcccaccttgaacacgtcggcgccggtggtcgggtcgcccgcccaaatcgcacgctgggcgggagcggcgccgcgccacttcggcaggttggagaaatgcaggttgtaccagcccatgggcaccgcatcaagcacgttcttgggcaggatattgccataggcgatgacagcggcgatatccgcatgcaggtcgttcaacgccgccatgaattcgggggagcggggtttgagatcgatgacgggcaacccgagctccagagccgtcgccttgaccgggctgggcgtgagcttgcggccgcgaccggtaggcgcatcggggcgggtaatgacgccgaccacatcaaaacgtggatcggtggcaaaggccttgagcgagggcaccgccacgtcgggggtgccggcgaacacgagtttgagcatggtcctccttgaaatgtcgatgctcactgcacggccggaatgttcacgccattggcgatgagcagttcacgcagcttgaccggatcctggaaacgtacgccacggatgccggccgcattcgagccgacgatgttcatggccttgtcgtcgatgaacaacgcgccatcggccttgatgccgaactggttcaacgcggcctcgtagatttccttgtgtggcttgcgcagcttgacaaaaccggagacgagcttgccatcaagctgctgcaaaatatcgcactgttcctcggccacgtggaacagactggattcccagttgctcaggccccacacgccgatgccggcagccttcaggtcattgaccagcacgcgcgcgcccggcacgatgccggtcagggagtcgcggaagttcttgatgtagtagtcgaggatgtccgcccacttatcgcccttgtcacggcgcatgatggcgatggcctcgtcggtgctggtgccgccgtccatcaggtcgttgacatcgtagaagccggagatgtcgttgtcgaggaattcgtcgatggtcttctggctgtagcgggggatgagtacggcggccggatcccagtaaatcagcacgttgccgaaatcgaagatcacgtcggtgatcggcttgccggcgttcgcagcggcctcgccatccgcgaccagcacgtcgtaatccatatccggctctccaggccagcccttcatggtgtcctccttatagcgatgttcgttctgtaattatcgtttcacgtgttgaagacgattagatcaggtctttgggatctactcggaagcgaagctcgccgggttcgcgggacgccacatgacgagcggtttcccggtgcagtcgggccgccagctcggctcgccgactctgcggcacacggattactgccttcacccggtcggccgtggcttcgagctcccgggcgtcgaccgtgtccggttgcgcgatcggcaccgggcccaacatgccgggcagctcgccgcaggccgtccaatcgccgcccagcgcgccgatacgctgcatcagcgtcatcaccgcatcacggcgtccccatacgcaggcggcggccacggccggcggcataccggtctccacacgctcctcaagatccttggctgcaagaatcctcgaatcccagagcatcagcgattgggcgatggccgggtcggtttcgccgagaatcaacgcctggccgccacgggaacgcggcgcgcacaacgacaccgcacgcatccacgcggtcaatgtatccaagcgagcattcacgcccaacgcatacaagctggtccaagcgtcgagcacggccacggcacgatactcatggccagccgatccctgctcggcactgaccggacgcacgcgcggttcgaaaccgggagtggcgatgacgatcatcggctgacaagccacatcgcgcaccaggccctgcgtcttgctggacaaaactactggcacgccgcggaacaacccggccagttcagccgcagtgcctgcagcacccacgcgcaccacacgcatacgttcatgcccacagcccgggcacttccaattgatggcagcagccccgcaccagcggcatcgcggtgtggagtcccggcggtcggccggtagttgcaatggtccggaacacttggcgcagcgcacctgacgatggcatttcgcacaactcagagtctcactgacgctgtcttgcggaatggacagcagcacggggccgctctccaaagccttagatagcacgcggacagccgtatgcggcacacgtgcgccgatggacgggtcggcaagacgcgcaagctcatcgcgattgagccaacgtacccaaggcgtcgcatccttcagcggcgaggcgagcgggtgaatcgcggtggaatagccgctcaccggggtctccaccgtatccgggccggtgttttcccactggctttgcggggtgcgcgcattggccatggccacgaacacgccgccatgggacttggcgcgcagccgcatcacgccacgggcctgtggatatggcatcataccgtccatgttctgataggcggcatcctccagaatggcgaacagcgccgggccttcaaccggcgcatacatcaccgcacgggtgccgatcaccaccttcacctgtcccaacgccacagccagataggtgcgataccggtcggccgcgggcatggtctccgcgttaagcacggcgacgtcgcccacccagccgccggccggagcaggggcgaacggtttgagcccataattgcgcagcataggcatcaggtcttcgacctcgcgcatggtgggcaattcaaccacggcagctttaccggcactcagcgcagtggccaccatccatgccatgttccgttgccactcctgtgcaccgggcagcgaatcaaacacaaaagattggaaacgctgaccggtaagcgcatcatgaagcacattgacgtcggcgtaattggcggtcagacgacgatacccctgcgcagccccctccgaaacggtactggcaacggcaaaggtagagccagcaggcatggtcccatcgggattggtgccacgcccggcaaaaccgccttgcgtattatctggcaatgagccgccgaccggccggcggaacgatgcggccaaccgctgctcggcctccaccttggccacgcgcggtggcacggcgaaacgcagaatattggcccgtgtaccgccataggctttggcaatcagaccgatatcctcacgcatcgatgcgggaaccagcacatcggggctcaacatccgttcgatatagcgaatcgaagagcgcggcgtatcgctggtatcggtgcgtgcccagatcacgccgctgaccctctgaccgccaaaccgcacgcgcaccaacacacccggttgtgcggcctcgctgtctttttcatcaatgaagtaatcgaatgtctgaccgaggtggagcgcctgcacatccagcacgacttgcgctatgggatgctgctcggccggcgtatgctccgcaggcgcacgtttacgccgcttgcggggagccagccccgcaagcgtcaactgttctgcgcctaaagtagtcatggctcaactataagtgccggagccgaggtcggtaaaattttaccggcgcaggtaatcgagtacgtgggttaggtcgcggtcgttgatggctttgtcggcggcgagctgggtctttggcttggcacagaacgcgagacccaggccggcggcctgaatcatcggaatatcgttggcgccatcgcccacagccacggtctggctcatcggaatacccaaacggtccgcccatgtctgcaaggcgtgcaacttcacggtcttgctcacgatttcgccgagcaccttgccggtcaagcacccatcggcaacctcaagccggttggcaatccaatagtcgatatggccctcggccgccagcatatcgaccacttcatggaagccgccggacaccacgccgaccttccaaccgtgttcatgcagcgtgtcgataagctccagcgcacccttggtgaaatgcagcttgtcatgcaccgtatcgaacacggaaaccggcagccccttcagcagcgccacacgagcgcgcaaggcgtcgcagaactccagttcgccgcgcatggcgcgtgcggtcactccggcaatctcctcaccgcagccagccaccacgcccaactcgtcgataacctcttcgtcaatgagcgtggagtccacatccataaccagcaggccgggctcgctcagcgtcggcacaaaaaccgcagaaccaaccgggctcccaacttcgctctcggcggacttgtcaataaaatgcacatcttcttgcgtcatgcctctgattctgggaaaaccttgggacaatgccctctatgagtttttccatggcagccgccactattcttgcgaccgaccctacgcccatctgcacaaccaccgaacccggcccgatcggcaccatcaccgactggctgatcatgctgatggaaaccatcggcggtatcggcgtggccttggccatcgccctcgaatccatcttcccgcccatcccgtccgaagtcattcttccgctcgccggcttcaccgccgcacgcggcaccctgagtctgccgggcgcaatcatctgggccaccatcggctccgtactgggtgcctggaccttgtacggcatctcccgctgggtgggcctgcatcgcatcaatctcgcggcagacaaaatccccggcgtcagccgcaaagacgtgagcaaagccaacgactggttcaccaaatacggcacatggtcggtgctcatcggccgcgtgattcccgtggtacgctcgctgatttcgattcccgccggattcaaccgcatgaacttcctgcacttcaccggctggaccctgctcggctcggccgtgtggaacaccatcctcgtttccgccggttacctgctcggcgaccagtggtgctcgattcaaggcgcgctcggcgtgttcgaggacgtggtcatcgcggccgtgattgtggtcatcgtatggttcgtggtgcgaaaagtgcgtactgttatacgtaacaggaaatccgccgacggcaacgaatagggtctgccgactgccataagttgccgaaaatcccggatagaagggaagcgaagaacccgcatgagcgacaccgaagatctcgccgcgctgaacgatcgcctgatggccaagaaccatgcgctcgccgaagcgctgagccgcgccggcaaggaactgaccaaggcgaagtcacagctcgcccagctcgctcagccgccgctcaccttcgccaccatggtcaaggtcgattccacccgcaccgatgaagacggcatccagcacgcgtcggccgaagtcatttccggcacccgccgcatggtggtgcctgtggcctccaacgtcaacgccgcccgcctgaccgccggggccaccgtgatgctcaacgagaagctcgtgctggccgagcagcgcgatgctgacaccgtgggccagattcgcagtgtcaagcaggtacttgacgacggtcgactgatcgttaccgacgcctccggcaatcccgtgctcatccgccgttccggcgcgctcgcgtatgcgggcatcaatcagggcgaccgtattatcgtcgatccgtccgtccgcctcgccatcgaagtgctgcccgccgagggcgacaaggatctggtgctggaggagaccccggatgtcacgttcgccgacatcggcggcctggatagtgagatcggtcgtatcagggacgccgtccaactgccgttccagcatcgtgcgctgtttgagcgctacgatttgaagccgccaaagggcgtgctgctgtacggtccgcccggcaacggcaagacgatgattgccaaggccgtggcgaacgccctatgcgagggtggttacgattcgaatggcgacggcgcaatcagtccggccgaaacccatgtcaagggcgtgttcctgtccgtcaagggcccggaactgctcaacaaatacgtcggtgaatccgaacgactgattcgcctgattttccagcgcgcccgtgaacgcgccgcggacggcaatccggtggtcgtgttcatcgatgagatggattcgctgctacgcacccgcggctccggcgtctcctccgatgtggagaccacgattgtgccccagttcctctccgaactcgacggcgtggaatcactcgacaatgtgatggtaatcggtgcctccaaccgcgtggacatgatcgatccggctgtgttgcgaccggggcgtctcgacgtcaagattcgcgtcggccggcccaaaaccaatcaggccatcgccatcgtggaccattacctcaccgacgacctgcctctggaagatggcgtcgacgcgcacgccttgtccgccgtgctggtgcatgacatctacggaacctccgaacgccgccatctatgcgacgtgcaggaggagaacggccagtggcatgcgttgttcctggccgacgtggtctccggcgcgatgctcaagaacatcgtggaccgggccaagacccgagcggtcaaggaatccatcgaaaccggcttggacgtggcactcaccgtgccgctgctcgctgccgccgtggaagacgaataccgcgagacccgcgattccatggccgacgtggaccccgaacaatggtcgcgcatcaacggcatggacccgatccgccgcatccgcaccgccgaatagctcaagctcaaggagcactacatgaccgttaaacgagtgatgggcaccgaaaccgaatacgcggtatccctgaacaccccggaccgctacaatccggtgcaactgtccttcgacgtggtgaacggcgccgcggacagccacagcaaatccatccgctgggactaccggcaggaggacccggtcaacgacgcgcgcggcacccgtctcgaacgcgccgccgcccgcccggacatgctcaccgacgccccgcagctcaacatcaccaacgtgatcgcccccaacggcggccgcgtctatgtggaccacgcccaccccgaatactcggcgccggaaaccaccgacccgttcgaagcggtccgatacgaccacgccggagacctcatcatgcaggccgccaccgaacgcgcccgcaaacagactggcactcccattgccctgcatcgcaacaatgtggatggcaagggctcctgctggggcacgcacgagaactatatgatggcccgcgcggtgccattcgacttggtcacacgcctgatgaccctccacttcgtcacccgccagatctacgccggctccggccgcgtagggattggcgagaacagcgagatcccgggctaccagctcagccagcgcgccgactacatccacgccaaagtcggcctgcaaaccaccttcgagcgcccgatcatcaatacgcgcgacgaatcccactccaccgatgcataccgccgtctgcacgtcatcgtcggcgacgccaatcgcatggaggtgccgcaggcactgaaactcggcaccacgagcatgctgctgtggctgctcgaacatgcggacgaggccggattcgacctgaacgccttcctcgacgaactcgaactgtctgacccagtcgaggccatacacaccgtttcccgcgacctgacgctgggggcaatcttgccgctggccaacggcggcgaaaccaacgcatggcttatccagctcaaactgcgccaagccgtctaccaggttgccgcactggtcgaaggtaccgacaccgccggcgaacccgcctggccggacaaatccaccacatccattatggcgatgtggcagcaggcgctcatcgactgcgcctccatccgccatgccgccgacgatgacgaacgtctggccatgaccggcgaggccagccgcattgaatggctgctcaaatggcagctgctcgaaaaactgcgccgcaaaatcaccacaacgtccgcacccggcgtggccaacggatggaatgatccgcgattgaaggtcatcgacctgaaatgggcggcgctcgaccccgcggacagcatcttcaccaaactcgaaccccgcaccgaacgggtggtgagcgccgccgacatcgcacgcgccaccaccgaaccgccggaagacacccgcgcctggctcagggcaaaactcgtggcgcaattcggcgatgaggtggccgccgccagctggtcccgactcactgttcgcgacccgcgcgccgcagacgagggcgaggcggtcgaattctacggcaatgccggccatatggccgctaccgaccatcacctgttctccctcgacatctccgatccgctcgccttcaccaaggcgcactgcgaaaccgaactcaattcagccgaacacgccatcgatctgctgaagtcgctggccatcaacgccgaacgatagacttggtagctatggaagaaacacgcgaagagaccccacaggacctgcgcaaccttgcgctcaaagtcgccggcctgctcgaagaagccggccagcatgccctccacgaccaactcaatccgcgtaacctcgcccagccgagcaccgagaacgcggaccgtggcccccgctacaagcttgaagtggacaacaagatcatgcgcttcatgagcgccagaatcgccgacatcgcccacttcgacggcttctggaccacccgccccgccgaaagccgccctggccagcgttactggtacatcggcaagatcgacggtgtgatcaactacgtacgtcgcatgagcgaatggacggtgaccgccgccctgttcgaattcggcccggacaacgagcccaagccgatcatcggcatcgtgcacgccccggccctcggcctgacctacctggccgccaggggagcgggtgccgtgcgcatccacaaaaccgcggtcggcgagaagcgcgacaaggtcgtgccgtcgatgacctcctcgctggatggttctgtgctgagctacggcatgtccttcatccccagcgaatcgcagcgtgcgctcgacgtggcctcctcgctcgccggacgcccggccgacatcaagcgcgtgggccccgtctcgctcgacctgtgcaaagtggccgacggcacctatgacgcctacttcgagccgatgctgcacgtgtgggatatcgcgggcatcgccgccggcaccgtagtggtctgggaggcacagggcacgctgagccgttgggacggcgaacgcatccactggcgtcacgataacgatgtagtggcctccaatggactcatcatccgcgaactgcagcattacctgcagcagtatccgtggctcgactccatcaaccagcgataattttttgactcctccggctcccctcgggtgaggggagccgtcggccgaaggctgactgaggggagtttgacagcccaaaaagaagacaacatgccacaacaattcgaacaacctcaagcacagcaggccgcgacccaggaagacgacgccctcgccaccacgcaggccgccgcccaaaccgagtccaccgaccaagccgacgtgttggacgacatcctcgacgacatcgaatccgccttggaaaccaacgccgaggaatacgtcaacagcttcgtgcaaaaaggcggcgagtgatgccccaactgcgtgacagcggcacccgctccctgcacgccacggaacccgtaccatccgccgagatggacgggttctgccgtattttcggcgtcgaaaccgaatacggcgtggcggtcaccggtgccgaacgccccgtggacgccggccaggtggcgatgaccatgttccagcccatcgtctcccgttcccgctccaccaacacgtatctggccaatggctcacgtctgtatctggacgtcggatcccaccccgaatacgccaccgccgaagcgcgcgacccgcgcgaggccctggcccaggacctcgccggcgaacacgtgatgcgcaacctagccctgaaggcccagcgcaagctgcgcgaatcctacggcgcacacgccacgatccatgtgttcaaaaacaacgtcgactccgccggccacgccttcggctgccacgaaaactacctggtccgccgcttcgtgccgttggagaccatcgaacaccagctgctgccgttcctcatcacccgccagctgtacaccggtgccggccgcatgaccccggacggcttccagatcacccagcgcgcggacttcctggacgaggccgtctcctcggccaccacccgctcccgcccgatggtcaacacgcgcgacgaaccgcacgccgaccccgactccttccgccggctgcatgtgatcatcggcgactcgaaccgttcgcaatggtccacatggatgaagcttgccgtcacgcaccttgtgctgtgcgcgatcgaagacgccttccgccatggcgttccgtccggattcgagcagtatgcctttgctgatccggctgccgccaatcgcacggtcagtcgattccttgacaatccgcgcgccgaactgacgctcgaatcaggcgaatccgtgtccgcactgggtctgcagcgccggtattatgcggcggtcaaggccttcatcgaaacccatggcgatgcgctggcaagttcgctgccggccaccacgatcgacacgattatgggggagtggagccgcgttctggacgcgctggagcgtggtgcatacgatgcgctcgccgaccgcgtggactgggccgccaagaagcgtctgttcgacgcgctcaaacgccgtcgcccggacgtcaccttcgcccagatggaacagcttgagctcgactaccacgacatcgccaacggtcgcctgtacggttcgctcgtagcccgcaaccagatgcgtgagctgctgacaggagacaacgtggaatacgccgtgcacaatccgccgaccgacacccgtgccgccctgcgtggccggttcgtggacgcggccctgaacgtcggagcccagttctccgccgactggacccacctgaccctgaccgcccccgaacgccgggaagccatactcctcgatcccttcgaggccgagcccaccctgggattcgagcagcttatggaagcgctgaactagtccggaataatacggttggacaacacgtcacagcaccacaacaaaaagaccccgaccatctcggtcggggtctttgtcgtcagtaatgctcgaagtaatcgctccgagcagaaggtcactcggtgacggccttcttcagcagggagccagcggagatacgaacgccgtaggaagccggaatgtcaatctgctcgccagtgcgcgggttgcggccggtgcgagcggcgcgcttgacgcgctcagcggagaacaggccggtgagcttcaggccttcgccggacttcatagcctcgacgaacacatcctggaaggcgttaacagcagcctcggcctgagccttggtcaggttggacttctgggcgatcttcgaaacgaggtcagacttgttgtatgccataaagcatccttcttgggtcaggggacaagcacttttgcttagtccatgttgtcatcaatgatactagcgcatgtttctgcgaaaacccgcgttttataagggttttcacatctatttccccgaagggggtatgaaaatagacgaatcagacaagattatgcttgtcaagccacttcatggccgccgcgcccagcggaatgcgcagccagtagaacaccacgcggtgcagcaaagtggcggaaagcgccacgccctgcggcactccgaccgccacgaacgcgaatgtcagcgccgcttccacaccgcccagaccgcctggagtgggcactgcggaacccaatgcataggccagcaggaagacgaacgtcgtttcgatcggattcgatgaatggccgaacgcttgcagggccgcccagaaagcgagcccagtggtcgcgttctggaacagcgcgcccaggcagctgactgtgagctgtcggggctgggaaagcacgtccagcagctggttgatatacgtcttggccagcggcataagacgacgggtcacccagtggcgcaacggcggaatcatcatcgcaatggacagcaccacgaccacaacgcccagcacgataaccaacgtgtttgtcgggattgcgccggagaacatgttgcggccggtgaacaggccgatgatgaccagcatggagaagtacacggcgtaatacaccacgagcgcggcgctcataattgcggtcgcctgggtgttgcgatagccggatttgcgcaggaactgcaggttgacgaacgaggggcccacgccggctggcatggatacggtggcgaagccgcctgccacctggctcatgaagacgcccatattgtcacgcttgtgccgcgccatcagggaaccgagcgaaatcgacgagccgatccagccgcagacaccgaacgcgagcgtcaccaccgccatcaacgggttggcgttggtcagcgcggtgatgatctcctcgggcttcagttgggtgaagaccacgaccacggccacgatgaccagcagcatggtgatcatcgaacgccaggagaatcgggccagcgtcaccggttcggcggattccaccgtctcctcgtcagccagcgcggtgatacgactcctcaggcccttgagcagctgcttgtcccaggattccagcgcgcgcgtgggggaggggaccgcgaccttctgaatgaacggggccaaggccgtcagagtcgtgtctccccacgcctcgcgggcggcctccaccgccggttccacgccgatcagcgcggcgaacagcactagcagctgaactttgtcgagcgcggtgttggccggaccggaagcgttgtcgccgttgagccagccggcaatcacggcggtgccgtcttcaagccgggcgagcgtgtccggcgtgatgcgccggtgcgtatagccgcgccggctcgccacggacaggtagcgcatgtaggccacggcatccgccttggtaagcgtgttcaggttggcgggcagttcgatggtgtgtgcatccagcaccagaatcgcggattcgtcggtatcggcgatgccgtagggtgcgggcgcgggcagtttgatattgtgcagacccagcagcatggcgaaatgatgctggacggcgtcacgcacggaacggtcacgtcggatggacacactggtgaaacgcacccagtcccacaactgcttcagatagccgacggtatgggtctgcgcgtcgatgacggaaacgatgaaacgacggttgtccgtggtatccagatcgtagatgcgcgagccttcggccagatcgtcgtccagcgtgacggccagtgaaccgtggccgacgccgggctcctgatgccgaatcagcgaggcggtgtccagtccgatgcctttcagggcggcgaccagatcttggccccacacgcccttgttctgcgtgccgaccacgaatcggatcagcatgcccactgtgcggccggcggccatcgacaccagcatgccggtgaccgaatgccacgacagcaccaccatcaccgcagcgatggcatacaggatattccagctccatttgaccgtggagcgggtgcggcgtggcccggcggcggtcaggaaggacgccatgccggcgtagatgtcgggcaacagcccggagccgtatgaggtggcggctgagactagtgccattggcagggtgaaatcgttcagactgctgattgccgtcgatacgacccacaccatgccgtagccggcgaacatggccagcgcggacaccgcggcctgcagccattcccgggccagtagcaattgagcgagcacgatgatcacgatgacgatggtggccagctgcgtcagcacggtggaggggaagtcagccaaccagttgatgacctgggctgcggtgtgtgcgtcggattcgacgccgcgcgtcatgccgcccagatacacggcgaacaccatgaccacggcggccatcaacagcgacagaccggcccgggtcagatcgccgaagtcgcgcgtgcggcgcggagcgatgtcgtcgatgtacggtccggaatcgttgctgtcgtcggttgccgggctgtccggtccgctgacagcaaaactggccgaccggccgtcaccagaggcgatcggccggtcggtagtggaggaggtcgccttgtccgggcgatcttccgtagtggactgctcctgttcagtagtcatgaaatagttacctgacgcctgtccttgttcggttcagtttgcggtttggtttgtgactcagcgcagtagtgtggtggatgcgatgggctcgagggactcgcatcgcacctatttcagcggtcgaaagcgacgagctggctggccacaccggtgtaggtggcgggggtcagagccttcaagcgagcggcggtttccgggtcgaaggactgctggtcgatgaactgctcgacctgttccttgttgatggtgtggccgcgcataagctccttgaccttctcgtacggcttgtccatgcccggcaggcccttgagctcgcaggcgcgcatggcggtttggatcggctcgccaagcacctcccagttctcatcaagctcacgctcgatgacgtgggtgttcgggtggatggactcaaggccgcccatgaggttggtcagggcgagcaaggagtagccgagcgcggaaccgatgttgcgctgggtggtcgaatcggtcagatcgcgctgccaacgggattccaccagcgtggcggagagggtgtcgagcagcgagcagctgatttcgaagttggcttcggcgttctcgaaacgaatcgggttgaccttgtgcggcatggtggaggaaccagtggcacccttgaccggcacctgggcgaacactccacgggagatgtacatccacacgtccacacacaggttgtgcatgatgcggttggcgtgggagacggtggagtacagctcggcctgccagtcgtggctttcgatctgcgtggtcagcgggttccaggtcaggcccatgcggttggtgacgaattcgcgggagacggcgacccagtcgacatccgggcatgcggccaggtgggcgccgaacgtgccggtcgcgccgttgatcttgcccaagtactcctggttttcgatgtgcttgagctgacggttcagacggtagacgtagacggcgagctccttgccgagcgtggtcggcgtggccggctggccgtgggtgagggagagcagcggcatatccttgaattcctcggccttgccggcgaggtggtcgatgatgcgcttgaactccggggtccacacgttttccatcgcgttcttgacgcaacgggcgatggagaggttgttaatgtcttcggacgtgcaggcgaagtgcacgagggtcttcagctcgtcgttgatgttggccagctcgtccggagccttgtcgatctgatcatcgatgtagtactccacggccttcacatcgtggtgggtgatggcctcatgagcggcgtgctgcttgatgccttcggcgccgaagtcctcgggaatggcgcgcaggaaggcctgctcttcggcagtgaacggcttgacgccgtcaacgattggctggttgccgttgccctcaaagccgttggccagaagaatcatccattcgacttcgacacgcatgcgttcgcggttcagggcaggttcgctcatgtattcgacgagcggggcggtggccttgtggtaacggccgtcgagcggggtcaatgcgattgcgggggaaatatcggtaagcttcataacctccaagggtacttccagccgtgaaccgagcggctacactgtggtgtggcgttcccgcccgagccgcacaggtcaaggaacgcccgtgattcgattactgtgtgcggcctttaaggctaggagatcaccatgcctgcaaccaccattcatactcttccgaaacgttcggtcgccgtatcgtcgctgaaatggcagccgttggacatcgcggtcggtgccacactgggcgcggcctgcggcgtgatcttctggggattcaacttcgcgtacatgccgatctcttcggtgtttggcgcgattctgcccggtttcgccagcatcgtgcacgccgtctggtatttctccggtacgctggcggtgctgattctgcgcaaacccggagcggcgctgtacgtgaaccttatcggcacgctggtcgaaacggtgattggtagccagttcgatttgggcttcgtgattatctcggcgctgctgcagggtgttttcgctgagattccgttcgctttgacccgttaccgcatgttcaatctgccgatttccattgcatccggtgcgttggtcgccttggaatacggcacatatctgatgctgtttcgctacgtgggtgtgtcattcgtcagcccgcgtggcatcgtgcacatgatttccgaggtcaccggcggcgtgcttatcagcggcgtcatggcctggtatctgatgctggccatcgccaaaaccggtgtgctcgaccgcctcgcatccggccgcgcactcatcgagcgacgcgcctgacactctttgcgcgccactttcccgggaatgttgtgctggcggagaggaacccaagcgcattagcgcaacattcccgggaatgttgcgctaatggaagggaatacgggtgcgtcggcgctgccttcatgggactattcgagaacagtcatcttagctacttcactttgctgagatgccctatccgcactcattctggcaccagttcaggcctcgacaggttgaatgcctgctgtcatctgcgttatgtattcgtggatgagttccgccatttctgggtctttcatggcctcattgaacatgtcgtcaaatcgttccgtaggcatgatattcctccttgcggcaattctcgaaaatagtgaagagccttctgcgggacgtacgtactttgaattcaaccattgagcccttacgttatgggagtgctttgccgctgaaaatcaataggattatgaagtgagctgattgtcatgggcagcagattgatgaggtctatgtaatgatgcgacacgcccattaaaaataacactaaagtaacaaataagaacatagtgctgttgtatatgatataccgatatatccaatactgatggcaggccgtgcgttgtgttgcagagaaggcagcggttaagccatttcttgaacgtgagacgaagataccttgcaaacgttgatgtttcaggaatgttcggatgtgggatgatgtgatgttcgattgcgtattgtaaaaacgacgcattgctaatgtcgatttgatgtattgatatatcaatgatttaatagttttcgtcagataaatgaacatctgacttgtctcttcaaaggtgaaaggaacaatgatgaagacttggatgaaaaccgtagctatgggagctagcattgcaatgctgattggcgctgggggttgtggatcaagtcgtggtggttcggcgatctcgtctgaggcgagcggtaaagatccgtcctcgatatccgttgggatttcaatgccggaacagcagctggaacggtggaagaaggacggcagcaatcttaagcaaatacttgaaaagcgcggctacaaagtcgttctacagtatgctgatggcaaggtggaccaacagacgtcacaaatccagaacatggccaaccaaggggccgacattgttgttatcgcttctcttgatggtgtggcaaccggtgctgcggcagaaacagcaaaggacaatggggcgacagtcattgcatatgatcgcatgattatgaatacagatgcggttgattattacacaagtttcgacaatacaaaaattggtgaaatgcaaggagagtatatagttaagaaactcggccttgaccagggcaagaaaggccccttcaatgtggaattgatgtcgggttctcctgacgacaacaatgcaaaatactattttgaaggctcatggagcaaactgggacagtattttgagtccggagtgttgcaatcccggtcgggcaaagttccgaaatcagttgacgattggcaaaccattggtatccaaaactgggatcgacaaaaagcccaggctgaaatggagaatcgtatcaactcattctatggtgatggcgaacggttggacgcggtgctggctcccaatgatgcactggctttgggcacagtcaatgccgtggaatctgctggttgggattactacccgattatcaccggtcaggatgctgagaaggccaacgtacaggccatcgtgcaagggcgccagaccatgagtgtatacaaggacttccgtaagcttgccgatattacggccggcattattgacgacgttgttgcaggtaaaactccgaagactcaagaaacatatcctaatggcaacaaagacgtgccttcgatcatggctgttcctgaagctgtcgacaaggataatgtcaagtcattgcttgttgattccgggtacatctcagcagaagatgccggcttgaaatgacaccgaatggcaatgaatagggaagagctgaattatgacaccaattactgagtcccaatatcaaattgataccaaagataatcgagatttgctcaatcgggaagcgcaagaattagtggatttcggcaagcgcttcgcgtggccgggcgggggtgcctcatatctcgatgatgaaggcaatccggttccgtcggaaggcctatatgcatatgagtcgggacgatatgctcatgcctacacgcttgggcttctagccggatatgtgcctgaagatgaggctttgccgttaattaagcaggcgttggacggattcactactgggctgttacttgaccgcgaacacgggggctggtatacccgcgttggaaaagaaggaaccccggatcccaataaaggatgttatgcccatgcctttgtgattttgggtgcggcttcagcaagtcttgtgcatattccggaatccagagcattgctagataaggcgttgaaagtatatgatcgctatttctgggatgaacagtatggcatgccgagagatacttgggatacctcttttactcattgcgagcagtatcgtggcattaattcctccatgcactcggtggaggctttcctcgcagcaagcgatgctttggaagagcctaaatataggttgcgcgctggccgaatgattcagcgaacagtcggttttgcatcagactgtaactggcacatccccgaacactttactgaagagtggaaacctgtatacgaatacaatgctgagaaaaaagatgatcaatttaagccatatgggaccactccaggtcatagcttggaatggggaagactgattacacaatgggccgtaagctcctatgatcatggggaaatcgacgagtcgactcgtgatcgatatattgaggcggcggaaaatctgtttgccgtagcggtcgaaaccgggtggaacgtagatggtcaaattggcttagtgtacaccgttgactgggagggccgaccggtagtgcatgatcgtatgcactggactctggctgaaggcattgataccgcttcggtgctgtaccggattaccgggaaatcgatatatgccgagtggtatgcgcgtttttggcaatacgttgatgaatatatgattgaccatcaacgtggcagttggttccatcagcttgatgccaacaatcaagtgattggcacagtatggccggggaagcctgatatttaccatgcgcttcaagctacgctcattccgtgcgtggcaaaagatcgaattggtctgtctattgcgaaggcgctaacagactaattatacaagggggcgccgcgctgcgtggttgcggtacggtgccttcatcatgcacaggggcattactatcggaggaggtagctgtggctacgaacggtgacgtgattttggagatgcgtcatatcgtgaagcgtttcggcccggtcaccgcgttgaacgatgtgaatatcatggtcaagaggggccaga

SEQ ID NO: 49 - DNA, 93626 bp, Unknown
  R30_18m  MAG No. k141_19415
cctctccttccggttcgcgcctcatcgtacggccttcgtaaccgatgcaatggccgcgaccgactgcccggacggcgcctacaagttgggtgcactggacgtgaacgtggtcgacgggcatgcgcgtttggtttccaacggcgccatcgccggctccactctgctgctggaggtcgccgtgcgccgtgcggtgtgcgaactgggcttgagcccggtggacgcggtcgaggcagccacattgacgccggccaaggcgttcggcttcgaccggccgaacccggtcaccggggtgcctatcggcctcatcgcccccggcttcgccgccgacttcaaccttgccgatccgaccgattggacggtcgaacaggtgtggtgcgcgggccgcaagctcaagtagcagtaggccgaccggttgacgaatggaaagcattcgtctacaagcatgttcaaatggtgacatgatagtatgttcatctcaccatttgaacgttattcacgtcgtaatacaagaatccgcaatactgctcgataccgcataaaaccggccatggtcgccacaagcgaaacataagtcgatggctgtggaaacgcaggagtaacacatcctcaccatagtcaggcggtaatccacgcccgcagtgatggcgtggaaacaagttatgagagaggattcctgttgaattccaagaagattctggccgccgccgtctccgtggccgccatcgcatccctgaccgcctgcggcggtgtgaaggatgacaccaccgcaggcgccgattccggcaacgccatcaccatcggcaccaccgataagatcaccagcctggaccccgccggctcctacgacaacggctcctacgccgtgcagatccaggtgttcccgttcctgtatgcccaggactacaacacctccgagctgagcccggacatcgccgccgatgacggtacctggaacgatgacggcaccgaattcaccgtcaagctcaaggacggcctgaagtttgccaacggcaacgacctgaccgcttccgacgtcaagttctcctacgaccgcatcaagaagatcaacgacccgaacggcccgagctccctgctcgccaacgtcgaatccgtgaccgctaaggacgacaccaccgtggtgttcaaggattccgtgcctttcgacgtgactttgaagcaggtcatgtccagccccgccggcccgatcgtcgatgaggataccttcgacgccgacaagctcaccgacgccgacaccatcgtctccaagaaggccttcgccggcccgtacacgctgaccgccttcaagatcaacgagtccgccgcctacgctaagaacgactcctacaagggcctgaccccggccaagaactccgccgtgcaggtcaagtacttcgccgacgcctccaacctgaagatggccgtccagcagggccaggtcgacgtggcctaccgctccctgagcccgaccgacatcgaggacctctccaaggactccaaggtcaaggtcgtcaagggcccgggcggtgaggagcgcttcatcgccttcaacttcaagattcagccctacggtgaatcccagcccgacgccgacgctaacaaggccaaggccgtgcgccaggccgtcgccaacctcatcgaccgcgaagagctctccaccaaggtctacaagggcacctacaccccgatgtactccttcatcccggacggcctggccggtcacgatgacacgctgaagtccgcctacggcgacggcaacggcaagccgagcaccgagaaggccaagaaggtcctcgccgatgccggcgtcaccaccccggtcgacctcaagctccagtacaacagcgaccactatggctccgcctccgccgacgagtacgcggccttgaagtcccagcttgaggaaggcggcctgttcaaggtcgacctgcagtccaccgaatggacccagtactccaaggaccgcgtggtcaccgacgattccgacggtgtgtacccggtctaccagctcggctggttcccggactactccgacccggacaactacctgtccccgttcttccgcgacggcaacttcgtgaacaacggctactccaacaaggaagtcaacgacctgatcgtcaagcaggccggcgagaaggatgcctccgcccgtgaggacatcctcaagcaggtccagaaactcgagaccgaagacctctccaccatcccgctgctgcagggtgcccaggtcgccgtcaccggcacctccgtgaagggtgtcaccctcgacgcttccttccgcttccgctacgcctccgtcaccaagggctgatccagcatgagctcccctctttgaggggggggggagctgtctggcgacggcagactgaggggagcccaactcgtatgactcccctcagtcggcttcgccgccagctcccctcggagaggggagcctttattgctttatataccgattaccaacaccaaggagcatcgcgtgtcagacagcgccacagcgacctccagcaccactccggcgaaagccaagacgaagaagaaccgactgtcaggtagtttcttccgcttcgtgctgacgaggttcctcctcattatccccaccgttttcattctggtcaccatcgtgttcttcgtgatgcgcgccaccggcgacccgatttccgccgccctgggcggccgcctgacacccgccgaactccagcagcgcatccacgcggccggctatgaccgcccgctgatcgtgcaatacgtcgactatcttggcggcctgctgcacggcgacctcggcacgacgctgaccgataaccagccggtgatcagcatccttacgcactacggcgccgccacattcgaactggccttcctcgccctgatcgtggcgctgatcgtcggcatcggcctgggccgactcgccgcccgcaaacgcgaccgtgccgccgacgccggcatccgcatcttcgccatcctgtgctacgccaccccggtgttcttcctcggcctcgtgctgaagctcatcttcgccgtctggctcaacatcctgccagcctccggccgctccgacctgaactccgaaatgcagttcacccgtctggtatcgccgaccggcttctacatcatcgacgccatccagctcggcgacatgaacgtgctcgtcgacgtgctgcgccacgccgtgctgccggccgtcgccctaggcctgctgaccgccggcgtgttcatccgtctggtgcgcaccaacgtcatctccacctacaattccggctacgtcgaggccgcccgctcgcgcggcgtctccgaaaagcgcctgctcaacaagcacgcctggcggccggccctgatcccgatcatcaccgtcatgggcatgcagatcgccctgatgctcgccggtgcggtcctgaccgaaaccaccttcgaatggaagggcctgggcttcatgctgtcccagtacctgaaggcccgtgacttcgtggccgtgcagggcatcgtgatccttatcgccatcatcgtggccgtcgtcaacttcctcgtcgacgtcatcgccgcgcttatcgacccgagagtgaggtactgagatgaccaccgcatcctccgacaagatcaccgtccccggtgacgaccgcctcaccaagctcaacgtcagcaccaagacgccgttctggaccaagattccaatcatcaaggaactgcgcgtggcggtcggctggcagaagggcatgctgatcaccggtctcgcgatcaccgcgttcttcctgctcgtggccctcttcgccccgctgatcgccccctacggccacgcccagatcaaggccgccgacggcacgtccttcccggcgcaggccgcgccctccgccgaacacatctggggcaccaccgccgccggattcgatgtgttctcccgtgtggtgtggggtgcccgcaccgccgtcatcgccatcgtcgtggccgtgctgctctccatcttcgccggcgtgctgcttggtctggtgtccggctactacggtggctgggtggaccgcatcctggtgatgatcgccgacgccgtctactccttcccctcgctgctgctcgccattctgatggccatcatgatctcccacggccagtccggcctgtggagcggcatcctggcctccggcatctccatcaccgtggtgtacatcccgcagtatttccgcacaattcgcgccgaagtgatccgcatcaaggaatccgcgtatgtcgagtccgcgcgcgtggtcggcgcctccacctggcgcatcatgaccaagcacctgttcaagaactccacccgcacgctgccggtgatcctgacgctgaactcgtccgaagccatcctgaccctcgccggcctgggcttcctcggcttcggcatcgagccgaccgccgccgccgaatggggctacgacctgaaccgttcggtttccgacgtgaccgccggcatctggtggaccgccgtgttcccgggcatcgccatcgtgcttatcgtgctcggcatcacgctcgtgggcgaatcgctcaacgatctggccgacccgcgtctgcgcgcccgcaagtccgccggcgaagtggtcggatcgatcgaagacacgtccgtcgacccaaacgagaagccgtccgcacgcaacgaggtgatcgccgaactcgacgcgaacgtcgacccgccggccaccgtcaccgaccatgacccgaccatcgtcgcctccgaatggaccggcgaaggcaagccggaaggcaaggagtgagagatgagcgaagacaacaagaatctcgccgatatcaaggacctgtccgtctccttcatgaccgacgccggttccatcaaggccgtcgaggacgtgaacttcaccattccgcgcaagaccgtggtcggcgtggtcggcgaatccggttccggcaagtccgtgaccgcgcgctccatcatcaagctgctgccggagacggccaccacctccggtgccgtctacctgtccaagcgcgatggctccgattcgctggacgtgctctccctgagcggcgaacagctgcgcgaagtgcgtggttccgaggccgcgatggtgttccaggagcccaattcggtgctgaacccggtgtacaccatcggctggcagattgaagagggcctgcgcgcccacggcatgaaggacaagaaggaactgcgcgccaaggccatcgacatcctgaagaaggtcggcatcccggatgccgaaacccgcgtggactactacccgcaccagttctccggcggccagaagcagcgcatcgtcatcgccatggcgttggtgctgaaccccggcctgattctggccgacgagcccaccaccgccctcgacgtgaccgtgcaggccgaaattctcgacctgctgcgcctcgcccgtgacgagttcgacgcctccgtgctcatcatcacccacaacatgggcgtgatcgcggacatcgccgaccaggtggtcgtcatgtaccgcggccacgtggtcgagcagggcgacgtggagcagatcttctaccatccgaaggacgactacaccaagcgactgctgggtgccgtgccgcgcatcggtcagaagctggtcgtgcgcgaccgcgagggcaagccgatcgagcgcaaggccgattggcgcgaacagccgatcgccgttgaggccaagaacctgaccatcacgtacccgggccatctcatgcagcccgacttcaaggccgtggacggcgcgaacttcaccatccaccgctccgaagtgctgggcctggtgggcgagtccggttccggcaagtccaccaccggccgtgccatcgccggcctgcagaaggtgtccggcggctccctgaacgtgcttggcatcgagatgaacggcgtcaaggagcgtgacttcaagcccaagcgcgcggacattggtttcgtgttccaggatccgggctcctcgttcaacccgctgatgaccatcgcggagaatgtggccgagccgctgctcgtgcaccacaagtacggttccgtggccgaggccaagaactatgtgggcgacctgctggagatggtccagctgccgcgcgcctacatgaaccgtttcccgcatgagctgtccggcggccagcgccagagggcgtctttggcgcgtggtttggcgttgaagccatcgctgctgatcgccgatgagccgacttctgcattggacgtgtcggtgcaggccaaggtgttggagctgttcaagcgactgcaggcggaaatcggcttcgcgtgcctgttcatcacccatgatttggcggtggtcgatatgctcgccgaccgcatcatggtgatgcataagggccagatcgtggagcacggcgatgccgaccagattatgcagcacccggagaacccgtacaccaagaagctgctggcctccctgcccgtgcccgacccgcgcgaacagcagcagcaccgcgcccacctccacgagctcctagcccaagaggcgtaatcgcatagcattggagctccctcgtcagagggagctaactttatatccgctagtactgctgcccatcgaactggaacagggcgtgggcgtcgccgtgctttttgttctcgatgtaagtatggaacagctccagccgctcgctcgtgctggccgccaggggagtgggcaggtcatccagatcgaaccagccgacgctgaggctttcctcgtcgcccacgaacggctcggcattgccgccgggcttcagggcgcacaggaacgaatgatccatgtacatggtgttgtcgccattggcgtaggtcaacaccttgtttgacgaggtgacggccaccaaatcggtgacgatggcatcgatgcccgtctcctccttgatttcgcgcatcaccgtgtccgccggctgttcgcccggctcgttgatgccgtagaccatcgcccattcgcccgtgtccgaacgacggcccaacagcagttgaccatgttcgttcagtacacaaccggtcacgccattgagccatagcagatcatggccgatcttcttacgcaattccaacacaaattccggagtaggcacattgcctccttagtagaaaaaaggagctccctctgatgagggagcttaagggttacttggcctgggcagcctgcttaatatggtgcgcttcgcgcatgatttcattttcctcgcgcttgtcagcgttcggcgtcgcctacaatcagtccaccggactgattgctttacggctccgcatccacgcttcgacgtcgtcgatctgcttcgggatgccggcggaaatccattcggggccattctcggtcatgagcacgtcgtcctcgatacggatgccgatgccgcggtattccggcggaatcagcagatcatcctcgcggaagtacagaccgggctcgatggtgaagatcatgccgggcgtgatcttcgcgccctgataggactcatagcgggcctgcgcgcaatcatgcacatcaagacctaggtggtgggccacgccgcaggcgagccaacggcggtgctgctggccttgcggggacagtgactcctcgacgctcaccggcagcagaccccaatcgtgcagacgctcggcgatcacacgcatgcaggcgtggtggatgtcggaataggtggcacccggcttggcggcttcgaaaccggcctgctgcgagtccagcacggcctggtacagacgcttctggaagtcggtgaacttgccgttggtcgggaaggtgcgggtgatgtcggccgtgtacagggaatcgacctcaacgccggcatccaccagcagcatgtcgccggtcttcaccacaccggtattgcgcatccagtgcagaatcggggcgtgggggccggaggccacgatggagtcgtaaccgatggcgttgcccagctcacgggacacggcgttgaacgcgccttcgaggatacgctcggaacgcggcttgtcgagcgcggccggcagtgcggagagcagacggtcgaagccgtgcttggtggcgtccacggccttgcgcatctcgttgatttcgtagccgtctttgaccatgcgtgcctcggcggcgaactcgtgcagcttgtcgtcggatgcggagttcttgtccggatcggcgaaaccgttggcctcgcggatggactcgaccatcgaggtgatttcgggatcggtctcgctgaccacgcgcacacgcacggcgccggcctcggcacccacgtccttggacagggcgtcggccagctgggcgatgtcgtgggtctcgatgccggtcatcgcctgcatctccttgaggccagcacgcgggccaacccagtattcgccgtagtgggcggacatgaagaagtcctcggtggagttgtcggcgcgaggtgccacgaacagttccggagtgtgcgtcttgccggcggcggcttcgggggagtcggggtcgaccgggttcaggaccagcacggcgccggcctcgtaatcggaacccagaccggtgtagtaggcgaacgtggtgtccgggcggaacatgtaatcgcaatcattgttgcgcaccttcggctggccggccggaatgaccagacgctcgcccgggaaggctttgcccagcgcctcaaggcgggctggcgtgaacttggaggattcgagaggcttgatctccggatcatcgtcggcccagccggacttcataaactccttgaatgcagccgactgcgggcgcagcgagcggttgttcacacggtcgctcatcgactggttcgcgcccggcgccgtagcgcgctcctcggcctcatattccttgtccttggcggtgatcacttcacccattgccactctcctgtatgtagttgttgtcgaatcatcgattcccacctcatactagtcggctttatgcgatgtgccacgattgacggctgacggtaaaaccaagtacggaatttggacggtcttccggacatgcccatatggcgagtgcatcgggctggaatgcgggcccgtttattgttctcggtagggaaggaggggcatgggctggagcttgccgattgatattggcatattttgcgggctgaatccatgtgaacccatgcgatgaaggttcatcgcatcacgggacccgctgctctgcggatgcctccatctggggcactctggctttgagcagttttacccgcagcggagtgcgttcgatgacgtcggcgtatgtgaaatggacgatttcggtggcaccggctcgtttcagtccctcgtcgcgtgctcgttccttggccaccacctcctgaatgctgcggttatcggtcatggctgggtccacgtatttttgtgtgccgtcatattcggccactatcacgcgcccgtcatcgagcttccatacgaaatcaacgcggtgctcggtattcgtctgcgggtcggtcaccgttacctgaatacgcggcgtgaggaagcgatcctcgatgatggtgcctcgcgcgagggattctccaccattctcgctcctttcgtttgcatagcgcagcaggcggaatactcgggcataatcgattctccattgaacgcagtcggcggctatctcttccttggttattcccttggcaagggccgaatcaaagatcggcaacgcaaaccgaaaatcaaggtctatagcggcctcgaccaaggttctagccggtgatatcagggataggccggaggcctcgtaatgtgtcttcggattgttcatatcgggcatataaacatgtcgtaagcgctgatggcattgacgagatccatgatcggaagtcacgatggttatgcagccatcatgcaaatgccattgatgttcgaatccataggcgcttactgccaccaagccgccaaaaacccactgaggatgctcttgcgcaagagcgcgggccatatgcaacgttcgctccggcggcgtcaaaccatcccagtatgcggtatttgcataaagactgggaatgccgtcatacactttcaacaactcgccactctgggcacggcggcgtagagcggtctgttccgcttcatttcttgaatagacgcatctcagctcattctgcgcggctgatatgagcgaggccactgctttgtgtgtcttcatgacgtcgagcgtagccggaacgaagcagcgtaagtatgaatttcagccattgtggttctagcctcggagcttggctgtcttggagtgagatattcccgataatttcaaggtattaggccgctaattcggaatagtggataacatacaaaacttatccaccatcagtaatgtcattcgaacaacgtgctttggggattcgaacaagatatcatcggcgaaggcggatgtagctggtagagggcggcgaattgacggttaacggtgcttatgctttgtacgccgtcggtgctggttcagatattggctggcttctgtctgagtgtggaatctagcgtcggcgtgagtccaatggttgtatcgtggccgacgatttgctgcaatttattggcggcatagatccagggcttggacggctgccgacggtgagagcagtcataacagtgaatgagcctctgcgagttcaaaagatgatgtagcggacgtttgtgagagtcgtttccggggcaagacatggtcgattgacgatgttgaaatttctcagcgacggcagaatggcatgccttggcgaggagacgacactgagaggcgatggagtcgggattaatccaggttttggccagctaccgactcgcaagagcatcatagcgtcggtgtgccgccagaagctggcactgtaccgacgctgaatagcatcagcgtcgccggacatacaagttttggattgcagccgactaagaatgggatgccgacggcaagagccgcattgcaactatatgagatggcttcactgtgcgcgctgcaggaaaaggccgcccgcgcggcggcgacatatgagacggtttcactgtgcgcgcacgataaaccaccccggcggctaggatagagggaattgagggagtgcggctccacgcgtgaaggcaagaatcccgaaccatgcagggcaaacctgtgcgaggggagcttcctgcgcatgcggaagcggaatatatgcgggcatgcgtagacatgacgagaatggcacgaacacgtaagtggcatacgcactccgaacggttcaacagcaacacgagcagaggtcagaagaggatatgtcattcgagcatccgaatcggaacaacgagagcatgcgggacgtcgaactggacatcatgagccgcccgccggagcataacaccaccaatctggatctcgaccggatgaacctgatgctcgacatcctgggccacccggagcagtcgttccgcgtgattcatatcaccggtaccaacggcaaaggctccaccgcacgcatggccgaggccatctgccgcgcctacggcatgcgcaccggcctgtacacgtcgccgcatctggagaagatcaacgagcgtatcgccatcgacggccagcagctgtccgacgacgatttcatcgacatctgggaccagaccaaggatctcgtggccctggtggacgccaagatggaggagcaaggcaagccgaagatgagcttcttcgaggtgctcaccgccatggccatctggaagttcgccgacacgcccgtggacgtggccatcgtcgaggtcggcatgggaggcctgtgggacgccaccaacgtgctcaacgcggatgcggccatcatcggcccggtggacatggaccacatgcagtggctgggcgacaccgtcgaacagatcgccaccgagaaggccggcatcatcaagccgaactgcaccgccatcatcgggcctcagccgcatgaggaagccgtcatgccgattctcaccgaagccgccgaacgcaaccacgccatgctcgtgcgcgacggctacgaaatgaccgtgtccgaccgtatggccgcagtcggcggccaggtcgccaccctgaccacgcccaacggcacttacgagggcgtgccgatcgccaagttcggcgagcatcaggcccacaacgcgcttgccgcgcttgccgcctctgaagtggtgattccggtcaatggcccgctggacggcgacttggtgggcgaggcgttgagctcggtcaagattcccggacgcatcgaacagatccgcacctcaccgaccatcattctggatggcggacacaacgtgaatgccgccgaagccctacgcaaggccatagaggaaagctacgacttcaagcagctggtcggcgtggtcgccatgatgcgcgacaagcaggtcgaggaatatctgggtgttctggagccgatcctgagctccgtggtggtcaccgagaactcgtggcgcgagcgtgtgatgccggccgatgagctcgagaagattgccgtggacgtgttcggccgtgaccgtgtgatcaaggaagcgaacctgcccgacgcgattcaggctgccgtcaacatggtcgatgccgaggacgagctgggcgtgggctacggccacggcgtgcttatctgcggcagcttcgtcaccgccggcgacgcacgcctgatgcttgaggagcatgccagccccacgatgaggcaggccatggccgtccatcagccggcggtcgacccggacgattcggatcggccggcagacaaggccgaggatgaggccgccgacaacctcgaggattcggtgagcccggacgacttcgacgtgttcgacgtcctcggtctcggcaaggaacaggccagtgacgtcggtaacgccggcaccggcacggccagcgccgacacaggcgccgtcaccgacgattccgccgacgcccggtaacccgaatccaaggcatatcggatacccggacgcccgacatacggaaaacagtctcacgccatgtatctcaaggaactcaccctccgcggattcaaatccttcgcctccgccaccacgctgcgcttcgagcccggcatcacggcggtcgtcggccccaacggttcgggcaagtcgaacatcgtcgacgccctgacctgggtgatgggtgagcaaggtgccaaaaaccttcgcggcacttcgatggaggacgtgattttcgcgggcacgtcctcccgcccgccattgggccgtgcacaggtgagcctgaccatcgataattccgatcacacgctcgatatcgattacacggaagtcaccatatcccgcaccatcttccgcaacggaggctccgaatacgcgatcaacggctcgcaatgccgtctgctcgacattcaggaactcctctccgataccggtcttggccagcagatgcacgtgatcgtgggtcagggacgattggatgcgattctgaaggccgacccgtccggccaccgcgcgttcatcgaagaggccgccggcatcctgaagcaccgcaagcgcaaggaacgcgcgttgcgcaagttggccaataccgaaacgaacctgagtcgacttgacgatttgctgggggagattcaccgccagctcggccccctcggacgccaggcacgcatctcccggcgcgccgacgcgattcagatatccgtacgcgacgcccaagcacgcctgtatgccgaagacgcccaacgctcgatgaaccgccgcgacacggtacgtcaagagcttggcgatgtgcgcaaccagctggccgtcgcccaacgtgaactcgcccacgtcaaagtacgcatcgaacaggtcgaggcgttgagctctgaatccagtccggccatcgccaaggccaaccaatactggcatgaattctcacagacccgtgaacgactgaacgcgctcgcccagttggccgaagagcgcagccggtcactcaccggccagatcgtcaccaacttcggtgaggatcccggcatgctcgtcaaacgagccgaggaactggagtctcaggccgcggcacaaaccaaggccgtggccgatgcacgcatcgcactcgacaaggccaccgaggaacgtgccgacgacgagaagaagcttgcctcagtccgccagaccttgacggaactgcgcaaaaccgcacaggagcgcgatgcgcagatcgcccgactgcgcgaactcatcgcccgcgaggaatccgccgtgcaactggcgaccagccgcgccaaggattatgcctcccaacgcgacttgctgacttcccagcgcgacgatgcccagcaacagctggacgcattgcgcagcgaagcagactccattgccgacgatgacggtgccgcattggacgccgcgcgtgcaacgctcgccgaatgccgcgaacgactgaacgaactcgccgataagcagcgcgagatacagtccaagatcatctcgctcaaatccaaggccgatgcgcttgccgacacgctaggcagccgcaatgcctccggatcattggaacgcgacacggacgtggcctcgcttggccgactcaccgacttcatccatgtggccgaaggctgggaagatgccgtggcccacgcgctcgaccagtatgccagcgccatcgtggtacccgaggcaggcaacatgttgcacgccctcgaacgcgctcgggaagataagctcggcaaagccgtggtgctgaccgcgagcattgccggcgatcccgccacagagccgggcacggagtcggaggagagtagcgccgagaacacggcggccgccccgcaatcgggcaacgcgctggcagcactcgtcaccgcgaacccggatgcaaagaacccggcacaggccgaagctgtcgtgcacaccgtgcgtctcctgctggctgatgtagccatggccggcaccgccgacgaagcacagcacatcgtggcatccggcgaagccatgcgggccgtcaccaagaacggcgagaccttcacacacggcgtggcggcggtcggcggctcttccatctctcaatcggacctgtctctggccgcccgtcgagacaaagcattggcacaggtcaaacagttggccgcccaagacggcggaatggctgagcaagtggccgaggccaaagccaaacgcgatgaagcggcccgactcgtcgaccaggaatccgccaaacgcaccgaagcccggctcaaagcccaacaggcggagaaatctctgaaatccgccacagaccgcgtcgcatcgttcacccgtcagcttgagcagctggataggaaaatcaccgagacccaagagaatcgcaacgagcatcagctcaagctcgacgatctcaatcgcgctttggcatcggcccggcaatccacagcggaacatgccgatttcgacgaacttgatgaacgtgaacgcacgctggagcgcggactgaacctgactcgcgagcatgaggtcgccgcgaaaatcgcgtggaccgaagcaagccgcaaaggggagtcactgagccgacaggccgggctgctgcgggacaacgccagagaagccgccgaacgccgcgcccgcatcgaggcgttgaacgatcgcagatgcgagcaggccgcacacctgcaaggtgtggccgatgacgcgcgagcagtggccgccatggtggagcatacgctgcatgacgtggccgccaaacgagacgagctgcaggccgccgcctccagccatgacgaggaactcaaggccctgcgcgcgcagcgcaaccagatcgagcccaaggtcaccgatctgaccgggcgcgaacatgccttggatgtaaaccgcgaacggttggccgccgaatccgggcagctcatgcagaaagtgtccgacgaactcggtctcactttggaggaattggttagtggttacggccccgaacagccggtgcccgtgctggatgatgagggcaaccctgtgccgttggatgagacggaagctgaggctgggaccgaagagggagaaaccgggggagagaccggcaccaacggcgattccgccctctttaagaccgtgccgtataaccgtcaggagcagaagaagcgtctcgataaggctcgccgcgatctggccgcactcggtaagatcaaccctttggccaccgaggaattcgaagcgcttgaggagcggaacaagtatctcaatgatcagcgcaacgatgtggtcaaatcacgtgacgatttgatgcagctcatcaaggatctcgattccacgatggtccaggtgttcaaatccgcgttcgacgataccgccgaggcattcgagcagatgttcgccacgctgttcccaggcggcaccggacgactgcgcctggaaaacccggaagacatgctcaccaccggcgtactggtcgaggccagcccggccggcaagcgcgtcaaacagctgagtcttctgtccggcggcgaacgttcgctgaccgcgctggcgctgctgttcgcgattttcaccgcccgccccagcccgttctatgtgatggacgaggtcgaggccgcgttggacgacgtgaacctgacccgtttgattaatgcgttcaatgagctacgcgcccatgcgcagctcatcatcattacgcaccagcaacgcaccatgtcgattgccgacgcgctttacggcgtaaccatgagagccgacggcgtaacagccgtggtgagtcaaaaactcgaacgataaacgaatggttcccgctgacaggaactggtaccacaggtgacagagggcggtccatatcgaaagaccgccctcagtctcgcttcgttcgacagctcccgccagcgggagcggggcggtattagcgcaatgccttgcgtacgccttggatggtttgcagcgtcttgtagaagaccttcttgatgggtacgtcgcgggcgggggccaccggggtgatttcctcggtgaacttgcacttgaactcgttaaggcccttgagagacggcgcgaaatcggagccaatgcccatcagatcgtattcagtaataccctgcgagcccaggatgcagcattcggaatacagcagcttgtcggtcacatgcagacgcataacctcgttgcgcatgccggcatagtagcgcaccgcatgcgtgccgttcacggtgacaatcgaccatgccaccacacggtcttcaatacgtgcggcgaacacacggcaatgatcggcacccaacgcgccgatcatatcggaatagtcgctcatcggagcaggcgtgaatccatcgcgctggccggtctcgaccatcacatcgtaatattcggagaaatcggccagcgccttatccgtctcatcggcaacctcggccgggcactcgcgcagagacttgcgcacgtcacggcgtccacgacgcttcatccgagccagaatctcatcatcgccaccagtgacgtcgatgaccacggtctggtcgtacggcactgtggacagcaccttctccgtaccatcggcgaaccaggtgtcgatacgcaggaacgcgatgttcttgtcggccttcttgacggtgtccacgatggcgtcgacgacctcgcgctcctcagcttcggtgggcttggcagcccacgccggcccatgcatcgagcgcagataatgataaccgtgcgtctcaaaatcgataaaggagatcacggcgaccaattcaccatcacgcttgatcagataatcgccccatggcgtgcgtccgtcgatatccgcctgaaaaccagaccaaaccttggtctgttcgataggcaacgtgatgccggccttctcggcttcggcttccagtgtggctccgtcaactttctccaacgtgatcattacgattcagctatcctttttcgttcgtatccgtatgtcgtgtttctggtttggtcgtattgcgcgtgatctgatgtgggccaatcggaatccgatcaggatctgattggccggaatcccgtcacaagccaaacatgcgttcgaccacgtgatcgtcgccgtcgaacggcacatgcttgtgatggtccttgatccaacgctcgttgcccttgccgataatcagcaggatgttgaatcggtcggcgtgcgcacgggcatcgtaaatggcgttggtgatggccgtcggacggtcggaaatcaccgtggaggccacatccttgttcgtgatgtagccttgcatttccatgcagatgtcgatgaacggctcggtgtccgtatcttcggcggtgaaaatgaagttcgcgatacggttctcggcagcctcgacgatttccttacgacgatcgtaggccttgttgccggccgatccggttaccagcgtgatacgcgggttttcctcgccccaacgctcgtagacgaagtcaagcagcgcggtgacggatgcgtagttgtgcgcataatcgacgatggcgagcgtgttcgactgcggatcgcggaactgttccatacggccggcgatacgtacggattcgatggcgtgcagtgcgccggcgtcatcgagcgatacgccagccgcatgggcgatggcgatggccgccgccgcgttgaggtagttgaagtcgccatcgatggacagatggtagtcgccaagggtctgatctccgtcggcgatgtggaaggaggcgtgcgccgtgtcggcgggccaggcgacgacgtccgcactggtgccggcattatccgcgtcatgcagggcgaaggtggttgcgccgatgccggctgccgccgcgtcctcccgcaacagatcggcgtgcagactgtccgcgccgagtaccagcgacttcgcgttggcgatgatctggcgcttgcaatacaggtaatcctcgaacgtggggtgttcgatcgggctgatgtggtcgggggagatgttgaggaacgcggccacatcgaaagtcagtccgtagacgcggtccaccttgtacgcctgggaggagacctccatcaccagatacttcatgccgttatcggccgcctcgcgcatcatgcggaaggcgtccatcgattcgggcgtggtcagatcggattcgacgtaggtgtggccgtcaaggcaattatcgaccgaggagaacaatgcggccttgccgccggagacggcgttgataagcgcctgcgtgaagtacgaggtggtcgtcttgcccttggtgccggtgacgccgatgaccgtgagctcgttctgcggatatccgtagaacgcggcggacagcaggctcatcgccttgcgtgcgtcgttgacgatcaggccgggggcggcggttgcggctgagtactcggtttcggccacgtatgcggccaggccggcttcgtcgatgccgttcagatactcggccttgaatcggcccttgcagcacagcagggtgcccggcgtgaccttgcgggtgtcgtaggtgatgccggcgaacggttcatccgccgaagcgatacgggccgggtcgtcggtccagacatccccttggatgatttcacgcagcagatggtgttccttgagcaggtcagcggccgaagccaaagtcaaagccataattgttactccctattatctagccgatacgccattctacaggtggggtgtagcgtgttgtggctcacacgtcatcgaccacgatatgggcacatgatttgattagaatggtgaaccgtgacgacaagcgaagcaactacgcaatccgggcagtcagccggatcgggcgagtccatggcagccaagcgcgccagattcgagcagctcgccatgcccgccgtcaatgcactgtaccggcaggcgatgaggctgaccaacaatcccgatgacgcgcaggatctggtccaggacaccttcgaacgcgggttcaaggccttcgactcatttcagccgggctccaacttcgaggcgtggatgaccaccatcgagcgcaatgcctacttcaaccagtatgccaaggccaagcggcgcccgcagcgtgccaacgactccactggcgaatacgacgattgggacatttacgatgccgccgaacatacgtcggacgggctcaagtccgctgaagaggaatatttggacgccttcgcgcccgaggaaatcatggccgcgctcgccaaactctcgccggaacgccggcaggtgttcatcgacgccgccatcgacggcaagtcctaccaacaggtggccgatgagcagggcgtgaaaatcggcacggtgatgagccgcctgaatcgcgcccgcacgcaactcaagcgtgagctcgcctcgtatgcgaaagagcgcgggtacgcgactggttcgtcggctggttcaccatccgcgaagttgagcgaaaacgttggtcgaatcgccgattccggccataatgaaagtagtgaacgaactgttggcagcaatggcgacacgcaagccgtagtgagacatagtcatgcgactcacgcccacacgccacaacagtcaagcaagctttcgggaaaggagatctgatgaacgatcagccggtagagcgtactcgccatatctccataacccgtacggcggccgatggcacggtaagccagaccgaagtgcatatcacggcggtgcatcatcgttcagtagataccggctcggccgctgcgtcggtccagacagacgtgcatatcgttacggagggcgactgttttgacccccgtacctgctgcgacgagcgtgaacaggcgttgattgccgcgttgcgtgcctacttgcgcccggatgtggcacccgaatgtctgatggcccggctcaaggccacgcttgatcactgctgcggcgaagataagtaacgacacatatacaacaaggcccgtctgatgtatcatcagacgggccttgagcgttctataagaaacgcgaagaatcaggcgttaggacgcttgccgtggttggcggccttcttacgacgatccttgcgcttacgtccgcgcatgcccatgatggactcctttgctgcagtaaaaaaataagccttcggaattatgccacataagtacgacgtgatgcaacacgggtgtccatgtggcgatgatcgtcaggcttggttattcggtttttcagatttgttcggcgtggaaggtgaccacggtggtgtagtcatcgcccggctcgagcacaaccagatccttgccggtgcggaaggcgtcggcgtaggcggtcatcggttcgacggccacgccggcctgacgagccttcccgccgatttcgttgccggtgcacacctgccaggagttgatggtcttgtcgccggtcagcgtgaccttgatgccgtcggggcgggtgaacacggcggaagtgctgccatcttcgccgcggttggtgatatcggtccaggcatcgtcgaagccacgtccctccagcgtggggttatcgcgcaggtcgaagatgccggaaaccggctcttcaccggtgggcagcaggtgttcgtctacggtcacgtgggtatcgcagtgcagctcaagacggcaggactcgttgtcggcggtaatggcctgaccggtggcgtgcttgccgtttgccagccacgggtggatgccaaatgcccatggggccttcacgctgtcgttgttgtgcacggtgaaggtttccgtgagaccgttctcgtcaagtgcataagtggcggtgatggtgatatcaaacgggtagccggcgatgtcgggggaacgccaggagagcgtcacatgtgattcctgcaaatcaacgagctcccacatgtagcggtaggcgtagccgtgcagggaggattggcggtcgaactcgtcgatcggcatctggtagtcttcgccatcgaaagaatactgaccattggtcacgcggttcgggtacggtgccagcacccagccgttgcagcaggggatgaccttgttcgggtcgaaggggacgatgaggtcttcgccgcgccacttcagctcgcgcaggctggcacccagttcggtgacgacggcactccattcgccggacgagatgacatattggttaccagtgcgaggcttcaaagccatagtgcacactcctttgtgaaacagattgttaccgctcacaatcgtatcgcacaagtcccaagacgcggcggcacataaggataaaaaattggctcccctctggaggggagccagcgtaacggaactacttctggactacttcgtagcggaccacagtggtgtagtcgccattgggggcgagcgtcaccaagtggtcaccagtgcggaaggcattggccggggcggtcatcggttcgacggcgataccatacggatgctcggcgaacggcgcgccagtggcggtgtagcactgccaagcattgatcgtctcatcgccaatgagcttcacttcaataccgtccgggcgggtgaatgtggtggtggtcgtaccatcggcggcacgctccacgtcgacccaggcatcatcaaaggcgcggccttcgagcgtcgggccatcgttcaggtcgtagatgccggtaaccggttcggtgccggtgggaatcagcgcctcgttcaccgtcacatgactggcggccttgatctgcaggtggcaggcggcggagtcggcgtcacgctcggcggaagtcgcgccctgcttgccgttggccagccacggatgcaggccgagagcccacggtgccggctcgtcgccatcattgcgggcattgacggtcacggtcatgccgttgtcgccgagttcgtatgtgacggtcacggtcacatcgaacgggtatccgtccaggttggggaagcgcagtgaaagcgtcacggcgctatcggtcaacgattcaagcttccacatgtagtggtaggcgtatccgtggttcgcgttgttgcgcggtgcgggatgatattcgttgaccggcgcgcagtaatgcttgccattgaaatcgtattcgccgttttcgatgcggtttggccacggggccagcacataaccgttacaggtgggggtcaggtcgttgactccgaacgggcagaaaatttccttgccttgataatcgaatcggcgaatcttggcgccgagttcgcagatgacggcggaataatcgccatagtgaatcgaatactgatttccggtgcgtggtgttttactcgtcatggaatcactcccgtagtgaggttggtgggccggtagctcctgctatcgctggccccagtctagcgcgtctcctctatcgaggcggggattggcgatagccggcatataataaacaattcgtacagacacggtagcaatacgtggagtgacgagtctcacaccatcatgcgagaagcacgtggattccttggaaaccggtgattcgtgggagacgcggaaaagttgtgacggcagattcctgtaatccctgccttacactggaaaaacactattgacgttcaggaggttccgatgaccaaaagcgttgtgctcgctgatccgcgaggcttctgcgcgggtgtggaccgtgcgattcttaccgtacagaccattctcaaagccgcggaggcttccggaaagcgaacgcgcgaggatgggctgcccccggtatatgtgcgccggcagatcgtgcacaacaagcatgtggtcgaggatttggccgggcaaggcgcggtgttcgtccaggaattggcggagattccggatgctgctgcccaagcgggtattccggtggtgttttccgcccatggcgtatctccggtagtgaaggcggaagccgaacgtcgtggcatgcatgtggtggatgccacctgccctctggtgggtaaggtgcaccgtgaggtgctgcgtttcgtgcgcgaggggtatgaaatcgtctatatcgggcacaagggccacgatgaagcggtcggcgtggtgggggagagtcccgaacatgtgcacttgatcgagcatgaatcggatgtcgattcgttggattttgcgcccgacaccaagctggtgctgctctcgcagaccacgttgagcgtggatgagaccgccggcaccattgccgcgctgaaggccaagttcccgtggattcaagagccgccgagttcggatatctgctatgccacatcgaatcgtcaggctgcggtcaaactggtggcccagcagtccgattgcgtggtgattgtcggatcggccaactcctcgaattccgtgcgactgatggaggtggcgcaggagggcttggggaagcgcggcaaagcgtatcgcgtggatgatgccagcgagcttgatccggcgtggttcgtcggactggagtccgtgggggtctcctcaggtgcctccgtgccggacgaactggtgtccggtgtgattgacgctctgcaaaacttgggtttcaccggtatgaagtccgtcgaaaccatcaaggaaaacatgcacttcgtgctgccgtcggagttgcgcaggaagaagtagtcatccttggctcccctcaccgagggaagccaagaacggtcaccacgtgccgattggtgcggcaacggcgttcaagaccttgagcaggtcctgcgggttcacgcctacggacagtccgcgtttgccgccggagaccagaatctggtcgaattgcagggcgctttcatccaacacagtcttatgacgtgtcttctggcccaacggcgagatgccacctaccacatagccggattcacgcattgccaccttgggatcggccatagaggccttcttggcacctacagccgcagccagggccttcaaatccatatgtccgctgaccggtaccacgcccaccacacgctccgaaccggtgtccgccatcaacgtcttgaacacctgatgctcgtcgaagccgagcttggtggccgcctccacgccgtagccgtcatccatatggtcgttggagtgctcgtattcgtatacgtggaattccacgcccgccttctccagttggactgtcgccggggtggaacccgcgcccttatcatgcttgcttttctttgccatgattaccgttctactacgaaaaacccccgcacaaggcgggggtctcacagcttagttctcaaacgaaccgtagcggcctagaccgcagtggttcactcggagatctcagcgaagtacagcagggtacggatcatgttggaggtgaagccgtactcgttgtcgtagaaggacacggtgcgagccagggtcacgccgtcaatggtgttgacgtcggtctgggtcgggtcgaacacgccaccgtgggtgtcgccgaggatgtcggaggagacgatgccctcatcgttgtagccgtagtaatcggtgtcggagaaggcagccttgaaggcttcgttgatctcgtcggcggtggtctcggtgttcagaacggtggtcagctcggtgacggagccgtccggaacctggacgcgctgggcatggccctgcagcttgccgttcacggacggaacgaccttgccgatggccttggcagcgccggtggagtgggcgatggtgttgatggcggcggcgcgcaggttgcggccggtcttggtgccacgcgggccatcgagcagcatctgggtgccggtgtaggcgtggatggtggtcatgaagccggccttgatgccgaacttctcgtccagcagcttgaccatggcggccatggagttggtggtgcaggaaccggcggagacgatcacgtcggaagccttgaggatgtcgtggttcacgccgaacacaacggtcggggtgatgtcatccttggccggggcggagatcaggaccttcttggcgccagcgttgatgtgagcctgggacttctcggcggaggtgtagaagccggtgcactcgagcacgtactcgacaccgtcgttcttgacccacggaatgttgttggcgtccttctcggcgtagaccttgtattccttgccgtcgacgatgatggagtcttcggtggccttgacgtcaaccggagtgccatcgtcatgacggaaggtgccgtgggtgctgtcgtacttcagcaggtaagccagggtagccggggtggtcagatcgttgatggcggcaacttcaatgtcaccagcctggccgccgcgagcctgcagctcgaagatgcgacggaaggcgagacgaccaatgcgaccgaagccgttgataccaatcttaactgtcatgtaattctcccttgtagggtggccttggcgcgctttggcacaccgggccattgtttaccaacagttgctactgtaatgccgactctgtacacatggcaacgtttcagcgtgcgttttgggtaaaaatgccgtattttttgtgagcgctcacaatttggattgcccgcaaccgacatgtgattttcctctcctttggaggaatgtctcgaatcatcacgagcaagcgcgcggcatgcaagtcagcgaaccagcagcttggacacttcggtgtccagctcgccgatatcgccgccgaattcatggaatctgctcacctgtggcaacgccacttcgatggggaaggtgacgatcagtgtgccgcgtttcacgctgatggccgcgtccacgccgtcgcggaactcgttgctgacgccttgcaccaccgtattggtcagcgtgccgttcttgagctcatatttcagccccggttcgttcacgccaagcgaaacatcggagtgggagaacgccgacaccatgcggccgtcctcgggcaccggatgcgcggggaacgaaagcctaccatcggtgatggccgtgacgatgagcccgtcgccatacagatacccgcttgccccgtgtcgggccagcagcgccatcagttgaatgccggaaatcgtatggtcaatacggccgccaagcccgccgtacacgtgaaactcgcggcaacccgccgaccagccgaccttcagcgcggaaagcatgtccgggtcgtccttcaacgcgggcagcgcgatggtgcgcacatcggtgcggggcggccggccctccagcgaatcgaagtcgcccaccaccacatcgggcacgatgcccaactcgcgcgtatggtcgagtccgccatcggccgcaatcacatacgcaccggtgggaaccacgggcgtgcccgcatagtattcgcccgcaccaaaaatcacgcatacctgagtcattatgcctactgtagccggtatccacccatcgacacacggtccgcgaatgtccgggcatgtggtaagattcctatttggcttgagaaatcaagaaagcggggcaaccccacctggaagcctttcaaggtctcgggttcaaggcaaacagcctagcgattgcgatatacaacgcgcaatcaggaatgacgcaaagaactgatatgcgtctgcagaagctgagcgcgtattggcgctggttttggcttgccatgaacccaaagcattgaacaggactccagcaaaggtcccgccacggaattgaagtagaggattggagtcatcatcagcgacgaaccacgtattaacgacgagattcgcgtcccgcaggtacgcctgatcggcccgaagggcgagcaggtgggcgtcatcgcgacttccgtcgcgctgaacctggccaaggaggcaaacctcgatctcgtcgaggtggccccgaacgcgaagcctccggtcgccaagctcattgattacggcaagttcaagtacaacgagaagatcaaggctcgtgaagctcgccgcaaccagagcaccgcggaaatcaaggagattcgtttccgcctgaagatcgacgaccacgatttcgacgtgaagaagggccatgtgacccgcttccttaacggaggcgacaaggtcaaggtcaccatcatgttgcgcggtcgtgagatctcccgcccgattggtggcgtggaactgctgcagcgtctggccgacgatgtcgaggaatacggcaccgtcgagtccaagccgaagcaggagggccgcaacatcatcatgacccttgcgccgaagggcaagaaggtccacacccagtccgagcagcgtcgtcgtggcgccgagtcccgcgccgagcgtcaggctcgccaggcggctcgtctcgcggccaagcaggagtctcaggctcaggccgcggccgacgcgcagtccgcgatttctcagaagacttccgacaagaagcaaaccagcaaggagggcagcaatgccgaagatgaaaactaattccgccgcttccaagcgcgccaagatcaccggcaccggcaaggtgaagcatgtcggttccgccatgcgtcacaacctcgagcacaagtccgctcgcaagcgtcgtgaactgtccgccgacgatgtgctgcgcggcggccaggccaagaagctgcaccagcttctgcagaagtgagcatagggcttacccggaaataataagactttagaaagctgaggaatagattatggcacgtgtcaagcgcgcagtgaacgcccacaagaagcgtcgcgttgttctcgagagggcttccggctaccgtggccagcgctcccgcctgtaccgcaaggccaaggaacagctgctgcactcctttaactacaacttccgcgaccgcaaggctcgcaagggtgatttccgtaagctgtggatccagcgcatcaacgctgccgtccgcgctgagggcatcacctacaaccgcttcatccagggcctgcgtctcgccggcatcgagctggatcgtcgcgctctggctgagatcgccgtctccgacccgaacaccttcaagaccatcgtggacgccgccaaggccgccctgcctgaggacgtcaacgctccggttgaggcctgattgcttgaagtcgtgacttcacactagaaaccccgcttccgagcggggtttcctattattagccccccctctgacgaggggggctcccgcgcagcgggtggggaagagaacaaacacatgaccaacggattcaccaaactcacagagcagttcctcgtccacatcggcgtggagcgaggactcgccacggccaccgtcaccgcctacgaatccgatatcgccaaatacattgattggctcgaaacccgcggcatccacgaaccggacgccataaccaaacaagacgtcgaagactacatcgccgcccttgaccaggcgggggagtccgcccgctccaaagcccgaagactggcctcgatccatgaattccatcgcttcgcgctcggccagcacgcggtgactgccgacgtttctgccgcagtcaaggcacccaaaggtgccagcaccctgcctgacgtactcaccgtggatgaggtaacccgtctgctcgacgcggcggcagccggcggctcaaccgatccggtggtattgcgggacaaggccctgctcgaattcatgtacgccaccggctgccgcgtctcggaagccaccggtgtgaatctggacgacatcgacctggacgagcacatcgcgcgactcatgggcaagggctccaagcagcggcttgtgccattgggcagctacgcatgccgggccatcaccgcatacctcaatgcggggcgtggcgagctggaacggcgctccagcgccaagattcccgagagacgcgcactgtttctcaacaaacgcggcaagcgcatctcgcggcaatcggtatgggaaatcgtcaaagcaaccggggagcgggccggcatcaccaaaccactccatccgcacaccttgcgccattccttcgccacgcacctgatccaaggcggcgcggacgtgcgcaccgtgcaggaactgcttgggcacgccagcgtgaccaccacgcagatctacacgcacgtaagccccgaaaccctgatcgaaacgtatctgacctcacaccccagagcgcggtgagacacaccattttgcgacgcgtccgcccctagcggaatcgcggcgggggggggagcaccaaagtcggccggaaattcaaggcgtgacaatactgtacataacagcgaaccgtcagccaggaagaggtattcatgctgcagatcaaatcgatctcgaagcgctataaaaccggtgatttcgttcaacaggcgcttgacaaagtcagcctgaacctacgcgacagcgaattcgtcgcgattctgggtccctcgggttccggcaagaccaccttgctcaacatcatcggcggcctcgaccggtatgacgacggcgatttggtgatcaacggcatctcgacgcgccaatacaaggatcgcgattgggattcgtaccgcaaccacaccatcggcttcgtgttccagagctacaatctgattcctcatcagacgattctgtcgaacgtcgaactcgcgctgacgatttccggcatcggcaaggccgaccgtcgcgaacgtgcgcgcaaggcgctggagaaggtcggactcggcgaacacatcaataaaaagccgaaccagctgtccggcggccagatgcagcgcgtggcgatcgcccgcgcactggtcaacgacccggacatcgtcctggccgacgagccgaccggcgcgctcgattcggacacgtccgtgcagatcatgaacctgctcaaggacgtggccaaggaccgcctcgtggtcatggtcacccacaaccccgaacttgcggaacaatatgccacgcgcatcgtcaacctgcgcgacggcgtgatccgctccgactccgacccgtttgtcgtggatgagacggccgaacagccggccgtgcacaagacgatgggccgcgcgtcgatgtcgttcgtcacgtcgctggcgttgagcttcaacaatctgaaaaccaagaaggcgcgtaccctgctgacctcgttcgccggctcaatcggcatcatcggcattgcgctgattctatcggtgtcgactggcgtgaacgcatacatcagcgacatccagcgtgacacgatgaccgcctacccgatcaccatcgactcccagaccttcgacctgagcagcatgatgggcggccagatgggcggcgatgacggatacggcggcaagacgcacagaaccgacggcatctacccggacgaccgcagcgtcaagcaggcatccagcctgaccagttcgattaccgaaaacaacctgacccgcttcaagaaatacctggataattccaagagcgagattcaccagtatgtgggttccgccggtatccagtacacgtatgacgtgaaattctccgtgttcgaccacgaccccgatggcacgctggtcaatgcggacggcgtgacgatcggtgccagcgactccacttcaatggcctcgcagatggcgtccacaagctcgtccggcatgtccggcacctcgtcgatcacctcgcagcagatgtcgatgctgaccggcaaaaccgatgagaacgccgcgcccgactcgttcaatgagatcatgcctggagcggacgacagcaagctcgtaggcaaggtcatcaccgacaactaccaagtggtcaacggttcatggccgaagtccaaggacgaggtggtgctggtgctcgacgacaacaacagcgtgccgctgaccacgctgtacgagctcggcctgctgcccgcctccgactaccacgagatgatgtccaagctcaacgccggcgacaaggtcagcactccacaagacaagatcgactatgctaaggcgctcgaccagacgctgtacatgattccggcatccgaccagtacgtcaagggcgatgacggccactaccgattcatcggcaacgacaaggatgtaatcgaacagcgcctcgaaacggccaccaaactcaaggtggtgggcgtcgtcaaggcgaagaaggatgcttcggccacaccgttggccgctggcgtgggatacacgcgcgctctgaccaatgatctgatcgaccgtgcggcctccagcgccatcgtcaccgatcagaaggccaacccgaacacgaacgtgctcaacggcatgacgttctcgccctcggacgacgccaccaaggcggccgacgcgcgcacctacgtggtttcgctgggcgtgacgcagaaggcgaacatggccaagtcgatgatgagtgccgggcagcggtccggtacgggcgcatcggatgccgctggtgctggtgctggcgctggcgctggcgcggcgggtgccggcgatcaggccgacgcgatggccgcgatgagcgaacagcagctcgccgacagtttcgactcgtatatcgccacggcttcgaacgacgtgcttgtcgcgatctacgaccagtacgtgtcgaccggcacctacgacgacaacctcgccgcattcggtgtggtgagtcgtgacgcgcccagctcgatcaacgtctacgccgacagcttcgaagacaaggaccacattgccgacgcgattaccgactacaacaacaccgtctcgaagaaagacaagatcacctacacggattatgtggggctcatgatgagctcggtgaccaccatcgtcaacgtgatttcctacgtgcttatcgcgttcgtgtccgtctcgttgattgtttcctcgatcatgatcggcatcatcacctacatttcggtgctggagcgcaccaaggaaatcggcatcctacgcgcaatgggtgcctcgaagcacaacgtgtcccaggtgttcaatgcggagaccggcatcatcggcctatgctccggcctgttgggcgtgggcttgaccgtgctgctcgatattccgatcaacgccgtgttgcatcacttcatcggcaatgcggacgtcaatgccgccctgccggtgaccggcggcgtggtgctggtgatcctaagcgtggtgctcacgctgatcggcggcctgattccctcgcgcaaggcagccaagcaagacccggccaccgcactgcgcaccgagtaagcgcatcgacatagtacgagacgagatccataaacctcggaacactggaataccagcggcagaacggtgttccgaggcgagcccggcgagtacattaggataggcgagcaggtattccccggcaaagggggcgagggcaacgatggacgactggcgagacacccgcgataaagacagcgcattccgtcaaggaacgctgcctatggcgggaacgtatgtcgttgcacccccagcgaacccggatgttgataaggtagacagtatgcctaccgatttgcttggacgtgaatacgaaaccttccccgcacccgaaccgctgcaacagcacggtccggcgcgtgtcattgccatgtgcaaccagaagggcggcgtaggtaagaccaccagctccatcaatatcgccggtgcgttggcccagtatggccgccgcgtgcttatcgtcgatttcgatccgcagggcgccgccactgtgggactgggcgtcaacgcgaataccgtggagaacacgatttacaccgcgctgttcgatatttccgtggacccacatgatgtggtgcagcacaccgcattcgagaacatcgatgtgattccggcgaacatcgatttgtccgccgccgaggtccaactggtcacagaagtgggccgggagcagatcctgaacagtgtgctgcgcaagctcaagtcggaatacgatctcatcatcgtcgactgccagccatcgctcggcctgctcaccgtgaacgcgcttgccgcagctgatggcgtgatcattcccgtggccgccgaattcttcgccttgcgtggcgtggccctgctgatgcagtccatcgaaaaagtgcagtcccgcatcaatcccgcattggaagtggatggcgtgctcatcaccatgtacaccaagacactgcactgcgaagaggtctgccagcgcatttacgaggcgttcagcgaaaaggtgttccacacgttcatctcccgctccatcaaactgcccgattccacggttgccgccgcgcccgtggtggtttatgcccctgagcacaagacatcaaaggaataccgtgaggtggcacgtgagctcattgctcgcggcatcgtggcgtaacgattgtttcgataaacgatgaatgagacttccctttctcggctcccctctctgagggaagctggctcgcgtagcgagactgaggggagctccgcggaagccgaaatcagcacggaggaatccgccacttccggcttccgggtcaacctcgaggtctattccggtccgttcgatgccttgctcggcatgatcgccaacaacaaactcgagctgaccgaaatttccctctcctcgatcaccgaggaattcctgacatacgtgcgtgggctcgacttcacgaaaaacatggatgaggccagcgcctttctcgacatcgcctctattttggtcgaggccaaaagtgtggcgattctgcccggcggcgaagacaaccagtacgacgagcaaaatctcgaggcgctgcgcgaacgcgatttgctgttcgcccgactcctccaataccgcgcctacaagcaggccgccggtgatttccgggcgcgtatcgccgccaatgccggccgattcccgcatccggcggccatggacgagggcattgccgccatgttgcctgagctggtatggacgctgaccccgctcgaactcgcccaactggccgcccaggtcatcgccaacgcgcccgcctccgaagtatcgatccaccagctgcacgtgccgctggtcgatctgcgggcccaatcgctggtggtgcgcgaccggctgattgcagcactggaatccaagggcgaccagtcgatgtcgttcagcgaattgacccgggactgcacttctcgtattgaggtggtggctcggttcatggccgtgctcgtgttcttcaaacaaggtgtgctgcagtatcagcaagatggtccgtttgccgaactgcacctgaggtgggtatccggcgtagacgaaacgatgaacgacgtgaacatttccgaaggcgattttgcgtaaggacggcgactggtgactgaacggattgacgcaacgaatgcaaccgagcacatggcggatgccgaatcgacggctgaatccgcaaaggccgaggtgaggggagtggaggagacgcgccccgaatacgtggatttcacggtagacgattttcccggcgggctgcccgcatgtctggaagcgattctgatggtcgccgaccagccgcagaccgccaccgagctggcccgcattttggcattggaccgcaacacagtcgaagaggcattgcaagccctgcacgatgactatgagggcgatgaatcccgtggcatccgcccgcgcggcttcgaactgcgccgcaccgctcgtggctggcagttcgccagtcgcgccgcgttcgagccggtcgtctcattattcgtcaccgacggccagactgcgagactcagtcaggccgcactggaggcgcttgccatcgtggcctatcgtcagcccgtcacccgagcccaagtggccgcgatccgcggtgtcaactccgatggcgtgattcgctcgctcacggtacgcggccttatcaaggaagacggcgtggaccccgaatcccgcgcggcccttttggtcacctccgagttcttcctcgaccaaatgggcctgaagagtctcgacgaactaccctccctagcgccgttcctcccgcccgtcgccgaaatgacacagtcgaaatcggaagacacggacgtgatttcgtagcgattggggcccgctacctgaccgatattcgtgcgctagaccatccaatatgtgatttatggtcattgtgactataagtagtgctatgctctcaatgcggggagaacaaccggtatggaaagaggcatggcatgggattcggcaatgtgtccgagcgccgcagtgcaccgccacaggtcggcgtgtcagtggtgattctggcactcggcccgaaaggcgataccggcaacagtgccgccgattccggcaacgccgcgaactcggcccattcccgtctctggctgcccttggtcaagcgcgtccgtcagccgttcctgggctgctgggcattgcccggcggcgacctgcgctccgatcggtcgttggaacagtccgcctacgcggccctcgaatcgaccacagacctgcacccgcgatacctcgaacagctgtacacctttggaggcccgacccggtcccatggcggattgcccatggtatccgtcgtgtactgggcgctcgtcggccagaccgaggccgcgggcttcgaggacggtgacaacgtacgatggttccccgaagacgaactgcccgagctggcgttcgaccatcgccagatcatcgactacgcgctgctccgcctgcgctccaaaatcgaatactccgacgtggccacccgactgctcggccccacgttcaccctgcgccaactgcacggcgtctatgaggcgattggcggcgaaaccctcgacttggcgaacttccgccgcaaaatgcttgcctcgggagatcttgaagacaccggggagaaggtgcgcgaaggccgccaacgaccggccaccgtctaccgctacatccccaaacgacctgtcgagaacggcacgccccacgaatccgatggcgacgacatcgtggaactgtccagacaaggtgagcgtgaagacgctctcgacgcgctgatcccatccgcgcgcatctgatttttcccgccgacccgcttcgggccggcatcacagacgtatatagggaaaggaaccactatgaccgcactatccactgcgccgtccgttgacgagatcatcgccaagctgggcgcgcaaagcacctgcgatgcaggactgacccaggacccatggcacttcgacaccaccacacccagctacggtcccggtgcctcgatgctcgaccgtctgcccgccaacgcgccgcgccagcaggtgctgccggacgagtaccgcaaggcctccgacgaggaactgcagcagcgcatctccgacgccaagcagcgtctcggctccaaactgttgattctgggccacttctaccagcgtgacgagatcatcaagcacgccgatttcgtgggtgactccttccagctggccaagaacgccaccgagcgcccggacgccgatcacatcgtgttctgcggtgtgcacttcatggccgaaaccgccgacatcctctccacgcccgaacagagcgtgaccctgcccaacctgtccgccggctgctcgatggccgatatggccaacatcgaccaggtccaggaatgctgggaccagctcggcgagatctgcggcacccagccggacgccgatggcttgcagcagatcatcccggtcacctacatgaactcatccgccgcgctgaaggcgttctgcggacgcaacggcggcatcgtatgcacctcgtccaatgcgcacgccgtgctggaatgggcgttcgcccgcggcaagcgcgtgctgttcttcccggaccagcatctgggccgcaataccgcccgcgccatgggcattccgctgagcgagatgccgctgtgggatccgttcaaggcacagggcggcgccgccgatccggccgactacgcccgcgccaggatgattctgtggaagggcttctgctccgtgcaccagcgtttcaccgtcgaacaggtcgaacgtgcccgtaaggcatacccgggcgtcaaggtgatcgtgcaccccgagtgctcgatgcaggtggtcgacgccgccgacggcactggctccaccgcgtacatcgtcaaggagatcgccaacgcacccgccggatccgccatcgccgtgggcaccgaaatcaacctggtgaaccgtctggccgcgcagtacccggacaagaccgtgttctgcctggacccggtggtctgcccgtgctccacgatgtaccgcatccacccggcttacctggcttgggctttggagaaccttgaagccggcaacgtggtcaatcgcatcaccgtggacgaagacaccgcccgcgaagccaaggtggcactggagcgcatgctgcgcgttcacccgtgacatgcttctagctcccctccctgaggggagctgtcaccgtaggtgactgaggggagcagatgacgcaaaaacagaggaaagcaacacaatgagcaacactgaaatcgtcgtcgtgggcgcaggcgtcgccggactgtccgcggcactggccgtggccggcaccggacacgacgtgaccttggtaaccaaggccgaactggtggaatcgaacacctatcatgcgcagggcggcatcgctgcggccatcttctccgacgacgacccgaagctgcacgctgccgacaccatggccgcgggccacggcctgtgcgacccgaaggccgtggacatcctcacccgtgagggtgcggagcgcgtccgcgagttcgccgcggccggcgtccatttcgaccgcgacgcgcagggacgcatgctgcgcggcctggaagcggctcattcgcgcgcccgcgtggtgcatgccgggggagacgccaccggcaaagtgctcgaactggacgtctccgccatggtgcgcaagaacccgcgcatccacatcatcgagaacgcattcctcaaagacctcatcgtgcgggacggccacatcgccggcgtccgcctgctgatcgacgggcaggacaaggatctggccgccgaccgggtgatcttggccgccggtggagcaggccgtatgtacccatacaccaccaatccgccggtcgccaccgcggacggcctcgccgccgcatggcgtgcgggcgcccaggtcgccgatctggagttctaccagttccatcccaccgccatggccgtgggcgagcacttcctcgtctccgaagccgtgcgcggcgaaggcgcggtgctgctggacgaacacggccaccggtacatgaaggacgtcgatccgcgcgccgaactcgcaccgcgcgacgtcgtggcccgcgagaacttccgcgtgatgcaggcgcaaggcggcaagcccgtgatgctcgacgtgtcgccgatgacccgcgagaaccccgacctggccagcttcctggcccaccgattcccgaccatcgacgcctatacgcgttcgcttggcttcgactggagcaaggagccgatcccggtggcgcccgccgcgcactactacatgggaggcattcgcaccgatctgaacgcccggacctccatctccggcctgtacgcggccggcgaatgcgcccgcaccggtgtcatgggctccaaccgccttgcctccaactcgctgctcgaaggacttgtctacggacgccgcgccggtcttgccgccgtcgcggatggtgacgacgcggtctgggcacccgaaccgttcctgaactccgccaccggtgccgtgttcgaccatgcgccgatcgcgttggccgctcctgccgctacggctgctgctgacgataccgccgccgacaaggtgtgggaccgtacccgcatccagaacaccatgtggcatggcgtcggcgtactgcgcgacgaggccggactgaaaaccgccatcgccgaactcggccaaggcctcgccgccgcaaacgcccaggctgatgtaaacgccgatggcgctgcaagcagcgttgaggctttggagaaccgcaacatgctcaccgtaggctatgtggccgccatcgccgcgctcgcccgcaccgagtcgagaggcgcccacgcccgcaccgactacagcgagccagtcgacaactgggcccactccgtcgcctacatcaaggactgacccatgctcacatcacacatcatccgcgtcgccgtcgaagcggcgctcgccgaagacgcgccctacggcgacatcacctgcgagaccaccatccccgcggacgaaaccggctcggcccacctcaccgcgcgcgaaaacggtgtgatgagcggcatcgacgtgttcgccgcagccttcgccgcacagaacccggccgtcaccgtcaccgccgccatcaaggacggtgagcgattccagcgcggccagatactcgccaccgtggaaggcccggtacgcgacctgctcaccgccgagcgcatcgccctcaacttcacccagcgcatgagcggcatcgccaccatgaccgccgccttcgtggacgcggtgaacgccatctacggcgacgactatgacggacccgtcacccggccacgccgctacgagcgcacccgcatcgtcgatacgcgcaaaaccacgcccggcctgcgcccgttcgagaaatacgccgtggtctgcggcggtggccacaaccatcgctacggactgtccgacgcggtcatgatgaaggacaaccatctggcggcgctcgccgcgcgcggcatcgacctggccggcgcgatccgccacgtgcgcgaacaggtgggccacaccacgcatatcgaagtggaagtcgaccgccttgaccagattcccgccgtgctcgccggcggagcggacaccatcatgctggacaatttctcgctcgacgacacccgtcgcggcgtggagctcatcgacggcaaggccatcgtggaagccagtggcaacatgagcctggagcgagtgccagccgtggccgccaccggtgtggacgtgatctccgtgggtgcgctcacccactccgtgcgtagcatcgacctcggattggattggaactagtcatggccgatacccccaacacatccggtgaacccggcgaactgtacctggacgccgccgccaccgaaccagtgagcccggcagtcatcgaggccatgaccccgttcctgactgaggcctacgccaatccggccagtgtgcaccagcccggtaaaaccgcggcccgcgcgctggacgcggcccgcgcatcattcgccgcggcattgggcgcccggccggatgacgtgatcttcacctcaggcggcaccgaatcggacaatctggccatcaaaggcatcgccatggcgcgcatgcgcaaactgggcttgcggccggtctacggattcgccgaagccgatggcaaacagctggcaagcagccgcccgcgcattatcatttccgctatcgagcacccggccgtggcccaatcggcggcatggctgcacgaatggttcggcttcgaagtcgtgcgcattcccgtggatgcgcaggcgcatctcgatctcgacgcacttgaacgcgagctcgacggcgaggccggcgaacgtaccacgctggtctccaccatgctggccaacaacgaggtcggcaccgtggaacccgtggaggaactggtccgcatcgcccacgcgcacggcgtgcccatccatgtggacgccgtacaggccgccggccagattccgattcgttttcgtgactggaatgtggacgccctgtccgtatccggacacaaattcggcacgcccaaaggtctgggcgcactgctggtacgcggccgcacgcccatcgaaccggtgctgtccggcggcgggcaggaacggggcctgcgctccggcacacagaacgtggccggtgccgtggcgctcgccatcgggctcaacgaatcgaatgcgcgcatgcaggcgcagtgccgtgaattggtcgcgtcccgagacatgctcatcgacgcggttcgccgggtcgtgccccgcgtcgacctgaccggcgaccccgaacgccgtctgcccggtcacgcctccttcatcttccccggcgtcaccggggaagcgctgctcgtcgacctggacgcgcgtggcatcgctgcctcatccggctcggcctgcgccatcgggcgccacgagattcctgccacgttgctggcgatgggcctcgaaccgtccatcgccaaatcggcattacgcatgaccttccgcaaaccgctgacccgcgaacaagtcgaacgcatcagcttggccatcgaagagtcctacaccgacctgacccgacactaaatctgacgccacttaccagaaaggaaacgacgtgagcaccaccactccagcgcaacccgcgcagctcacccgcaacgagcgcctcgaccggctgcccttcaacaaggcgcaccgtaaactcctcgtcgcctccggcatcggctgggcattcgacgccatggacgtcggcctcgtttccttcgtggtcgccgccatcgcagccgacccgcacttcaacctcaccccgaccgaaaagtcgtgggtgctgtccatcggcttcgtcggcatggccatcggcgcggcggtgggcggcttcatcgccgaccgcgtgggccgcaaaaccgtgttcaccgccacgctgatcatcttcggcatcgccaacggcgccatggcgctgtcctggtcgctcggcatgctgctcggcgcccgactgatcatcggactgggcttgggcgcggaactaccggtcgcctccacgctggtctccgagttttcgccgaccaaacagcgcggccgcatgaccgtgctgctggaatcgttctgggccgtcggctggatcatcgccgccataatcggctacttcgtgatcccgaacaccggtgactggggctggcgctgggcgctggccatcggcgcgctgccactgctctacgcgattgtcacccgtgtgcacatcccagaatccgtgcgattcctcgaagccaagggtcgcgaagacgaagccgaaaaggccgtgcgctacttcgaggaagccgggggagtggccccggtaacctctcccaagggcaagccgctgccgaagatcaagacgcgcgaactgttcggttccaagtatttggcccgcaccatcgccatctgggccacgtggttcttcgtgaacttctcctactacggcgcgttcacatggatgccgtcgctgctcgccgaccagttcggctccctgaccaagtcattcggctacacgctcgccatctccatcgcccagctgcccggttacttcctggccgcctggctggtggaggtctggggccgccgcaagacgctgagcatcttcctggccgtctccgccgtggccgccttcgcgttctcgcaggccggatcagcggccctcgtgctcgtgttcggcatgctgctgtccgcctccaacctcggtgcgtggggcgtgttgtacgccgtgaccccggaaatctacccgacccgcctgcgtggcgcggccgccggtgccgccgccgcggtgggccgcatcgccgccatcatcgcgccgctcctcatgccgtggttcctgaccctgtccggcggcaacaaggccgtggccttcatcatcttcgccgccgccttcatcctcgcctgcatagcagccctctgcttgcccgagcgcaaaggcctcaatctcgaagactgattacacttcagccttcgctactaaagtggcccacaccaatgtgtgggccactttttgtcttatagctcccgaatgacacggcaagggttgccgtatgtcactgatcaatcgagggaacgacgggtgagattgcgcggtggttttgtgaccagccacgccaccagcagtccggttgccactacgccgaatgccagcgccgcctgcaatccccagatcggcacggtttccagccaatgaccgtccacaccgatcctgcggttccatgccacatgcagccatcccaacgccacgccggataccacgcccactggcgcgccggccagcagaatcaccgcagcctgcgtcaggccgtaacgtctgaggaatcggggtggcgcgcccacggcgaccatcgtggccatgtcgcgctgggcctgcgtgcgggccagcagcagtgaaacgagcgtggccatcagtgccagcaatgccaacaggccaatgggcaccaatgccatattgtcaccccacggcaggcgattcccgtcagtgctcgtggatgccagcggcagattttcgattgcataagctgaggccttctttacggtaacgggggagttgccaccggcgaagtctagatactcacccagatactgcaattgtttgatgccgagcgcctgtgctgttgccgggctcatcaccagcgggtacgcgccgcgcacgtagatggccttgcgcttctcgatatgtgtggcctgagattcgtttgcaattgccggattcggcgaaatggccacacgcaccatacctcccgcgtcgattgtgccggcatcgccgaccaccacaccgcccgcatcaagcacctgtgccgcctcatccgcgttcgggaagccggacaaacgcatcgcattgccatccataatgagattcacgccgcggaaactcggcagtatattcgaatacgttggctgatgggatcggtctatcggcacacaacgtatcggaacgtttggatacagggccgaagcggcatcctggcccacccatgtggacgtgtccggttgctcttggatcgttgggttatcacaagtgtgaccggccgggagcaatgcagcggcatacatgtagccgtgttcggcgttcaacttgtcggaatcgacttcggtcgtatcattgagctttgaccatcgcttgacatcctcggtgtacaccgggtaatgagcgcgtatcggcgtctctttgccaagccggtgtatcgcatccgacaccacagcacggtcgaactcattgctgacatgcacgtcggccccaatggccatccccgacggtccatacgtcatcgtcatcgtggaatttcgctggtccgccaccatggagccggtgattaccagtgtgtacgaggcgatgcacatggtaatcagcaccgcgcatgccgccggaacgaaccgtcgatgatgctcggctgcatccctgagtgccaggcgtgcgccgatgttcagttgggaacccgctttgccgcaccaccgtgcaaaagtgcgaatcgacaacgcaagccctatgacagccaacaaaatcgtggcaacaagcagagccatatgcgtttcggttccggccggaaccgcgcccggattgtgatcggccagcgtgggtaatggcaatgtcagactgagcgcggcgcatacgatggcggccaagaccagaatcggaccaaccgcaacacggagcagtctcaaaggattacggcgaagcttcgtatccacgccattcgcggattcaccgtagccgatttcctctcttgtcgggcgatccttcaacgcatcgactggatgcatacgcgccacatgccgagccggcgcaatcgtcgcggcaaatccaatgatgattgccgtgacaatacccatcggcagcgagccccacgagaatccgtgcaggatctccagcggcgtggatccacgcaatgcacctatcgcagggccggccgccacggtaagcgcgaatcccaatgccgagcccagcacgccaccgatggcgccgataacgagaccttgcgaggaaatgattcgactgaggtcacgtggtgcagcaccggatgcggccgcgagcccaagcacacgacgtgactgatctgccgacaccgtaaacgcgggcgtgaccagaaacagtaccagcaacatacccaccagcatggtgatgaccacagtgaccatgtggttcaacatggtagccgcatcgatctgcatcgggtagagctgcgatgcgggcggatagccgtcagtcagcacatggcgggaaatgacgatggcctgcaacaggttcatgctgcgggtgtgcgcccacgtgaccggctctggaccgaccaccaaataatggccatccacaccgacgccatcagattccaatatggctgacatccagccttccaagccccatgccgcggcttcggattcatcggtcagcccgctgactgtccaagcacgctgagtgtcggccaccgcctcgccgatgcgcccgtccaggctcatccagccatcgaacggcggagcgacgaacgtcaccgtgctaccgagagaagcgccgagattatccgccaatgtgcggctgatgacaatctgcgtattattctgcggcgccgaacccttgaccagcttcggcaacattcgttgcaatgcctcaggtgaagcctcggtcatggtcgcggtggaggccgcgttcagatcaatgtcgttcccgcttttcacgtcgatcccagccttggtctgttcgccgggttgcaacgcggtgccggtgatggcgatgagttcgggcgactgccaatacgggagcagccgatcctgttgcggcagaatcttcgcaagctcggcggccgaggccggctgctgggagggatcgtcctgccacgtgccgccgctttcgggtgactgccggaacggttggccggtgcggggcctggcggtggcggtgatgaccgcctgcgtatcagccgggattgtcgccagcgcacgcgatctggtgggcggtatggtggtggtcataccgatggaggccaccattgcggcgattggcagcattaccagcagcaaggacagtagggtgcgggccttgtgccgtagtgcgtcgcgccagccgagtcgcagcgcggcccgataccggttgcaacgtgcgccaaggcttggcctagcggcatggggaatttgggcagagcgaccgacggtggcattggcaagattattgagggctgcgcgtgccatcatgctcccctttcctcaaggttgagcaaatcatccatattgctggagccggtttcatcgatgatacggccgtccttcaaaaacaccgtgcggtcggcccaggcggcgaagcgaggctcatgagtgaccagcagtacggccgcgccgcgatctgcgcgggtgcgcaacacttcgagaatcgtcatgccggcattggaatccagagctccggtcggctcgtcggccagtagtagacggcgtgggccgaccagtgcgcgggcaatcgccacacgttgcgcctggccgccggacatgtcttcaggtcggcgatcagccatatcggctacccccacttcattgagggattgcatcgcggcctcacgtgccttgcggggattccagccatccaattccaaggggaacgacacgttctcggctgcgctcagggaaggcagcagattgaaatcctgaaacacgtagcctatcgatttgcggcggatggccgcgcgttcggccactgacagtgtggccagatcgcggccttcgaccagcacgtgcccctgcgtgggcacatcgagcccgcccgcaagattgagcaaagtggatttgccggaaccactggggcccatgatggccacgaattcacccgggcgaagcgtgagattggcgtgactgagcgcggtgacacgacgtgcatctttgccgtgaacgcgagtgacgtcgtgtaattccagcgcgcatggggaggattgcgggagagaagaaagaacgggagaagtcatgatgtgctcctatgcactattgaatggtggcggtgagtgcggctgagcttgccgtgagaggtgccgaaacggggtgctgcgccagttgtgctcgcagctgggtctcatccacggtatcgagccagcgcaattccgcttcagtgatgaaaatatggtggtcgagtactagacgtgtggcgagttcggtgggcggtgtttgccggcgcagtcgggtgatgtcgtgcagcagttgctgcaaagcgtggcgttggtgttggatgagttcggaaacatcgaggccgggtatttccacggcgacggccagcttcatcaccagttcgtcgcgtccgcgttgttccggggtaatgggggagcgccaccatcggtcaagctcttgggcgccggaattggtcaatcgccataatggtgcggccgctgcggtgccgacatcattggatccgctagtagtcggcgcggtctcttcaatcagtccgtcgcggttcaaccgctgcagcgtagtggaaacttgccccatattgagcggccaagtcagaccgatggtgcggtcgaagtccttcttaagctgataggcgctggccgggcctcgctccaacagtgctaatagcgcttctctgattgccataccgcatcccctttgcatagacggtttgccttgggcgaaggttactgagtaactatcgttggatatcaggttactcagtaactacccatgacggtgctgtactcagggatgattcaggggagattcaggggatacacttggcgcccctcagttgcccacggcgacagctcccctcagggaggggagtcgagagtgtggaatacaaaaagtctcgcaagccagatgacatgtgactaattctcagaaagccgggcccgttgtgtgtcaaggtgtgccagtaacatcgtgacggtttgtgtgtaggtacaggttgatatccaagagcaagtactcgagaacgcaagtaccgaacgattacgcaagaaaatcagtattaagagaggtttcgatggcggttcgtggagatatccgtaatgtggcgattgtggctcacgtcgatcacggcaagaccaccctggtcaatgccatgcttcagcagtcgcacgtgttttccgagcgtgaggaagtgccggatcgtgtgatggattccaacgatctggaacgcgagaagggtatcaccatcctcgccaagaacacggccgtggaatacaccggtccgctggccgccaagtacggccacccggagggcatcaccctcaacatcatcgatacccccggccacgccgacttcggcggcgaggtcgagcgcggcatctccatggtcgacggcgtcgtgctgctcgtggacgcctccgaaggcccgctgccgcagacccgattcgtgctgcgcaaggccctggaggccaagctgccggtcatcctgtgcgtgaacaaggtcgaccgccccgacgcccgtatcgaagaggtcgtcggcgaaacctccgacctgctgctcggcctggccgacgacgtgcagcacgagggcatcgacctgaacctcgaccagctgctggagatgccggtcatctactgcgccgccaaggccggctacgcctccgtgaaccagcccgccgacggtggcctgccggacaacgacaacctcgagccgctgttcgaggccatcatctccaccatcccggcccccgaatacgaggaaggcgccccgctgcaggctcacgtggccaacatcgactcctccgacttcctcggccgactcggtttggtccgtatctacaacggcacccttgagaagggcaagacctacggcctgtcccgtgtggacggctccctcgagaacttccgcgtctccgaactgctgcgcacgcagggcctcgagcgcaccccggtcgagtccgcgggccccggcgacatcgtggccgtcgccggcgtcaacgacatcatgatcggcgagaccatcgtcgaccccaacgacccgaagccgctgccgctcatccacgtggacgatccggccatctccatgaccttcggcaccaacgactccccgctggccggcaccgagggcaaggaccacaagctcaccgcccgcatgatcaaggaccgtctggaccgcgagctcatcggcaacgtctccatcaaggtgttgcccaccgaccgccccgacgcctgggaggtccagggccgtggcgagctggcgctggccgtgctcgccgagcagatgcgccgcgaaggctacgagctgaccgtcggccgcccgcaggtggtcaccaagaagatcgacggtgtggtcaacgagccgatggaaaataccaccatcgacgtgccggaagagtacatgggcactgtcacccagctcatggccgaccgtaagggccgtatggacggcatgaccaaccacggctccggttgggtccgcctgcagttcaccgtgccgtcccgtggtctgatcggcttccgcacggctctgctgtccgccactcgcggcaccggcatttcctcctccatctccgctggctatgctccgtgggctggtgccatcaccattcgtcagaacggttccatggtttccgatcgcaagggtatcgccaccccatacgccatgcagcgtctgcaggcccgtggcaacttcttcgtcgaaccgcagtccccggtgtacgagggtcaggtcgtgggcgtgaacaacaagcccgacgagctggatgtgaacatcacgctggccaagcacatgaccaacatgcgttcctccaccgctgacgtgctcgaaaccctgaccccgccgatcaagatgagccttgaggagtccctggacttcgccaacgaggacgagtgcgtggaagtcaccccggagtccatccgcgtgcgcaagatcatcctcggccgtgaggactggtacaagtggcgcgccaagcagcgccgccagaacgccgcccagcagggtaagtgatctggtgcgactgtagccgaccattctctctggctcccctctctgaggggagccaagtttattcctcgccaagtcatatccccacctatactgaaacgcatgactgtgaagagcactactgaactgcgtccgtggtcgtatcgccagaacgcgctggtcaaatcgttgatcacgattgcggcgggcgtggcttccgcctttgtgggcacgttcgcccaccgtatgggtgcagaactgagtattccgtatggtctggtgctggcatttctgctgatcggcctatcgacatggtgcgcccgttcgcgcatgggcgcggtcggactggccctgcacctcatcgcctcctcgctgaccgcatggggcatggcactgaccaccacatccggcaaggcggtcatcgtcgccggattccaaggcgacatgccgttcttctcccagcatgccggctacatctggctgtacggcctgatactggtccaagtcgtcctgctcattcttcccgcccgctggttcgttattcccactcattctgaatcgcgcgcgtaactatatatggcggcacatttccgcgaatgcgtcgcgtatcggcgggcgtaggggattacggccgctaccatagaaccttatggcacgcatgaaactgttttacttgggcccggaaggcaccttcacccatcaggcggcaatgacggccgccgaccagttcgccacactcggcgacttcgacctcaccgccctgcccgacgtgcccgcgatcatgcaggccgtacagtcgcgccaaggctggggcgtcatcgcatgggaaaacaacgtcgaaggctatgtggtcccgaatctcgatgcgctgatcgacgcccccgacgcggccggcttcgcccggatcagtgtggacgtggccttcaacgccttcaccgtgcgcggccacagcatctgcgactgcaccggcaaccccgtcagcgcccacccgcacggcctggcccaatgcacccggttcatcaccgaacaccatttgcagcccgaacccgcatcctccaacgccgccgcctgccgcgacctgaagcccggccgcgtggcgctcggccccagcatctgcggcgaactctacgatctcgacgccctcgccgaacatgtgcaggatttcgatggcgcgcacaccgaattccttgtcatcgccccgcgtgatgtggtccaggaattcaacgcccgcgcccaccgcaatgacgccggcgacttcgaaaccatcatcaccttcatcccgctggtcaccggccctggcgtgctcgccgacctgctggacgtcctgcgtgatgcggggctgaacatgaccagcttcatctcgcgcccgatcaaaggccacgacggaacctacagcttcatcgccacccttgacgccgccccctgggagccaagattccgcaccgcactggaagagatcgccggacacggcgactgggcaaaaaccctggccgtctacccacgccgcgaacgcccgaacccgccggtcgacgcctggatgctgcccgagggcggcgtccacatcaccaatcgcgcgtcggaaggctggcagtacgccgagggagcaaggaaggaactgctgtggtagacacagtcggaatcgtcggactcggattgattggcggctcgctcgcacgccgcctgaccgagcgcggcgtacgcgtcatcgcgtggaaccatcgctcacacccctacgcccaggccgaagccgatggcattttctgcaagagcacgctctccgaactcatggatgccgagccggatgtggtcgtgctgtgcaatccgctcaaggcgatgccctcaatcctcgccgccctagccccgcttatgggcgaccatccgaacaccacgctcaccgacgtgggctcagtcaagggcatggtccgcgatcaggtcaaggctgccgcgctggggaagtgctacgtcggcgcccatccgatggccggcaacgaactgtccggctggcaggccgccgacccgcatctgtacgacggtgccctatgggccatcaccgtggacgagtccacggactaccgccgcttcctcgacgtcgccgcgatgatcaccaaggacgtcggcaaccgcgtcatcgtcgtggacgacgaaacgcatgacaaggccgcggcgatgatctcccacatgccgcatgtggtgtccaccgcgctgatcaacgaactggtcgccaacccggaccgcaacatcgccgccgcgctggctgccggctgctggagggacatgacccgcgtgtccctgaccgacccggaccgcacgcgcgcgatggtcgaggaagactcgctgaacgtcgaagtgctgctgcgccgcatggcggcacgtctgaccgatatggccgaccaactgcacgctggtgccgacggcgagcaggatgtgatgggattcttcgccgaaggcgaccccttccgccggtacaaggccgccgtgacgcgagccggcatcaccgctgcacaagctggtacggccaccgcgcagcaagccggcacaactgccgccggattcccggaacgcgagctcgccgtccccgaagccggctggcagcagaccttgctgttctccgcacgccggggagaagccatcaccggtttcatccatccgcgtcaggccatcgtccaactgcgccccgccatgtaactgcgccccgccatgcagcccgtgtgcaggttcccctcgccgcctgtcacgaagaaggctgcgcgagggggatgaagttcccgcttgttttcgtgagaagaccgtgtggctccgctgttcgaaagacccaaaggagtaaggtagtctgtaccgtttttcgggaaacgcatcgaagtgaatgcggcggatggttaaggggatgatgacgtatgacgttaccaaggcagattccggccggtgcccgcgtggtggtgcgcatcaccgacggcattgacccggtcgaccaccgtatgaagttccgcgactatgtggggcatgtggtttcctgggatggatacacgttggagatggtgcgtgacgccgccgccaatggttcgcgcccggcccagaacgtgaccatccatcaggaacagattgccacattgaaacccgtgccggagcggcgcaacacgccaccccggccgtaacccaaggccataaagaattcggaggagaacgagagtgtcatctacgcagttcgacggcgatatcgactccttcgtctcctatctgaagtccaaccgcggcctgtcagcgaatacgctcaaagcgtatcgcgcggatctcacggcatgcctgcacctgttcgagctgcgcggcgtgaccgatctgaacgagatcacgctggatgatctgcgcagctggatggcggtggaatcgcgcgatcacgcccgcagcagcatggcccgcaaaaccgtggccgtgcgcgggttcttcgcgtgggcctatgagcatgggctgaccaccaccgacccggccgccacactgatgactccctcgattcccagcacgctgcccgcggtgctcaccgaatcccaggccaagcaattattggatgtcgctgaacatgccgttgcaacaaaccagtacaaggacgatgggggagcggcagccgcgtccggcagcggcagcggcaagacagctgataagtcggccgataccgtaaaccgcagtgaggcacccgcccgtgcagacaagcgcgacaacgcccgagtcaccgccgaatcgcagcgcaacgccgcgattctcgaactgctgtatgccaccggcatccgtgtcgccgaactggtgtcgatggatatcgccgacatcgacttctccaatcgcaccatcaaagtcaccggcaaaggcaacaagcaacgcgtggtgccgttcggactacccgcccagcgtgcgctggagacttggctggaacaggggcggccggtactggcccgtacggcaacggatgcagtcaagtcccgtgctgccaacgccctgttcctcggcgcacgaggcggccgtatcgaccaacgcatagcccgtgacatcgtgcacagagcggcccgagaggccggcgtgccggacatcagcccccatgcgttgcgtcattcggcagccacgcacatgttggatgggggagctgatttgagggaagtgcaggagatgcttgggcattcctccttgaaaactacacaacgctatacgcacgtctccatcgagcagctcaagaaccgttacggacaggcctttccgcgggcatgaccactatgtggacattggttaacaaactcagcaaagactgaacctagccggcaagaacccctgaattttacatgggtgtaacaaaaaatacaccgcttgtctcccaagtgcgcaaaaatgacaggtaatcagcaacggggttggattgttcgagacatcgtgagatgcaagtctcacggtgacggggaatccagccccgtttgcatgaggcggggctgcaacgccccgcaacctaatgaataggagaaatcatatgaagaagaaagctcttgctttcgctgccatggcctgctccgtggccatgctgctgagcgcctgcggcggctccaacagcaacgctgcctccggtaacaccgctggctccaacatcatcactgcgtacaactccgaaccgcagaacccgctgatcccgggcaacaccaacgaaaccggcggcggcaagccggtcgacctgctgttctcccgtctggtctccttcgacaaggacggcaaggcttccaacgaagtggccgagtccatcaccccgaacgatgacgccacccagtacaccatcaagatcaagtctggctggaagttcaccgacggcactccggtgaccgctgagtccttcaccaaggcctggtcctacgtggccaacgccaagaacgcccagaagtgttcctccttcttctccaccatcgccggctatgacgatctgcagaaggatggcctcaagggtgacgagcagctctccggcctcaaggtcgtggacgacaccaccttcaccgtcgacctgaaccagtccgactccgtgttcccgattaaggtcggctactcggccttcgccccgctgcccgagtccttctacaaggacccgaaggccttcggccagaagccgatcggcaacggcccgtacaagctggaccactgggatcacaacaaggaaatcgccctcgtcaagaaccctgactacaagggtaacgagcagcccaagaacgacggcgtgaccttcaaggtctacaccgacgactccgccgcctaccgtgacattcaggccggcaacctcgacgtgatggaatccgtcccggccgccttcaccaagaccttcaagaccgacaagaaggtccaggcttactccgaggtcggctccgtcatccagaccttcaccatcccgtcctcccttgatcacttcaagaacgacgaggaaggtcagctgcgtcgtcaggccatctccatggccatcaaccgtgaccagctcatcgacaaggtgctcaacggcaacgccgccgccgccaccgagttcacctccccgaagaccccgggctactccgactccctcaagggtgccgacaacctgaagttcaacgcctccaaggccaaggaactgtgggccaaggctgacgccatctccaagtacgacggccagctcaccttctcctacaacgccgatggtggtgccaagccgctttacgacgccgtcgtgaaccagctcaagaacaacttgggcatcgacgcggccaccaacccgatcccgaccttccaggagttccgtgacgccgtcaccaaccgtcagatgaagggcgccttccgtaccggctggcagcctgactacccgtccgccgagaactacctgtggcagctgtactccaccgctgctgctgacggcaacggctccaacgacggtgactacaagaacccggccttcgacgacatgtgcaagcaggccgccgccgccaagtccgtcgatgacgccaacaagctgtaccagcaggctgaggaaatcctcctcaacgaccttccggccatcccgctgtactactccaacgcctccggcgcggcttccctcagcgtgaagtccggctacgccttcgattggcagaacctcccgacctacaccgagatgtccaagaagtgagtctgactcactgaacggataccgttaggcagttcggaaataaagggcgaggatcgcaagatccccgcccttttttgttgtgtgaggggtgcttgctcacgccatcgggaaccaagttaaagtatccactatccgaccgcaaccatggacatatccaccagcattgcccaatctcaaaccttgcgttaacgcaaatttacatatcacagtccgggcatgcggtaaactgtcggagtatttatcgaccggcgggggcgtactataccctttctggccggtctaggaaataaggagcaaccgtatgggtaagtatcttctgcgacgcattctgcagatgattcccgtggttctcggtacgactcttctggtatatgcccttgtattcgccctgccgggcgaccccgtcaaggccatgttcggagacaagcctgtcaatgaggccgtcgcagcccagatccgcgcagaataccatctcgaccagccgttcatcgttcagtacttcatctacctgaagaatgcactgaccctgaacttcggcgataccttcgccggccagcccgttctcgacgaaatcacccgcgccttcccggtcaccatcaggctcggcttgatggcgttcgtgttcgaggcgattttcggtgtggtcttcggcattatctcgggcctcaagaagggcaagtggtacgacaccgttatcctgatcgtctccctgctgcttatttccgtgccgaccttcgtcaccggcttcgtcatgcaatatgtctttggtattcagtgggcgatattgccggtgacggcaggcgccgaccccggcttccttgatctgctcatgccggccatggtgctcggttcggtgtcgatggcctatatcatccgactgacccgctccgaaatctcctccaacatcgccgaggattacgtgcgcaccgcacgtgccaaaggtatgtcgaacggtcaggtcatgctgcgccacgtactgcgcaactccctgattccagtcgtcacttacctcggccaggacatcggcgccctgatgggtggtgccatgatcaccgagcagatcttcaacatccacggcatcggcttcctcacctaccagtccattctgaagggcgaggcaaacctggtggtgtccatcgtcacgttgctcatgctgattttcgtagtgtgcaacctcgttgtcgacatgctgtacgcggccctcgatccgcgtatccgttacgcgtgatagggaggagtgagtcacatggcaaacgaaaccactgaaaacgagctcaaccagaccggcgagccaggaaccgaatacttcatggaaaccctgcccggtcaggaccgttacgtagctcctctcgacgagaccccgttgcaggacgtcgattccgtcgacgaatccgcaccggccaccagcatgtgggccgacgcatggcgaaccctgcgccgcaacccgctgttcatcatttccggcttgctgatcctgttcatcatcgtggtggccatcgcccccggtctgttcaccaagcaggatccgaacgcctgcgatctgggcaactccttgagccccgcctccgccggacaccccttcggctacgacctgcagggctgcgacgtgtacacccgcgtggtctacggcacccgtacctcactgtccgtcggcgtgctctccacgctgctggtcgtgattgtcggtaccctgatcggtgccgtcgccggcttcttcggcggttgggtcgacgcggtgctgagccgtatcaccgatatcttcttcgcgctgcctatgctgcttggcgccatcgtggtgcttcagatgttcaagacctccaagtccatctggaagatcgtgctggtgctgacgctcttcggctgggtcggcgtatgccgtatcgcccgaagcgccgtgctggaatcgaagaacctcgaattcaacaccgcttccacggccctcggctccacgcctgccagaaacctgttccgtcacatcctgccgaactccctggccccgatcatcgtcatcgccaccacctcgctggcctcctacatcgtggccgaagccacgctgagcttcctcggcgtcggcctgcccaccaccacggtgagctggggcggcgacatctccagcgcgcagaccaacctgcagaccgatccgatggtgctgttctacccgtccgccgcactggccatcaccgtgctcgcgttcatcatgatgggcgacgccgtcaaggacgccctcgatccgaagagccgtacggcctgagcgaggggagtggagaatcattatgactgacaacaccaacgccaagatgctggctatgcagaaagagcatggtccgctgctcgaggtcaaggatctggccatcgacttcaccactgacaccggcaagccggtgcatgcggtgcgcgatgccaacttcaccgtctaccccggccagtgggtggccatcgtgggcgaatccggctccggcaagtccacctccgccatggctgtgctgggcctgctgcccggcaccggtcacgtggtcaacggttccatcaagcttgacggcgaggaaatcgccggcgccaagcagagcgagttcgacaagctgcgcggtaccaagatgggtctcgtgcctcaggacccgatgagcaacctcaacccggtgtggcgtatcggctcccaggtcaaggaggcgctgaaggccaacaacatggacgtggcccacgagaagcgctccgccctcgccaaggctctggccggcgacgaggtcgaagtcaagggcaacgacgacgagaccttcctcggcaccaaggaactgcccgagctcatgaccgaggccaagaaggccctgaccgaagccggcgtgtccggcgaggccttcgacaaggccgtcgcccgcttcaccaacgaatgggttccgggctccgaaacccgttggcgcgtggccgacgacctcatcaaggccggtgtggccgatgatcaggcctggtacctcgccaagaagtacgtcatcggctccacaatggatgaccgcatcgcgggtctgctgtccgaggccggactgcccgatgcggccacgcgcgcccgtcagttcccgcacgagttctccggtggtatgcgccagcgtgcactcatcgccatcggtctggcttgccgccctgacctgctgatcgccgacgagccgacctccgctctggacgtgaccgtgcagaagcgcatcctcgaccacctgcacatgctcaccgactcactgggcaccgccgtgctgttcatcacccacgatctgggccttgccgctgagcgtgcccagcacattgtcgtgatgtacaagggtcaggtcgtcgaatccggaccgtccctcgaggtgctgcagcacccgcagcacccgtacaccaagcgactcgtggccgccgccccgtcgctggcctcccagcgcatcatctccgccaaggagcgcggtgagaacgcggacgccctgctcgatcaccacatcgccggcgaaagcacgcttgagaaaagcgagcacatcatcaccgtcgaccacctgaccaaggaattcaagctgccccgcaagaaggagatgttcaaggccgtcgacgacgtgtccttctccgtcaagcgcggcaccaccctggccatcgtgggcgaatccggttccggcaagtccaccgtggcgaacatggtgcttcacctgctgaatcccacttccggcaaggtgttctacgaaggccgcgacacctccacgttcaaggccaaggatctgctcggtttccgccgccatgtgcagccggtgttccagaacccctacggttcgctcgacccgatgtactccatcttccgttccatcgaggagccgctgcgcatccacaagattggcgataagaagtcgcgtgccaatcgtgtcaaggaactgctggacatggtcgagatgccggcttccgtgatgggccgttacccgaacgagctttccggcggccagcgtcagcgcatcgccatcgcgcgagccatggccctggacccggacgtcatcgtgtgcgatgaggccgtctccgccttggacgtgctggtgcaggatcaggtgctgcgcctgctcaacgacctgcaggccgagaagggtctgagctacctgttcatcacccatgatctggccgtggtccgccagatcgccgacgaggttgtggtgatgcagcacggcaagctcgtggagcacgccaccaccgacgaggtcttcgaccacccgcagaagcagtacacccgagacctgctcgacgccatccccggcggcaagctccaactcggtctggactgataatctgcgtttgagcgcattgtattgggttctttccatccgtggaaagaacccaatattcgtatgtgcaggtttgcatgatggttcgcgtgggacgaaaggcaaaaattggtgttttcccgatgttgtcccacaatttgtgggacaacatcaacatcaatcgatggacatgagtgttgtcccacagcagatttctcacgaagcccggaattacgccattcttagtgtggtcgataattactcatgctgtggggcgtgggacgacccgcgaaaatcgtcgattttcggatgttgtcccacggaatatgtcatacctcgtatgtgatcgtgagtggggcgtgatcggaccagcgtttgtcatacgtgggagccttgtcgatgacgaatccgcgtgcggtctccgccaactcgggcgtggcgaactggtagtcgattctccagccgacattgttgtcgaaagcgcgccctcgctggctccaccaggtgtatggcccctgaatgtcgccggccaacgaacgcatcacatccacgaactcgtattcgtccagccatttgtccacgtaggcacgttcttcgggcaggaatccggcgtgcttctcattggccttggcgttcttgatatcgagcggcgtgtgtgcgatgttgaaatcgccgcataatacagcctgcttgccgccatgtgcggcttcatcacgaagcgcgcccatgcgggccagcatagtgtccagaaaacggtacttctgttccattttggtcggatcatcggtgttgccggcatgtatgtacacggatgccacggtgatcgtatagccctcaggcgttttgagatcggtttcgatccaacgccccgaatccacatcctcgctcagacctggcagaccatatcgcttgtcaagcacttccaagtcggtgagcagcccgactcccgcgcggcctttcacccggcagacctcgttcatggcatggaggttggccggtgcctcgattttgccggcggtggcgtattcgaaaccaaattcatcgaaaatagaatcgacatcgtcctgaggcgcgcgaacctcctgtatgcaccagacatccggcgcatgcttgccggcccaatcctcgatgcccttgcgcttggccgcacgaatgccgttgacgttagacgtggtaatggtgatggtcatgcggccatactattttggcctccctacgaatcgaaccggacatcggcggccgcgatgctcagctttctctaagcctgagtgctagtgttagcaaggttgcaaccgttacatgaaacgaggaattatgggactgttcggattcggcaagaagaagagcaagaaggaagccgagccggccgttgagcctgtcgatgaggacaaggtggccgccgcagaagcgaacgctgccgcaaaggccgagagcgcggagaccgtgctcgccgagccggccagcgaataccagggccgcggcgaagagcgaggcccgtgggatgtcaacgatgaggacgtgcccgattatgacgattatctggatctcggtgcctactacctgcccttcctccagggcatccagctgcgcatcaaggccaaccgcgccacccagcaagtgcttggttccaccatcaccttcggctcctccagcctggagatcgaagcctttgccgcacccaagaccctgggactgtggaatgacgttcgcggtgacctgcttgaagccaacaaggccgcttctgaagtggacggtgtgttcggcaccgaactgaagctgccggtcaatgtcaagggcggcaaaaccgtgaacacgcgcatcgttggtgtggacggcccgcgctggatgctgcgtggcatcttctccggcaaggctgctatcgatccggacagcccggagaccgaggcgctgaacaagttcttcgccgacatcgtcgtcgagcgtggcgaggagcctttggcgccgcgcgatctgatcccgatgcatccgccggtcgcccccgccgagcgtaaggccgccaaggccgcggccgaagccggtgaggagaacggcaaggaacacttcaaggacattccggacaacaagccgaagggtccgctgagccaggaccagcagaccgaagtgaagaccacgctgtctcgcggcccgatgttctccgaagttcgctgatttataggaagagacttggcagacaacaaacgcaccggcctgtccgctctagccgacgccggcaatgaaggcgaggatttctccgtcatcgacgccatcggtggcccgcgtggcgtcatcgaatccatgctgcctggcgtggtgttcgtcgtactgttcgtggccacgagcaatctgaatctcaccattgcggtttcggccgtgttggcggtatcgcaggttattgtgcgactgattcagcgccagtcggtaatgggcgcggtctctggtctggtggcggtaggcatctgcctgatttgggcatggcagactcatgaggcccgcaattactacatcttcggattcattaccaatgctggctatgccgcgttgcttgccgtgtcgctgattgcgcgcgtgcccggactgggtttggtcgtcgaattcatccgtagcctgcccaccgagcatttcaaggcatggttccatgactggatggacgacaaggccctgaaacgcgcctatatgattgtcaccggcctgtgggtcggtctgttcctgctgcggctggtggtgcaggtgccgctgtatctgaccaaccatgtagctgcactcggcgtgacccgcctgctcatgggcattccgttctgggcattggcgatttgggtgagttacctcattattgccacgccgatgcaccggcataaggtcgcggctaagaagatacagactgaagtcgctgttgatgccgaactcgaaccgagcgcaaccggaaaggacgatgatgcaagctgaagttcgtatcgaacgatacgccgaccaaggccgctgcgtggcccatatcgacggtcgtgtggtgttcgtccgcttcgccttgcccgacgaactcgtgcgagtcgaacttgacgagccccacgaccgggacgaccggttctggaccggcgaagtcgtcgaggttctcgagccgtccgaagaccgagtcaccccggcatggccacttgccggtcccttggcgatgggcgggggagcgggcggcgcggatctcgtgcacgtctctttgcctggccagctcaagtggaaggccatcaccgtctccgaacagatgagccgactcggccatatcgacgtggcagttcccatcgagcgcatgcccggcgacaaggcagccggcggcctcaattggcgtacccgcatcgaaatgattgccgacgacaacggcatgccatccatgcgccggcgcggcacacacaaccgcgtggccatcgacaccatgccgcttgccacgcgcacgctgctggacgtcgccaagcgcgaacacgtgtgggaaggcggctttgaacccggctcccagattcgtctttccgtgcccgaaccgcgcggcgagatcgtcgataccgcggcagcagacgacaattacgccgtacttgtggacggcgaactgcgcgccggctcccagctgctcaccgaacaggtgaccatcaacggcacgaccttcgactatcaggttgacgccaacggtttctggcaagtgcatcgccaagcgccgatcgccctcggtacgcacgtgatcaacctggtcaacgggcagctgcagtcagcggcggacgccgtaatctgggatttgtattccggttccggcctgttcaccctgccgctggccacaatgaccggtgaacgcacccgcatgctcagcgttgaaggcgcgcgtgtggccgtcaagaacgcccagcgcaatctgcgcgccatgaacctgaacgacgtggacgcccgcgcgggtgacgtctcgcgcacgctggaccatgtgccggcgcatctggccaagccgaatgtcgtagtgcttgatccgccgcgtgccggtgctcgtgccaaggtctgccgccagattgccgcggccggcgcatccagcgtggtctacatcgcctgtgatcccaccagcctcgcacgcgacaccgcgacactcatcggcgaaggctacgagctcaaagacatccgtgccttcgatatctacccgatgacccatcatgttgagacggtggccctgtttacccgctgacaggtgagcatatgacacgacgaattctcggattgctggcctgcatggcggctgtgttgtccctggccgcctgcacgccggccggtagggcggtcggcgatacccaagacagcatgccggaagtcgcccacgattccacacatcccacggatgtcacagtcggctttgtggggtcgactgacaccgccgcagacgagttcgtcatcaatgcgctgtctgatgacaaactcaatgtctactatgcctcgctcgaaacatccgcaagctcggcaaacgcaactgatggtgtatccggtgaaaccgaatcttctgacgccggcactaccagcgaaaacggtgccgatagtatggatgctcatactggcgtcgacaagaatgcggccaccgcacagcagggtgttgccgatttcgtagctcgcgcggtcaaaatcgtggttatcagcggcatcgacgttaccgacgccaaccgggagagctggaaccagacgttgaccaatgcgcgtgaagccggtattccagtcgctctcattgatccaaagcatgcgcccgaagatgaactgctgtacgccgtcatccttcacctcaacaccaacagtgccgattctggcgacactgccgataccaagccaatgactattactgacgccgtgctcaccatcacgcgcgacgaaccccacgaacgcgagatcaaagtcaccgtttcctgagccgaatcaggcccttgaagctgagaaagcaccctgaatcatccctgagccttagcggattgcgaaacaagacgcggtaggctggggaatatgagtgcaacaacagccgtggaaatgcctgagatcggagcaaccggtcttacccccaaagaagtggtgcagcgtatcgaaagtggccaatcgaatgcggtgaaaacatccacctcgcgttcggttcaagatatcgtgcgagccaacgtattcacgctgttcaacggcatcatcttcgccgcgatggtactggtgctgatcaccggttcctggagggacgcggtgttcggtttcgtcatcatcatcaacacgggcatcggcatcgtcaccgaactcagggccaagcgcacgttggataagctttccatccttgtggcctccgaattcctcgtgcatcgtgacggcagggacgtggaggtgccccacaacgagatcgtgctcgacgacctgctgtggatccgtgccggcgaacaggtgccggccgacgggcagatcatccagacctggggactggaactcgacgaatccatgctcaccggcgaatctcgtaccgtgcgccacaaggtgggggagcaggtgtattccggtgccaccgcggtctccggcatggcattggtcaaggtcaatgcggtcggcagccattcctacgccgccacgcttaccgcgcaggccaaggtatacaagaaaaccgtgtccgacctgaacaagggcatcaacacgattctgaaattcatgaccttcctcgtggtaccgctgtgtattctgctgattctttcgcagattcatacggtcggcggttggggcacggcactctccaccggcgaatggcggcaagccgtggtttccgcggtcgccggcgtagtaggcatgattcccgaaggcttggtgctgctgacttcgctgaacttcgcggtggccgccatgcgtctcgcccgtcacaatacgctggtgcaggagcttgaatccgtggagacactggctcgcgtggacgcgctgaacctcgataaaaccggcacgatcaccgatggcggtatcgccttcaaccggctcgtgatgctcgattccgccaatgcggctgcggaacaggcagccacgcaggccctctacgactgctgcaacgaagagcagcccaacggcaccggccaagccgtactcgccgggctcaaggcccaaggatatggggcaggtgcggttgagtctcgtgtcccgttctcttcggcgcgcaaatggagtgcggtgcgtaaatccggcgagacctggtacatgggagcgccggaggtgattatttctgcgcttgagggtgactattcgtcggtgttgcagcaggttaacgagtatgccaatgacggcaaccgtgtgttgctggttgcgcggtctacagctcccctctccgaggggagctgtcgccaaaagcgactgaggggagcagttgagggagccaatgtctcggacggcccgcaactggatgtgcaggctgagccggtggcgttggtgttgtgctctgagaagattcgcgaggacgccgagcggacgctcgcttggttccgtgagcagggtgtgcgctgtcgtgtgatttccggtgacaatccagtgaccgtgggtgccatcgcccgcagagtgaaactgacaggagaccatgagccggtggcgatggacgcgcgcgaactgcccgaggacgtgaacgaactggcccgcgtgctcgaaaacgtcgatgtgctcggccgcgtgctgcctgaccagaagaaggccatcgtgcaggcgttgcacacgcagaaccacgtggtggccatgaccggcgacggcgtcaacgacgcgctcgccatcaaggaggctgacctcggcatcgccatgggcaacgcggcacccgccaccaaagccgtggcccaagtggtgctggtggattccaagttctcgcacctgccggacgtcgtggcacgaggccgtcaggtcatggccaatatggagcgcgtggccagcctgttcctcgtcaaaaccgtgtactccgcgctgatctcgctcggcgtagtgctgacgcaaatcccatacccatacctgccgcgccatatcacctatatcggcgctctcaccatcggcatgcccgcgttcatcctggcgctcgcgccgaacacgcgccgctatattccgggattcctcaagcgcgtggtcacgttcgcgctgccgggcggcatcgccactgcgctgtcggtgctgctggccgcttgggtgctgccgccggtcatgggctggaacgtgaccggcgatgccacggacctgtccgccctgcgcgccaccagcgccatcatcctgttcgcgatgggcgtgttcgtgctggcccgcgtggccagaccactcaacggttggcgtggcgtgatggtggcggtgttcgcggcggcgggcgtgatcggcgcgttcgtcccgttcgtggcgaacttcttcgccctgattctgccgaccggcgccacgatggtggccacgctgatcgcgttggccggttccgcgctgatcttcgcgctgtgcctgtggctggcgccgttcgtgcgccgactgacgggcaagctctcgcgtcggcattgagacggcggcgcgattgtctcatacttcaagccgacacgccagagcctcggtaacgtgcccgtaccatgtgtagcggataatcagcggcatcataagccgattcatgatttcggaggaagcatgtccttacgcgacgaccagctggctaccctcaaggcagccggcaaggacttcgattactacaacatcgccaatctcgacggcatcgatcatctgccgtactcgctgaaggtactggtcgagaatctggtgcgcaacatcgacggtgccaacatcaccgacgagcacgtcaagaccctgctcgactgggatccgaacgccgaacccagccacgaaatccagttcacgccgtcccgcgtgatcatgcaggacttcaccggcgtgccctgcatcgtggacctcgccaccatgcgtgacgcggtcaaggacctcggcggtgacccggaggtcatcaacccgcaggtccagtccgacatggtcatcgaccattccgtgcagatcgacaagtacggcatcgccgacgcggtccagcaaaacatggacatcgaataccagcgcaacggcgaacgctaccagttcctgcgctggggtcagcaggcattcaagaacttccgcgtggtgccgccgggaaccggcattatccaccaggtcaacatcgaatacttggccaaggtggtcatgagcaaggccgaggccaacggcaacgcgctcgcctacctcgactcctgcgtgggcaccgactcgcacaccaccaccgaaaacggtctgggcgtgctcggctggggcgtcggcggcattgaagccgaggccgccatgctcggccagccgatctccatgctcgtcccgcgcgtggtcggcttcaagctcaccggctccatcccggagggcgttaccgccaccgatgtggtcctgaccatcaccgacatgctccgcaagcacggcgtggtcggtaagttcgtggaattctacggcgaaggcatcgcctccgtgccgctggccaaccgcgccaccatcggcaacatgggccccgagttcggctccacctgcggcatcttcccgattgacaatgtcacgctcgactacctgcgcctgaccggccgctccgaagagcaggtcgcgttggtcgaagcctacgccaaggccaacaagctgtggggcgacgcttccgacccggattacgtggaaccgcagtactccgaatacgaggaactcgacctcggtaccgtggtgccgtccatcgctggcccgaagcgcccgcaggaccgcattctgctgtccgaagccaagagcatgttcgagaagaccgcccccgcctacgagaccgagaagaccgtcaaggatccggtggccgtgtccaccgacttccgtggcgatttcgacatcgaaaacggcgacgtggccatcgcctcgatcacctcatgcaccaacacctccaatccgtccgtgatgatcgccgccggcctgatcgcccgcaacgcacatgccaagggccttaagcccaagccctgggtcaagacctcgctggctcccggctcgcaggtcgtggccgactacctgaaggccgcggggctgcaggacgacctcgatgcactcggctaccagctcgtcggcttcggctgcgccacctgcatcggcaactccggcccgctgctgcccgagatttccgaggcgatcaacgccaacgacctgaccgtcaccgccgtgctttccggcaaccgcaacttcgaaggccgcatcagcccggacgtcaagatgaactacctggcctccccgccgctggtcatcgcctacgcgctcgccggcacgatggacttcgacttcgagacccagccgctcggcaccgacgcggacggcaacgacgtgtacttgaaggacatctggcccaccaatgccgaggtcgccgccgtggtcgacggcagcgtgagccgcgagatgttcctcaaggactacgcctccgtgttcgacggcgaccaccgctggaagggcctcgacgtgccggaaggcgagctgttcgcgtggaacgacaagtccacctatgtgcgcaagcagaccttcttcgacggcatgaaggccacgccggacccggtcgccgatatccacggcgcccgtgtgctggccctcctgggcgactcggtcaccaccgaccacatctccccggcaggcgcgttcaaggcctccagcccggccggcaagtacctgaccgagcgcggcgtggagccgaagaacttcaactcttacggttctcgccgaggcaaccacgagatcatggtgcgcggcacgttcggcaacatccgtctgcgcaaccagctgctcgcctccgtgggcgaggaggtgacgcctggcggcttcacctacgacttcctcgccaagaagccgaccacgatcttcgaagcctcccgcgactacatcgacaacaaggtgccgctcgtggtgctcgccggcaaggaatacggcaccggctcctcgcgcgactgggccgccaagggcacggtgatgctcggcgtcaaggccgtgatcaccgaaagcttcgagcgcatccaccgctcaaacctgatcggcatgggcgtgctgccgctgcagttcccggcaggcgaatcctatgagtccctgggcctcaacggcaccgagacctacgatatcgccggcgtcgagaagctcaacgagggcgtgacccccaagacggtccacgtcaccgccacccacgaggacggctccaagaccgagttcgacgcggtggtccgcatcgacacgcccggtgaggccgactactaccgtaatggcggcatcctccagtacgtgctgcgcaacctcatgaagtaaccaccttcttggctcccctctcttgaggggagctgtcagcgaagctgactgaggggagcaaggccggtatccgccaacggataccggccttttccatgcatgccaaaatgctatactgtatagcatcttcgaaatggaggttgccatgaccatggtccaaatgaacgttcgcattgatgcgaaactgaagaacgaggtcgaagaagtcctcaagggcaaaggcgtatcggtgagtgacgtaatccggtcgctgtggttatacatcgccgaccgcaaggaagtgccggcattggaaacgaccgccgaagagcaagcccgcgaggaggaaaagcagcgcaagctgaaactgattcgagaaggtgccggatacgtgcacaaggaactggtcaaggccggactgatctcagaagacaccgacctcatggaaggccttacctacaagcagttccgcgacaaaatgtacgacgagcaacttgatgcgtattacgacatgaagagggccgattgatgaccgacgtttccatgcagcgtattttgcttgataccaacgtactgttggactatttgctccatcgcgatgatcacgccaagatggcggaagcggttatggaacttggcgcgaagaacaacgttacgttgttgtgcgcgtcactgtcgctgaaggatatcgcatacctatcatcatcggcgattcgtagcgaattcaaaccgaatgaatcggaagtggagaatttcactcgcggctttctgtcgtcacgggtgccatggcgttgtatcgagcaggtgaaggagatgtgtgacatcgtcgctgtcgatgagtcgacatgtgatagggctttttccctgcaaaaacggcatcgggattttgaagatgatctgatcatcgttgccgcgcaacaatccggtgccaactgtgtggtcacatcggatgccgaattaatcagtcattttcccgaatattgcaaaacaccggctgaaatcgtggcggcgctggaataaatgagcgtgtggctcccctcacggaggggagccaccaatgatgtgccggctactgtagcctactgcgcctgtagacggaactgcttccagatgtcgctgagcttctgaccgttgcgcgtgcgcttccacacgtccagaccgccgccgcgacgtcctccggcggcggcacgggccgcggcggtcggagtcggatattcggagccgtcatccagacggagacgaccgttttcggtgaccgtggcgaaccagcgctcgcccttgcgcggccgctcccacaccagacgctcgcccggcaccagcagaccagcgtcaatcacctgccggatcgtgacgcgccgcgaactatgagacggccgtggagaggtcttcgacaactcatcgacattctgcttggtcagatcacgggcgtccttgtcataccggatgccccagtattccacgatgagtcggaccgactcttcctgccgcgcctccagcagggcaggtgtgcagtcagcgaaatccttcaactgattggtcagcgggaaacgacgtgaatccgcgcgcaacagcatgcggtcgcgacgtgccggatattcactcaacctgtccaactgatcctcagggccctgcaccagcgccatattgccgagtcggtacatccagaaatcatgctgatcctgcggccagtccgcaaacgatttcgaccgttcgatatccaacggcataatcggcagcgcactgaaccggcgtggtcgatccaactgcatgccggccttctgctcgttggcgcgaatcagcagcagacggaccaaatcgccgtcaccctgcatctcgccatgcaaacggaccaatgcgccttcacggtcgccgtccgagacatgcaacccgttcacgcgctggaccaaatagcccttgtcaagatcacggatggcggcgttcgcataaccgcgccgctccaacgctccagtgcgattcagcgtgcggatgccggtcacctgttccaatgcggtcagaatttccagcagccgacgctcgtcatgggcgcccaacgattccaacgtggccgtggttctggcgatacgtgaggcacgaaccacgaacggcgacaaatcggcgtcgcccagcccgcgatacgaattgaccaacgcccacatggccacgggcttccactcgtggctgcggtaatcgtccaatccctcaagccggctacgcacctcggcgggcagtacggtatcgctggggcgcgcgatgatccgccacgccatcgcgtagggtgccagcacctggttgatgaacgtgggcaccgtgcctttgtcgatgtacggttgcagcacgtcggccaggaaatcctcgatgagcttgtcggtggccggcttgtgcgtgagtacgagatgcagataggcgaagaattcctcacagtcatgcggatcgtcgccgattgggtcaatgatgtcatcccaacgggctgcgtacacgtcaagttcggcggtcgacaggctggccgtggcgcgcgccttgaacacgtcggacggggtgagcggcaggccgcgcatgttcatcacgtcgaagatgcgatgcgcaccgtcgagatcgtcggtggtcacgatgacgagcgtcacctcgttgaccagatactgcgcgaattgctggcgttcggatgccgaccaattggagatctcgtcgtacgtcttgcggatgttggcgacgatgttgcgttgcgcagcggtcgccagatcgtcgtcgttcatgtcgaacacggattcgaggttgtcctcctgcacgtgttcgcggaagaacgccgcgtcgcgctcgcgcaacgtgaggcgaggctcggtgacgatgccgcgcagcttgtcgccgggctccaccagcagcgcgtcgagttggcgcatgaggtccgggtctcgctccagatcgcgcagcacggcgatgatgatcgacagggataccagccgctgctgcccgtcgatcacgtcataacggttgtcgccctcgcgtaccagaatcagcgagccgaggaagtacggggtaccgggtgacttgcaggcgtcgtccaagtcgcttaccagttgcaggatgttctcggccttccatatgtaggcccgctggaatgaggggattgtgaaccggaaatccggggtgaacactttcccgagtggtagttccttcgcgctgattgccatgtcaatcccttcgtcgccggcctttggacggtatgccgacgtgccgactgtgctcaagcctaccagtgttcgcccggcggcgggcgcatcacgccggctcgggcaccgacccctcgtacaagtagaacgaagacgggttttctcccggcccggatgcgggcagtgactgctcgcacacctgcgtcaggccgcgatgtacatagaatccgacatcgcacgtggtatccgtgaataggaagtactgacgtatgccggctgcgtggaatgcgctcatcatcgtctcgaacatgcgccggcccagaccgtgaccgcgcgccgccggatcaagtacgaacagcaccacttcagccgaatactcatggccaatgttcgccgcctgcttacgcagttgcctatcgacatgaagagtcccgagaatctcgctcgcagctgccatgccgtcgtgggcaaacgccagttgcaatagcttgcgcaaagaatgacgccggtgcatgttcagcgggctgcgatggtcgagctcgtcgatacgccccacaatcaatgcgacgggtttatcttccagctccgcgacaaaggccgtggtcacacgtgccagacagttctcccaatcggcctcggctgccagcaagccggtccgctcatcatattcggcgtaccaagtgcggcgcaccaggtcgatcagcgccggataatcgtctttacgtaacgttcgaataatcgcttcactcatgttctccattatgactgatatggctcgataaccggacgtgttacagtcgcgccggcaaatcggcccgctccaccagcctcgccatctgtactcggcccatattgagcttgtccgccgcggaggagagatgcgccttggccgtacgctccgagataaacatacgggaggcgatttcggcgttgggctatgtgctgcaagacgattcgccgattacggtgtatgtcactgcgttcctatcaacggatcaagacaccaaggtgacgcatgccttcacgttgcagtgaatcgcgcggcggtccaagctgcggtcgaatgccaatcgaatctcaagtgcatgccacgcgcatggtggaaacgcccgttacgctttgcgatgagcagaacgagccgatcgatcctattcatggaatgttcagctttgttcctctaagattggtactggaacaaacgctaaaggagcgattatgacattcggtcagcagccccagaacaacgggcaatacaacccgcaatacaacacgcctgattacaacgccgcccaacagtctggatatggccagcaatacgcacagtccggttacggccagaactactatgcccagtcgcagggcgcccccacctaccagtacgcgccgcaggatgcggccggtgccggcgcgggtgccgccaccatcaacacgacgatgacctacaactatgaggaggcccgccgcgtctccgtagccaaggtgtacggcgagatgaccatcggcatcctcgtcaccgccgtggtcgccgtgctcggccagatcaccggagcctactacagcttcctcatggccaccggcatggtgggcctcatcggcctgtgcgtggtgcagattgccctggccgtggtgctcggcatgcgcgtcaccaagatgaagtcggccactgcgcgcgtcatgttctatgtgtacgccgcattgatgggcttcaccttgagctcgatcttcatggtctacgacctcggctcgatcggcgtggcgctcggtgtcaccgcagcgttcttcttcgcgctgaccatgttcggcatgactaccaagttcgacatgctcaaggccggcccgatcctgatgatcggcctgatcgtgctcatcatctcgcagatcgtgctcgccttcgtgcaggtcgacggcatgaccaagatcgtctgcgccatcggcctgatcctgttcgccggcatggccatctacgacgcgcagtccacgcgcgcgctgctgaccgaatacgaggcccagggcccggaaatggtcaagaagatctccatcctgtgtgccctgaacctgtacctcgacttcgtgaacatgttcctgtacatcctgcagctgctcggcaacagggactagcctcgccagccgattggtgggcggcatgtagcctgctcgtcaaacgtcgcagcccgaccacattgtggccgggctttttcatgtctgtcacattcgcacgttaggctgtctccccgtgaaaagacaagaactcgtaggcatgctgagcctgttgttgaccgcgctgatctggggttttgcgttcgtggcgcaggtccagggcatggatttgatgtcgccgatgttcttcaacgccacgcgcttcacgctgggagcactgtctttggtgccgattctgctgtggcagcgtggccgggggagcgcggataagggcgatacagccggggtcgatgtcgttgggaccgaggcccccagggccgtctccacagatgccgcatcgaacggcgcatccgacgtcgttaccatcaccggtgccaagctgaatgcgaacaagcccgattcggccgtggcgcgattgctcgccaacccggtggtcatttccgtgatctgcggcatcgtgctgttcaccgccagcaccctgcagcagtatggcattctgtacggcaaatcggccggccgcgcgggattcctgaccgccatgtacatcgtgatggtgccgttgctggcctgcgtgttcctgcgccggcgcatcggcatgctggtgttcgtggccgtggtgctgtccatcgccggcttctatctgctgtgcatcaccgatggtttcggttcgatcggcctggcggatatcctgctcgtgttcacggccgtgctgttcgccgtgcatattctggtgatcgatactttgggcggcaccgtggacgccatcaagctttcattcggccagttctgcaccaccgccgtgctgagctgggcgggttcgctgatcgaaggctcggtcgactgggccggcgctgctcattcctggattccgatcctgtacgccggcatcggctcggtgggcatcgcgtacaccttgcaggtggtcggccagcaatgggtgccaccgacgcgagccagcctgctgatgagcctcgaatcgttcttctcggcggtaggcggtgcgttgcttctcggtgaagtgatgaccccgcgcggttacctcggctgcgccctcatcttcctcggcaccctgctggcccaagcgccggccaggctgccgaagtggctgcaacggtgaatgaatcggacgcaggccgattccatagcacctcagtccgtggtcttaggcgcttcacccacttgcggcgcgccgttgatgtcgcggtggatgttctgcatttgcacttcgatgttctgcagcgaacgggcgcagtcgagcagtgtctgtgaatgctcgctgagcttgttgtccggcaaatcggtcttgtagcgcagcgcatgctccagcgacgcccaataatccatggcgatggtacggaactgcacctccaccggcgtgtaatgcgcgcccgaggagagaaacacgggcaccgcgtagattacgtgcaatgaacgatacccgttctgtttcgggttcttgatgtaatccttgacgcgcagcacctgaatatcggactgcgacgacagatagttggacacggaatacacgtcgtcgcggtaattacagatcacgcggatgccggccacatcgaacagattgtccttaatcgaattgacactgattggcagattcttgcgctccagcttgccaatgatcgaactcaccgacttcagacggcgttccatatgatgtatcgggtcatggctgaaccgcacctggaactcgtcgtcgagaatctccagcttggtgctgatctcgtacatcgcgccttcatacacctgcatgaggtcaacgaatttaacgacctgttcgggagtgaaggtgcctcccggaagatccagcgctttgagacgggcctgtagatcggaggttttgagtcggctatgtcggtcaagtatcacgtccaccaatatactcggcggattccagacaatctggatgttcgcggggaatctttccaagaacccatatttaagatcgtgacaaccaatggcatacgtgaccggagcatgacgaaccccgccgatagaatcggtcgttatgaatgaagacatgatgaccgaggcggagcgtgcctcgattgcagccgatggaaccgatagcttgctgggggagcgtggcaagggcgtattccatatccacacgctcggctgccagatgaacgtgcacgattccgagcgcatcgccggcgtgctggaggccaatggctacgtccctgcaaccgaggaccagatcaatgacaatgacctcgatttgctggtgctcaatacctgtgcggtacgcgagaacgcagccgaacgcatgtatggcaccatcggccgattcaatcgcgtcaaactggttcggccgaacctgcagatcgctgttggcggctgcatggcacagcttgaccgcaagaagatcgcggatactgcgccatgggtttccgcggtgttcggtaccaagaacatcgaagatctgcccaagctgttggatcagaatcgtgcgaccggcaaggcgcaggtccaggtcactgaacaattgcggcagttcccgagccagcttcccgccgcccgcgcctcccgcatcagctcgtgggtggcgatttccgtgggctgcaataacacctgcacgttctgcatcgtgcccaccacgcgaggcaaggaaaaggaccgccgccccggtgacattcttgatgagatccgccaatgcgtggccggcggtgccaaggaggttacgcttcttggccagaacgtgaactcgtttggttatggtattggcgatcgatacgctttcagcaagctgttgcgtgcctgtggcaccatcgacggtctcgaacgtgtgcgcttcacttcgccgcacccggccgccttcaccgatgatgtgattgcagccatggccgaaacgccgaatatcatgcatcaactgcacttcccgctgcagtccggttccgatcggattctacgcgcgatgcgccgctcctacaggtccgccaagttcctcgatatcctcggtcgtatccgcgaggccatgcccgacgcacagatttccaccgatatcatcgttggattccccggcgaaaccgaggaggacttccagcagaccatggacgtggtgcgccaggcgcgcttctcctcggcgttcacgttcatctactcgccacgccccggcacgccggccgccgcaatggaacagattccgcgcgacgtggtgcaggaccggttcgaccgtctggtggcgttgcaggagcagatcaccgaagagaacctcgccacattcgagggccgcgacgtcgaagtgatgatcaccggcaaactcggcaagaaggacaccgacacccaccgtgtcaccggccgcgagaaaaccggcgtgctggtgcacatcggcgtgcctgaaggcgaaccggtacctgaaatcggcgatttcgtcacggtcaccgtcacacacgccggccgccataatctgcttgccgaccccgatgtggccgctggacagacctattccgtgcggcactgaggggggcgtatatgacgcaacgagtcgtctccatcgtcggtcccaccgcgtcaggcaagacggggttgggcatcgccatcgcccggcgtcttgccgaagtgggggagcgggccgaaatcgtgaacgcggacgcctaccagatgtaccgtggcatggatatcggcaccgccaaacccaccgccgaagaacaggcggccgtgccgcatcatctcatcgacatcattgaccccgaagacacgatgagcgtggcccgattccagcagcttgcgcgcgagaccatcgccgacctgcaatcacgtggcatccggccgattctcgtcggcggctccggcttgtacgccagagcggccatcgatgacatcacctttcccggcaccgatcccgacgtgcgcacacgtcttgaggaacgcgagaaaaccgagggtgccggtgctttgttcgacgagctgcgggccaaagaccccgaagccgccgcgcgcatggacccacgcaacccacgccgcaccatccgtgcgctggaagtcatcgagcttaccggcaaaccgtattcggccagcctgccgcgctaccggtacgtgattccgtccgtacagatcggactcgacctggaccgcccggatttggaccatcgcatcgacctgcgcaccaagcagatgtatgacgatggattcatcgaagaagtcgaacggctgcgcccgcatctgggtgccaccgccgtacgcgcgctcggctatcagcagatcatcgacctgctggacggtatatgggatgtgaacgacgccttcgcggacatcgcacagaaaaccaagcgactcgcccgcaaacagatgggatggttcggccgtgacccgcgcatccactggctgcaggccctgaacccgaaactggtcgacaacgcgatggccattatcgcgcacgccgacgccggcgactacgacccgatcgacgcccgagccgacgaatacacccagcatcatctgggcgatatcacggcgtaggaatcagccaaaggccggtgcaatcacccgcaatcagtgtgcaggcccctgattccagccggcgatcaagaacacgcgcgtcggattcgccgggcgtagtatcgcgtcgaacatcgtctccagtgcagacgtgtcgccccgatatgccgagtgcttggcggagcgatactcctcgcgcgtcactgagccccagtcgagatcccagccggcgtcatgcgccaagcgtgaaccgaatatacgcagcaccatcgcattgccgccacggaacggatgcagataaccgagctcatcataaatagaagcgaacgcgtgaacgaacacgtcgcgatccaacgcatgcaggttgcgcttgtccgtcaactccatcgcgatgttgtgcgcgccggtctcaatgagcccagccgggaagaacgcctccggattcgcggcccgagcccggtcgttcgtcacctcgcgtgtggtgtttgaggtacgcaacttgcccgcatcctcgaacacgccttcgaacagccccttatgaatggcggtcaactcgtccaagtcgccagacggattccaccgacgttccgccaacaacacggtacgtgcgaacaccgcatccgcgcgatccgtggcatgatcatccagactgccggcagccagacgatcctttccggcagggtcggcggcggcgcgcagacgcatggcggtctgctcgtccgccacgtcgatgagatgggtcacgggctccaagccacgttcgtaggcaaccgcggctcgcatcgttgcctcgcccggcgtcatcgcttccagtgcgcagttcttgagtgcaaatgcgactgcgctcgcacgctctgcgggtgtcatgcaacccatgataaggcatattcgcgctccagcggggaatcgactcggacgaacctcgacgaaccgcggcgaatcggctgtcgggattcgtcaatcgaccatatcgtcacggtgtcgtcaccaaccatgcacccccgtactagtagaatcagacccgatatggcacgaacagcatcctccaacagcaccaaaccccgtaaatccaaagacaacgggtctacccatgatggcgaaaccaaggtccagcccgagcttgacctcgaacctgagccgttgtggaagaagatcctgctcgcgattccgcgcgcgttcggctccggcgtacgcgccgtcaccggcgtcggcgaatacgacccagcctaccgtcgtgacggtttgtgtttcctgctgctcgtgctcgccgtactgttctgcgcgtccgaatggttccgtgtcagcggtccattcggccagctgcttcacgccatcgcggccggtgtgcttggtctgatgagcgtcgtgctgccggtgttgctcgccgccgtggccttccgactcatgcgcaattccggtaaagggtccaataacccgcgtgtggtcaccggttgggtgctgctcatgtggtcgatttgttcgatcatcgacgtggcgatcgccgccgaccacaccggattcgacatcacgattctgcaatccgccggcggcctgttcggcttcttcctcggctcaccgctcgcctggggcctttccaacgtgttcgccatcatcattttcgtggtcgtcggcctgttctccttgctgatgattaccggcacccacgtcaccgatttgccggaggatgcgcgcaaaatcgccgctaaaatccaacgcaaaccgtatgtgccgatgggccaggaggccgacggaagcgccagccagttccccaacgaggtccgtgtgggagataccacactcgcctttgccgacggtgttccctcgcatgacggcaacgacgacggcaacgacaacgatcaggccggcgatgcacggcccagcctgttcgcacgactgttcggccgcaaatccaagaccgaagacgacaaaacccttgacaagtatgctgccgacgatccgttcgaccgtgccgccagccagcatggtgccaccgccgaaaccccggtggtcgatccgatgaccggcgagattaccgttgcgcgaaccattgcatcgtcttcgtacgacggccgtccgcacctatccagccctgcgcctgctgccgatgcggatgatggcgacgcttcccgaacccgcgtcatcaccagtggccagaccatcgccatgcccggtgggggggcggtagacgatccgtgggcacccagtgccgcccaggccggtactgtcgcgctcgcaggggcagccggggcgatgggagcggccggggccgccggtgccgcggccgcggcagccgcgaccggagcctacgcaggcgccgatgcggatggcagcggagtcggccagggcgtgcccaatacggacggacagccgaatgccgccgccggcaacggtacagacgacgacgccaataggccgtatcagttgcccgacctgaacctgctgaccaaaggtcagccccatgcgatgcgcaccccggccaacgatcgcgtgatccgggcactgacttccaccttcgaacagttcaacgtggacgccaaagtcgtcggcttcctgcgtggcccttcggtcacccaatatgaggtcgagcttggccccggcgtcaaggtggagaaagtcaccaacctgcagcgcaacatcgcctacgcggtggccagttcggatgtgcgcatcctttcaccgattcccggcaagtccgccatcggcatcgaaatcccgaacgaggatcgcgaaatcgtgcacttgggcgacgtattgcgctccgacaaggccgtgggcgacccgaacccgatgctctccggcatcggcaaggacgtcgaaggccacttcgtgaccgccgacctgaccaagatgccgcacctgctggtggcaggtgccaccggttccggtaagtcgagttttatcaactcgatgctcacttcgatcatcatgcgtgccacgcccgaacaggtgcgtctgatcatggtggatcccaagcgcgtggaactgtccgcctacgcaggcatcccgcacctgctgaccccgatcatcaccgatccgaagaaggccgcacaggccctcgaatgggtggtcaaggagatggatgcacgctactccgacctcgaattcttcggattccgccacgtcaaggacttcaacgaggccgtgcgcgccggcaaggtacatgcgcccgccggctcccagcgcaaggtggccccctatccgtacatcctcgtggtggtcgacgagatggccgaccttatgatggtggccaagaacgatgtggaaagctccatccagcgcatcacccagctggcacgagccgccggtgtgcatctggtgctcgccacccagcgtccgtccgtggacgtggtcaccggtctgatcaaggccaacattccatcccgactggcgttcgccacctcgtccgccaccgattcgcgagtcattctcgacacggtcggtgccgagaccctgattggccagggcgatgcgttgttcctgccgatgggttccgccaagccgattcgtgtgcagggctcgtgggtgtccgaatccgagattcgcaaggccgtggagttcgtacgcacccagcgcaagccgaagtaccgcgaagacatcgaacagatggccaaggaagctgagaagaaagacagtatggagcctgacgaggagatcggcgacgacatggacgtgctgctgcaggccgccgaactcgtggtcactagccagttcggttccacctccatgctgcagcgcaagctcagggtcggcttcgccaaggccggccgactcatggacttgctcgaatcgcgcggcgtggtcgggccgtccgaaggctcgaaggcccgcgaggtgcttgttcagccgcaggacctgccgcaggtgctcgccttcatccgaggcgaaaccagctcgctcgaagccagcgccccgcaacaacccgaactcggcgaataattcacccatcgacctccctctgatgagggaggtgccctaaggggcggagggagagaagcgcggacagcatcagcacgaaacctgattcccgaataatagcagtcaatatccagccaccactcactcaaggtaggagtatgggggtaacgtgaacactatggatgagaacacaatggacaagcagtcatcgcccaaatcatcgctgttcgacggatggaacgcgccgccgaacctggtcacctactcgcgcatcgtactcgtggtgattttcctgacactcgacattctcgccggttcctggggtgagaacaacctgatcatgcgttggatcgccgcggtgctgttcatcgtcgccgcgtccaccgataaaatcgacggttggatggcccgcaaatacaatcaggtcaccgaaatgggcaagctcatggatccgatcgcggacaagctgctcacttgcggcgcaatgattgtatgctccgcgttcggcgagctcggctggtgggtgaccatcctgttcctgattcgcgaaatcggcatcaccgttatgcgtttcttcgtcatggagcgtccgggcggcaaggtcatcgccgccgcatggcccggcaagctcaagaccgtattccagtgcgtgggtctgtccatgctgctgctgccgttctggtctctgggtaacggacaggccacgccgttctggatgaccgcttactacttcctgacctacgccatcatctacgtggcattggtcctgtgcctctactcgggtgccgtgtacctgtacaacacgttcgtcgccccgaagcggaagtgacggatattccaatgcaggaattgtgcgacagtctcgcggccggcatcctcaagatctgcgaggcgaacaatacgaaaatctcctgcgctgaatccctgaccggtggcctgctcgccgatgcgttcgtgcgtattcccggtgcctccaacgtgttgctgggctccgctgtcacctacgacatcaatgccaaggcctcgatcctacacgtggacaaggccctattggatcgagaaggcgccgtacaccccgaagtcgcccggcggatggccatcggtgccgctcgcctatacagccagccggaatacggcgaccgaatcatcggcctttccaccaccggtgtggccggccccggtccggacggtgataagccggccggactggtgtatgtgggcctgcgcatccccgcaagcctcaccgcggaccatgccgaagtgctcaaagccgtcgaactccatcttgatggcatgcgcgaagaggttcgtcgcctcaccgtattccacgttctgcaaaacttgagtctattcacagcaagttttaaggaataaaaccgcgggaccgtcgtgttgtacatagtggaaacactgaaccgaccttggaaggggcgatggcgatggaaacgatgacccgagtgaacgaacagatggatgtggccaccaagaagccggtggctgtgcagccgggtgtcgcccgtatgcgtgaactgactccggcccagcgccgtgcggtgatgttcgcccagcagcaggtgctcaaggcgcaggctgccaagaaggccaaggatcagcgtcaagccgttcgtgaacgtatgtgggatgaggattcgccgtcgtacaagccgactgccgccgccgagcccgtggtggttgaggaggagcctcgcgaggtttcgctgcgtggtgctatcggctacgtgctgcgcgaactgcgtacgcgcgatcgccgcacgttgcgtgaggtctccgagaaggcgggcgtttcgctgggctatctttccgaagtcgaacgtgggcagaaggaagccagctccgaactgctgagctccatcgccgatgcgctcggagtctccacttcgcgcatgctgcgcatggtggccgattatctcgactcggtcgagggctgatcggttggcggtgtgaagccgcatcccgtaatctatgtctagctgtgaacccgtatcgcttgtggcgatgcgggtttttgctgtcctgcgggtggtggcacactggcgtgtatgcgtgaacgggaattctgggaattacttgaagaggtgttcggtcggacctacggtcgttcgctgtcgcgtgatcaacggatgtccaaattggcgaatatgaccgtggtcgaggcgctggacgcgggggaggagccacgcgtggtctggaatgtgctctgtgaccaaatggaggttccggactccaagcgttggggccacgatcataacgcgccgcccatgcccgccgtctgacactgcgggattacggagtcgctgaatcgtgaaattggcgatttcggcgtgttgcacgccaaattcgaacaaatgttcgtgtgtgtggttatagttattcacagtgacaagaagccgcatacgtgtgcacagggtgcttgtcatccgccataagccttaccgcagtaggtcttagggaggtcagatggccgagctcgggcaagctggaaccacaatggttggtttggattgcctcacatggcatgtccgtcatacggtggaggcatccgattcgcgcacgacttcgacaaggagaagatcatggcacttgagaccaagccggccaaggacccggcagccgaggacaagcacgagctcgatcccaagcgcaaggcggcgctggacaccgcgctggcgcaggttgagaagagctttggcaaaggttccgcaatgcgactgggcgaccagcccgagcagaacgtcgaggtgattcccaccggttcgttggccctcgatatggcgctcggcatcggcggcctgcccaagggccgcatcgtggagatctacggccccgaatcatccggtaagaccacgctcgcattgcatgtggtggccaatgcccagaagaagggcggcgtggcggcctacatcgatgccgaacacgcgctcgacccggcctacgcccgcaagctcggcgtggacaccgactcactcatcgtctcccagccggataacggcgagcaggccctcgaaatcgccgatatgctgattcgctccggtgcacttgacgtcatcgtcatcgactcggtcgccgccctagtgccgaaggccgaaatcgaaggcgaaatgggagacagccatgttggtttgcaggcccggctcatgagtcaggcgctgcgcaagatgaccggcgcgttggctcaggccggcaccaccgccatcttcatcaaccagctgcgtgagaagatcggcgtgttcttcggcaaccctgaaaccaccaccggtggtaaagctctgaagttctacgcctccgtgcgtctcgacatccgccgcatccagaccttgaagaacggcgacgaagcggtgggcaaccgcacgcgcgtcaaggtggtcaagaacaagatggccccgcctttcaagtccgccgaattcgacatgctctacggtgaaggcatttcccgtgagggctcggtgatcgacatggcccagcaggttggcgtggtcaagaagtccggttcgtggttcacctatgagggtgatcagctcggtcagggacgagagaaggtccgtcagttccttaaggacaacccggccatcaccgaggagattgagaacaaggtcaaggccgagttcggtctgatcggttccgccgatcagttcgcggaagatggcgaagccgcagcagcggccgccgtcagcgaggccgctgcggccgacgtggccaaggacagcaaggccgcagcggcgcctgctgccaaaacgacccgtgccaaggccggcacagctaaggcctgaacatgattagtgccgaagcattcttgcggcgcaatcctgttgcgtcgcaaaacatgcccattgccgagaagcgtgttcagtcgaaaccgtcgggacgtttttctcgacgggggagaggcgctgccgttgtcgaagatcccaatgatttggacgcttgccgcgaggctgcattgcgtttgctggacgcggccccgcgtgcatccggtgcgttacgcgaacgattgcttgccaaagggtacggcgaggcgatcgtggacgaggtcatcgaacggctgattcgcgtgcaactgattgacgaccgcgcttatgccgaatcggccgtacgctattgtgccggtcgcatgatgggccgtcgtggtgcggtcctggaacttgctcgcaaaggcgtggaccgcaaactggctgaacaggtgtgtggcgaagctgagcaaaatggcatctttgaagatgccgcatgggaattgggccgccagatagcccgcaaaacccatggcctcgatcatcaggtccgtcagcgtcggttttggtccgcaggcggccgcaaaggacacagccccgaaaccctccgccgagtcgccgccgaattgttggcgtagccaagaaaaaaaatgagacctctcataccccgggttctgtcgtgccgtgcgcgaacgcgcagcacggatggccatccatctcgacctgacgttaccgccaggctctagcagcctacccgatgacacgggcgagcagcccttaccgccatctgcttggccttgctcccgatgaggcttgccatgcgacctactgttaccagaggcccggtggtctcttacaccgccgtttcacccttacccgtcgaggacgggcggtctgttctctgttgcgctatctctcaggtcaccctgggcggacgttatccgccatcgtgctctatggagcccggaagttcctcagccgatcccaatgaagatcacggccgcggccatcaagaggtctcaagcttgcaattatacataaggtgcggaaaaggcggcatcccgccctgcggtgaggccatgacgttgcccggttatcctgttttctccatagttgggcgattcgtgaacgacgcgccgaatatcggatggggcgtgtcgggcgtgtcgtatggagacgaatcaaatctgtaagagcttggtatgtgcgagaaagagcaagaaaacgctgcctatccattgcagtatttaccatgacgaacaaacaagccagcctgataaaccggtatcaaatcttcttataggagactgctgccaaaaccccagtatatacatcgtttcattgcagagaaaagcccggagataaacatatattctctgggcgagtttccggccgttcacccattgttcgtctacaatgaaacatacccggtcggtgatgatgccgttcggaacacatatagcgggttacaccgcttgagttagaggaggtcaacatggaaatcgtcgttaccggacgccacacgcaggtcaagcaaaggttccgtgatgtggtcgagaccaagatgaatcgtgtgaccgctatcgccccggatgctcagcgcgcgcagattgtgctgacccatgagggcaacccgcgtcaggccgataccgccaagcgcgtggaaatcaccgttatcgccggacgtaccgtggtgcgtgcggaggcttccagcaccgatgaattcagcgcgctggacatggcgctggataagttgacgctgcgtctgcgtcgtactcgtgaccgtcgcaaggatcaccgtcgtggttacgcaaacccggtcccggtggatctgggtgttatcgccccggagcccgagccggaggtgtcggaggaagagccgaacaacagcccgcaggctgcggtcgcctccgatcttggccctggcgaatccgtggaggtccaggttggggatacaccgattgtcatccgtcgcaagctgcacatcgccgagcctatgagcatcgacgaggcgctgtacgagatggaactgatcggacacgatttcttcctgttcgtgaacaaggagaccggacgcccgtccgtcgtctatcaccgtcacggttggagctacggcgtgttcgaaatcgacactccggagaatgtcaagaaagcctgagggtaagggctgctgacatgatcagctgataccgcatggaccgcttccaatatggaagcggtccattttttcgtaagaaggtcgaaaaattcgattgctgacggtgcgaggcgctattctggtacgcggacaccaccacttatcagtcaagggagaacccagtggtcgatattgttgacaaagccctgcgaatgggtgaaggccaccagctcaagaagctggagaacgtggccaaggccgtgaacgctctggaggatgagatctccgccctctctgacgaggatctgaaggcccaaaccccgaagttcaagcaggaaatcgaaaacggcaagagcctggacgagattatgcccgaggcgttcgccaccgtgcgcgaggtctccaagcgcacccttggccagcgtcacttcgacgtgcagctcatgggcggtgccgccctacactggggcaacatcgccgaaatgaagaccggtgaaggcaagaccctggtcgccaccctgcccacctatctgaacgcactcgaaggcaagggcgtgcacgtggtcaccgtcaacgactacctcgccagctaccagagcgagctgatgggccgtatctaccgtttcctcggcatgaacgtcggctgcatcatcaccgagcagaagccgccggagcgccgcaagcagtacaacgccgacatcacctatggcaccaacaacgagttcggcttcgactacctgcgtgacaacatggcctgggagaaggccgacctcgtgcagcgtggtcaccactacgccatcgtcgatgaggtcgattccatcctcatcgatgaggcccgtaccccgcttatcatctccggcccggccgaaggcgacgtgacccgctggtaccgtcagttcgccaagctggtgctgaagctcacccgcgacgaggactacgacgtcgacgagaagaagaaggtcgtcggcatcctggacccgggcatcaccaaggtcgaggacttcctcggcatcgacaacctgtacgagccggccaacaccgccctgatcggctacctcaacaacgccatcaaggccaaggaactgttcctgcgtgacaaggactacgtcgtcacccaaggcgaggtgctcatcgtcgacgagcacaccggccgtatcctgccgggccgccgctacaacgagggcctgcaccaggccatcgaagccaaggaaggcgtggaggtcaaggccgagaaccagaccttcgccaccatcaccctgcagaactacttccgtatgtacgacaagctcgcgggcatgaccggtacggccgaaaccgaggccgccgagttcatgaacacctacaagctgggcgtgctgccgatcaagaccaacaagccgatgatccgcaaggatcaggacgatctcatctaccgcaccaagaaggagaagctggccgccatcgtcaaggacgtggccaagcgacacgccaagggccagccggtgctgctcggcaccgcctccgtggaaagctccgaagtggtctccgccctgctcgacgtggcgaagatcccacaccaggtcctgaacgccaagcagcacgagaaggaagccgccgtggtcgccgtcgccggccgcaagggcgccgtcaccgtggccaccaacatggccggccgtggcaccgacatcatgctcggcggcaacgtcgagttcctcgccgacgccaaactgaagtccgagggctactctccggaggacaccccggaggagtacgagaagcgttggccgggcaccctcaacgagatcaaggcccaggtcaaggacgagcatgaggaggtcaaggagctgggcggcctgtacgtgctcggcaccgaacgccacgagtcccgtcgaatcgacaaccagttgcgcggtcgttccggccgccagggcgacccgggtgaatcccgcttctacctgtcgctggaagatgacctgatgcgtctgttcaacacccagctggtggcccaggtcatggccaggggcatggaggaaggccagccgatcgaggccaagtccgtcaccaagggcgtgcgcaccgcgcagaaggccgtcgaatcccgtaactatgagattcgcaagaacgtgttgaagtatgacgacgtgatgaacaagcagcgcacggtcatctactccgagcgtcaggccgtgctcaagggcgaagacatccacaaggacatcctgcgtttcatttccgacaccgtcgagtcctacatcaagggtgccaacaagggatccgagaaaccgaaggactgggattgggagggcctgttcaaggcgctcaacaccgtgattcccaccaaggtcgacgaagacgaggtcaggaagatcgtcggcggcctcaagggtgcgaaggccgtcgaggccgtgcgcgacctgatcgtcgaggacgccaggcagcagtacggcgaaatggaggagaccatcggcgagaccggcttgcgcgatctcgaacgtcgcgtggtgctcgccgtgctcgaccgcaagtggcgcgagcacctttacgagatggattacctcaaggacggcatcggcctgcgtggcatgggccagcgcgacccgctggtcgaataccagcgcgaaggctaccagatgtacaactccatgatcgaggccatcaaggaggagaccgtccagctgctgttccacatcgacatcaagcaggtcgccaccaccgacgatgccgttgacgaggtcgaggagaccgccgaaagcgccgacaccatcgccgtggcctccggccccgacgagaacggcgaatccgtggtcgaggccgccgagggcgaagtcgaagaagaggacgaggatgcggacgccaagcaggcgattgccgaatccgcagccgcctccgaggccggcgagtccacgctgcctgttgccggcccggctccggtcagccacgccgaaggcaaggtcccggtttccaagcgtccgaagagcgaagagctcaagacgccgtgggccgacggtcgcaccttccctggcactggcaagaacgccccgtgcccgtgcggttccggccgcaagtacaagatgtgccacggccagaacgagaagtgacgcatcgctagttagtaactagctcatggctccccacacggggagccattttctatgcggttcatcagcatgtattcgtgcggtgccgtacgcgcgggacggcacgcgattttcgcggattttgacgtcgtatcccacactgttgcgggatggcacgagtgtcaatcgattgactagcgtggcgtcccgcagtacgaattacggaatcgttgaaattccgccattctcggtgttatggtgtcacggtccgcaaagggtgatgtgggacggcacggctcaaacggcgaaaatgagctgccgtcccgcagttttacgggatagcacaaaaaagaggcttctgctgttttcgtgggttgggttcttggttgtggtgggcgtatgtcgagtccgccgcggcggagcatgacgagggcgatgggattgttcgcgtggtggaagccgtaggccatgcggatggtggccttgatcctgttgtcggacgcctcgagcctggcgtttgaacagcccaattcgattgtcccgaggatgtcgggcccatgacggcggatctttcgggcgagttcgacgatctcggggatgcggctgtgggacgcccggaaca

SEQ ID NO: 50 - DNA, 7256 bp, Unknown
  R30_18m  MAG No. k141_21875
cttgttgaggttttcgatggtgccgtatttacgttcgcaccacagacggaatgcgttgagcgcgttgtcggagtagtcgtaacggttgttccagccgtattcgttgcccatatgccatgcggtgacgtacgggttggtgccgtaacgttcggccagcttgcggcacagggtgagcgcgtatcccttgaataccgggcttgtcgggctccaggattggcgggatccagcattgacaggatgaccgaacttgtcttgcggaagcacttccgggtgcttttcgtacagccacagcggtgcagttgcggttgcggatgccaggtcaaccgcaatgccggctttgccgagcttgtcgatgatacggtcgagccagccgaaatcccaacggttttcttccggctgaatgcgatcccagctgaaaattgccacggccacggtgttgacaccggcctgcttcatcaggcggacgtcgtcgtcccacacgctttccgaccactggtccggattgtagtcaccaccgtatgcgatgcctttgccgttatcggtcagcaattccggccatttgaagttgcgtcgtgcactcacgattatctccttttgtaactggcgcaaggccatgatcattataaaatcttctgttttcccaccgtcatgtgatacaccggtgtagcatacacgtcggcgatgtcagagacgcgcacaccgggctgttctagacgggccgccatcgacgatgccacattcacgcgagagtcgcgtctcatcggtgtgatcaccagtgtcaacctgccatccgcggcatctatggcgtccgcgtaatcgcgaagtccgacctgccatgtcccaccgttgcagaaattgtccgaaatcaggtcgtcaccgcagaacagccagccgatatcaccttggtattcgatgttcagcaggatatccgcgaccttccgtcggttgtgcaggagctgtcccatgccatctggcaggatgatttcacaccggtccgcatgcagcctcttcagacgcgcgtccacatccaccggctccaccgaacgagggatgtcgagcagtccttgcggatatgtggcgattccgttttcggcgtgacgcgtttccagcatccattcgccgtcgtccatgtacagcaacgtgttgtcgtcatccacgaaggcaagacctccgtccaacaccgtcatccgtcgggcgagcttcctggtgacgcatataatctccaccgtaccgcgaatcgtgaaacgttcgaagtccgctttgccgacggtgatatccggaagtccttcgaagcggaacgtcggtttgtccatgccgtcgggtttgaggaacacgaaggtgcggaacgggcggccctgcggccgcagcacggtgatcggctgcaggttggcgcatatgagccgcacaccgtccaagtccatgttgaaaggcagtatgcagttctcgtcccgggcgaggccaatgccatcgaactgtatacattcgccggcggccgtcgtcacatcgatccgctcaccgtggcggctcgggacgcgcacatggtcctggaagttgttgatgaacacgaaaccccgttcgccgtcgctacgcaccgcgtaccgtagcgttgcacggtcagacggatcgatgcggtcctggccgtcctgcagggagaccggcattccggcgaactccagcccgaaagcttttacgaattcgtgcaaggtgcgcagccgttgaaaggactccctcatctgtccgaattcgccgaggggcgcctggaagtcgtaggaacgtttcgggacttgtccctcgttgaggaatccgtcaaggcccttcggattagttccgccgtggaacatgtagtacccgaggaaatcacaccccgaaccgagtttgatgttggtcatcgcatcaacggagcggtacggcagcgcgaaacggtagtcgtacgagttgaacatgccaccgcccatctcacaacaagcatagagccggctgtccggattgtatggcgggtcgaagtcggcgctcgtctgcgggccctgcagactgcggtagcgatactcgtcggtggcgggatgctccgtgggcctttcggcgccgacgccatcgtagaacagccatggccggtacgcatatccgccccatagcggcagcatatcgtccggtaccggcgactgccagccagtacaggtaaacatcggagggtcgatgccctcctcgaacgcgatgtcgcgcaggcgttgcagataacgcgccccgtcgtggccggacggcacccattcccgactggcgcccgcggtcatctcccaaggggccgatgacgccatgtattcgttgtcgacctgagccgcgatgatcggtccaccttccttgaaatatagtccgcgcagctgttcggcgatgtgcgagtagaggccacggaccacgtcgaggaaaccctcgtcaagggaacggacctcgtatggcttgccgtacaaccagtcggggagtcctccattgcgcgcttcaccatgacagaacggtccgagccgcacaatcacgtacaggccgtgcctcgcgcataggtctacgaatcggcgcacgttcctgttgccggagaaatcccattccccctcgcgctcctcgtgatggttccagaacacgtaggtggatatgacatcaatgcccgccgcggccatcttcgcaagttccgtgtcccaccggtcggcggagacgcgtgaatagtgcatctcaccggcgatggggatccatggcaagccgtcacgggtcaggaaacggttcgtggctcccaggatctcgccatctggtctgcatgcggcctcggcccggatgatgggagccatgtatgcggatgtccgcgcgagcttgcgggtttccgaaagatcgattccataactcatgatgtagctcctttgccgaattcccccaggtattccaacgtgcaggaagaccggtcagcccttaaccgagccggcgaccagaccggccacaatccaacgctggcagaagatgaagaacacgaacaccgggacgagcgcgatggtggtgaccgtcatgaacaacggccagttcgtggtaaaggtgctgatcgcgttgaacacctgtagcacgatagtctgcttgttggtcgaggagatatacacgctcggcgtcatgaagtcgttccacgtgcccatggtctggaatacaaccacggtggtcagaatcgggcgaatcagcggcagcacaatcgtatagaagatgcggaacgggccggcgccgtcgatgcgggcggcttcgatgatctcatacggcaagccgcgcatgtactgcacgatcaggaagtagcagaaggtggctccacccgtgtagagcactatcagaccgagcagcgagtcgacgagtcccacctgagcctccatgcgatactgtggaatcagcagtgtctggccagggatgataaaagacagcatgagcagcacaccgatcgcggcggtaaacttgctcttcttcagaatcatgccatatgcggcgagcgcgccgaacaacacctgcaggccgacgccaatcaccgtgacgatgatggtgttcttgaaggcgttgacgatgggcaggtgtccgaacgcgtatgtgtagttctcgaagttccatgtcttcggcagaccaatcgggtccacggacatttcggcactgcttttgaacgtgttgatgacgatgacgtacagcggcaccgcgcaaatcagcgcgatggcgatgacgacgacggaccggataatcgagccgatacgctcgcgttgctgcagggtcatgatagcctcttttctaccagattggtgattacctgctgcagggcgactaacagcgcgcagcagatgaagaagataacgcccagtgcggaacccaggccatatcggctcgagccgatgcccgtaaggatgatggattgggtcacggtataggtggagtagcccgggccgccgctggtgaggccatatggcagatcgtagactttcaggccgccggtgagcagcatgaagacgctcacacccatggccgggaccatctggggcagtgtgatgttgaagaactgctggcgacggttcgcgccgtcgactgcggcttgttcgtagatatcggcggggatggcctgcagataggctaggtagagcgtggcgtgccatccgatctgggcccatactgccacaaagatcacgcagaatttggcgagtccggaattcgacagccagggcaccgcgtcgatgccgattttggcgagcagcgtgttgacgacgccggatttcagcggggagaagatgtattgccataccaatccgagcacggccatggacggcacagagaagaagaagaacagggagcgggcgaaattacggccgaagaacttgcgattgagcaccacggccagaggcaacgcgattacggtgataagcacggtggtggtcaccgtgtacagcagcgtgaagccaagacccgcaagcagcgtcggatccttgaaacactgcacgtagttcgtgaatcccacgaacttcgcgtccgcaaagttgtagccggagtaatcagtaaggctgaacaccaggctctgcagaaatgggatgaggattaccacgatgaacaccaccatgatcggcaacaggaaacgtgccgaggcgaagttctccatgaaattgcggtggcggcgctgcttgagatggaacgcctctacctgatcagcggaatgtggacgcgccgctgacgctgttgatactgacatgttggttgctttctacaaacgtgagattggcaggtccgggcacggcgcggacgaggggcccacgccggcctgtcgtaatagatacctgtccacgatgaatcaggagagggtcttgagcttggagtcgaggttctcggcagcttgcgtggggctgatggatccgagcgcgacttgctgcagctgagtaaaggtctcggctcgcagtgcggtggagcccttgctccagtgcgcggagttcagatacacgttgccagtcttgatgtacaggttgtaagcatccttgaagtgatcatccaccgtggcatcgaagcccttgacggacgggattaggcccagctgcttctggtacagtttgaggccctcgtcggaggtcaggaaggtgaggaacttctccgcggccttgagcttgtctccggagatcttgttgttgatgccgaaggccggatcgatgtatcccggcgcgtatggggtgtcgcccttcttcagcattggaatctggccgaaaccgtagttgaggccggtctcattgaagctgtcgatgtcccacggtccggaggggtagatggcaaggcgtccggcggtgaattccgacttgacctggtcgccgctcagtccggacacgtcggagctcatcaggttctgcttgatcagcttgtcccattcgccgtagtatttgccgtacacgtttttgaaggtatccttgccggtatcaatcctagtgtcgagtgcctcgccctgcttggcggattcggcgccaatccaaccctcgacggcgttgcccaagccatccttcggctcgaggtacggagtaatccccgaggccttgagcttgccgcacatagtcaggaactcgtcccacgtggccgggatggagtcgtagccgaccttcttcagcagatccttgttgtacacccaagcgttggtccaagtgctcacgcccatggcgtacaccttgccgtccacgctataggccttcttggcggaatcgccaatcttgtccatgaagctttcatcggtcaggtccttagcatagttgcctttgaccagatcgttgagggcctcgggcggcacgatgtacacatcagccaggtttccgccggagattcgggtctgcagcgtctgctggtaaccattttgggaaccggtggtggtgctgtagtcaatcttgatgtccggattggccttctcgaacgcgtcaatgatcggctggtacttatcctgcgagttgttcgagaagaacgacagcgtggtcttaccgtcggcggcgtttccaccgccgcatgcggccagcggaacaagcatcgctgcagcggccatcgccgcaatcattctgatggacttcttctccatgatgtactcctccttgtgtcacatcattggcacttcaccgtgtgcgcgctcatacgatgaacccgctccggccgtaacaggcacacatcggcgtgtctccaactgaccgttcagttgttcggaaacatttcctttttttgatacaaccgtgtacctgttgaatcagtatagatattccgttgtaccatgtcaattcggattcacatttttcgcaccattcggagccactcccctacaaaacaccggcgtgtcggccgcaggtgcccccatacatgttccgcgacgcccgcggcgtcggctggcgttgcggtctccggctgcgcgtcccaaaaaacgttgtggacaagtcggtgtattacggggaattgttttttcgtggattccccagtattggctgggattggaaagcatgcgaccatccccggataacaaatcggcggcttccaaggcaatacccttgaaagccgccgatcgcttggtcaagccacgacatggaccacaggctacggatttacaggcccaagaacagctcgtgaatgcgggtatcgtcggtcagttccgggtggaacgccgtagcaagaacgttgccctgtcgcaagccgaccacattgccgttaaccgaggtctcaacggtcgcggacggcccgacctcagccacgaacggtccacggatgaacaccagcgggaaatccttgagcacaatagactcggaagcggcaccttccggaacgcgctcccccggcgcaaccgaaacggcgaaatcgccagtagcggaaccgaaatcggaggttgcaacgaacgagccaagctgacggccgtacgcgttgcggcgcacgacggcgtcaagcgcgccaaagtagacgttcgaatcgttatccagcttgcgggccagcagaatcatgcccgcgcacgtgccgaacaccggttttccggcggcgatatgtgctgcgatcggctcaaacaggccggtcgaacgcaacaacttgccctgcgtggtgctttcgccgccaggcagaatcacgcgatcgattgaatcgtcgaaatcctcggcggcacgcagcagtttccacggtgcgccaagccgatccagcatcgcggcatgctcggcgaacgcaccctgcaccgcaagaatgccagtcacgccatgttgcgcggaagccgcaccttcggcaac

SEQ ID NO: 51 - DNA, 63683 bp, Unknown
  R30_18m  MAG No. k141_22913
ataattctcaagcagcgccgatttactgaataaggattcggtctgcggactcgcggccatcaaatgcgcgaaacgaccaccattatcgattcggtaaataccgaaactatcgccgcccaacgtatcttgcataatgcgaatggtcgcgtaatacagctttcgaggcagcacttcgtccaattcacgggtcatcgcatacattttgccgaaactgtcacgtctaccgataatctgcccgcgcaacatacgacgatcatcaagcacatcgtggtacaggtcacgcaggaatgcaagtcgttcacgcagcaaactgttttcgtcacgcatgaatcgcaggttttctcggttacgcagctgcacgtatccgcatactgcgccggcaacgaaatacactacgaacgcaagccagttcgacgtgtcgtaaaacagcggagcgaacgacgcacccttcgacgcatacgacaacgccataccggcacatgccaaaaccgccgctaacacgcctgcgttcagtccgtacatcgtgccgacgatcaccacgaaaaacaagcgtaaatccacggtttcgagctgactgttgccttgtaccgcggcacgaagcagttcttccaatatgaacgtgatgaagatttcgattgcgatccacggtttcgaatggttgcgtagaaaatcccagatcgggtgctttccggattgttcctgagcacgcgcctctttccagcgctgaagtatagggggaagatcctgtttgagcgaatatcgcggcgaccagccatagcgcaatcgcagcacatgatcgtccgctgggtaacattggggcctgtcttcgccaaaagtcaccgataatccgggaaatgccgcgctaatcacatcagccaaatcaccgtatgtgaagttgaacacgttgggcacatggaatatttcgctttcggcggtccaatcgtcgaacatgcggtagatcagttcggcaagatcgtcggcgcagagaaagcatgtctgctggttcttttgctcgcagaacgacaatgtgcccgattccgcctgttcaaatagatgattgaaatatgcggtgacgccgttgcgatccgacgcatacaggtacgggcttcgaatgattttcgcttccagacggtaggtacgcgcataatacaggcagagttcttccgacgctcgagacatcagacttttgctggtatcacgtacgtcggcgttttccggataggtaaattcggattcggggccgctgaccatcagtatttgcgtttgcctgttgcaaatggcatgcagaaatcttcgcaatgttcctagatcgccgtctcggtcactgcgtggggtcagattttcggaaaagaatacgatgcgatcaaattcgtatgtggtaagggtttcggcaagggtgttggcgtcagacatgttgacgattctgagacggtcattgccgtccacggtgccttctcgttccgctatcaccacatggtctcggggaaaggcatgctgaatccactgtttggtaatgaaatcggtattaccgaccaaaagcacttcatgctgccaccccattaccatgtttggtaggccgcctcgatggtcggggccgggtcgtcggtcctggtatgactttcctgccctgtcgttgatgatccgggggtgttgtcgccgggaacgcccccgtgaatactccccttaaacgggggtatggcatagttctgtccacagaccctccattgtccctgccttacggtattccagtgtaattcgttaacagacaaaattcccctcaacgggggtttcttacgccgtgcgattgcctcgcttcagcccttacttcgcgagcttggcgtactcgtcgaccatgaacttggcgatcttcttgccgccttcgcccagcagggtggacagcgagttgatcggcatggagttgaggaacatgcgcatcagggcgttgtcgagcagcttcgtcagctcgccggcctcgccggcggcggccacggcggaggtgttggtcacggtgttggtcacggtggcggtgttcgcgccggtcttggcggcgacgtcagcgatctcgaacgtggcgtagctcaggccgtagccgaacgggtagtccacaaccttgccgtaggtgtcgtagtagcggtagccgacgaacacgccctcgccgtagtcgacgtggccttcctcgcccggccagttcagcatgctcgggtcatcgttgatgtccagcggaatcgactgggcgagcttgccggacgggctgacctggccgaagatcacatcggcgagcgccgggccaccggactggccgagcagccaggattcgaggatacccttggcgttcttggcccacggggccacggagaccacggagccgttggacagcacgaccacgacgttctggttcgcggcggcgacctgttcgagcagggcgatctgcttggcgggcatgtcgagggtgtcgcggtcgaagccctcggattccgcggcttccggcaggcccaggaacaaaaggcccacgttggtgcatatgttctccacgctgagcgccgaggcgctcgacccggcccaccccgcgcacgattatttcgtcgaccgcgagcgccgcacggtcaccacggcgctcaacatcaactgggccgtgccggaaggcgtcaatgtcggacatgtgctgcaggccggattctcgatgatggacggcctccagctgcgctggctgcgcgcccccggccaagatctcaataccatgtgggccgattgcgaggatgttctgatgcctttgcccctttgggagggatatcgctaattggtgcggctgcaggccatccaaccggcgtgccaaacgtgagtgagatcccaggggtcgaggcgtgacgtgtcggattgcgggtcgatggtaggcaggaaagcgcgattgccgcgcagttggtagctccagtagatctgcccggcagatgcgctccacgctttgcgctgcatggcggcgacctcgcgatagacggcattcctcgttgaaggggttcggttcaccagattgttggccacgcaccactcccctacgatcaccggcgtatagcgcgcggcccggcggatgcggcgttcgttccagcgcacgaacaagcgataccagcccatcagccaccgatccgggatcagacggaacagcgggaattgctcggccataaccagatagacatgcgtatcgagcatgacgccccgcatgccctcgcgcacgaaccagtcccgccaacggcccagtcggaagccgtcatggaacacgatgacttgattccctgccagaatcgggcgcaaccggtggtatgtctcgcggtagaaacgcttgaggaacgccatcggaataggcccgcttcctcgcgcttcggaccggtctttcgcctgcctgctcgatggtgacatggcatacgtcagccagtcaatcggctcattcagcacttcgataccgaacagcgccgcgtggtcgcgataccggcgagccagacggaccagcacatccagcgcatagacgaccgctcgcgggctacgatgccagcgcaccacgccggtgaggccgccgttatcgaatccgttctgcgagccgggcaccgtgtgcaggtcgataagaatcttgagcccggcccgctcggcccagtcgaacgctctgtccagatactcggtacagcccgggtgaccgggcacatccccgaacacgaaatagggcactggaatacgcaccagattgcagccatgtgcggcaatgttccggaaatcggcctcggtaatatacgtgtcgcgatgccgcgtcagcaaagcctccagctcagccgacttcgtagcccgatgcagccagatctcgtccgcctcgccgctggcggcaaaaatccccggcttcatccaccgctccagcaccagccaattgccgaggttcaccccattaattcgttcgccaacacccagcgcgcccgatgccatacctgtcacgctaatcgttcaatgcttcaccgtagcgagcgaccaacccctgatttgcacgctcaaactcggggatgtaatcagcgatgatggcgtccacaagacgccgagctcgttcttcatcatagatatgagcagaatcattgcgatcgcgcagcatgcgcagccacaacgattcgtccatgaaatcatagtattgaaaagcggttttgagcacatctcgcggagagccggaagcggaaacagggtctccctcataagccagcagcgccttgaacagtttccaaccaagctcgaactgcaacccgaacttgtcaataatgccgctctggatgaaatcattgccgagatcctgttcgggagccttgcgcagcgaattcaatgcggaaacgtaattctcatactttttcatacagcacctttccgctacgctcaatctccgccctcagcgatgaagaaatcggctcatccagattgatgacatcaactttaagcagtgaccacagattgtcctgaaggttctgctccaagcgattgaaatcgggacaaccggccacggcaagatcgatatcgcttttaggccggttcacgccctttgcgcgagaaccgaacagcacgaccttgcgagcgccggcatcagcggcaaacgcgcgaatctggtcgtacacgtgctcgataggaaccatgacacctcccgccgcatccaacagtcccggaccaatcccggaccacccgcgcttccatcatacggccgcggcccactcaccgcacggagcccgaaccacccgaacgcggcgacgtagttgcgggaggcgggctggcgctgtagggcgtgcgggaagttcctgacgtctacttttcaggaggtgaatcctcatgttcaccacgttttctctggccatcattctcgactgcaccgtacgcattgtgctcggcacggcattgggcgcgctgatagggctcgaacgccagttgcgcgcccgaagtgctcggcgtgcgctgggatgtggagcacatcaccacgtccgactgaaacgtccgactgacgctgaccagcaacatcgcaacagtacaacaagccaacaagtgggatggggcatcgagcctcatcccactttgttattatccggcgattgtcagactcactcacgccacggtgaacgtggtgcgcttcaggtcctcacggcgcgaggagtggccgatgagcagttcgaattcgccgggctcgacgatgcggttggcgtccgggtccacgatcgtgcagttcgccaccgggatctcgaaggtgacggtcttggtctcgccgggttccagtgcgacgcgctggaacgccttcaattcgcggtcggtccagctgtaggaggtcacgatgtcgccgatgtaggcctgcacgatctccacgccggcgcgctcgccggtgttggtgagggtgatttcggcacgtacggtgtcggtttcggcgaatgtgccgtcggcgttgcttgcgccgcccgtaatggtcggttcgccgtatgcgaacgtcgtgtagctcaggccttcgccgaacgcgaacgccggatcctgggtgaggtcggcgtaccggtcgccgtgctggccgcgaatctggttgtagtagactggcagctggcccgcgtggcgcgggaaggtgatcggcagtcggcccgacgggctggtcaggcccaggattatttcggcgatggcctgaccgccgcgcatgcccgggttcggcgcccacaggatggagccggtgccggtttcagggtcgctgacgcgcttggcgaacacgccgtactcccccacgatggaggcgggcaacacctgcggcttggagctgatgagcacggtgaccatcggcttgccggtttcgcgcgagacggcggcgagcgcgtcgagcagggcgttctggccaccgagcagttcgagcgtggcggtggagcaggtttcgccgaccagctggaccacgtcgccgaccacggccacgatcagatcggactggcgggcgttggccacggcttcgtcgatcattgctcgatcgacggcggcggaaacgccgattttcgggcgaggctggccgtccgggtagaactcgccggcagggtcaggcacgaggtcgatgacgttcgcgccgcgcgagtagaccacttcgcaatcgtcggcggtgagctgggtcaggccgtcgagcacggtggtaatcatgcctcgaggctggccatccggcatccaagagacctgaccggagttgccggtccagtcgccgagctggttctgggcgtcgtcggcaagcgggcctaccacagcgatgcgcttggccttgtctgcggcgaacggcagggcgccgtcgttgcgcagcagggcgacggattcgcgggcgagttccaggttggtctgctggtgttcggcggagccgatgaccgccttgatgcgttcggcatccggcaggcgcgggtcttcgaacaggccgaggcggaatttcagggccaggatgcgggctaccgcatcgtcaatcagggattcgtcgagcagaccggtttttacggcttcgatggctccctcatagaactgtggggtggtcatgaccaggtcgttgccggccttgaccgcatcggctgcggcgtgcacgtaatcgggcttgacatgctgttcccataccgagcggccgacgttgtcccaatcggtgatcagcgtgccattgtattgccatgcgccgcgcagcttgtcggtcagcagccatttgttgaacgtgaccggcacgccttcgatggactcgtagccgagcatgaacgtgccgcagccttccttggccacgcgttcgaacggcggcaggaaccaggattcgagcttgcggtgggagaggtcggcttcggaggcgtcacggccgccctgggtctcggagtaaccggcgaaatgcttggcgcaggccaggatcgcgttcttcggcagggcctcgccggccttggcgccgccctggtagcccttgaccatggcggaggcgagttcgccgatcagcatcgggtcctcgccgaaagtctcgtccacgcggccccaacgggtgtcgcgggcgatgcacagcaccggggagaacgtccagtgcacgccggtgcaggagacctcttcggcggtggcgcggccagcggcttcgactttggcggcgtcccagctgacggccatgccgagctgggaggggaagatcgtggcgccgggccagaaggaatagccgtggatgcagtcatctccgataatcaacgggatgcccagacgcgtcttctcattgacggtcttggcggcacgagataaatcctcggggctggtatgcagaatggatccgacatgcttattcacgatgagatcctcaagatcgccgccgcgggcgtcaagctgcatcatctggccgaccttctcctcaagtgtcatacgggagagcaagtcggcgattcgctcaccagcgggcaaatcaggattcttgtacggtaaggtttcagcagttgcggcaggcgtggtgttgtcggtcatacgaagtcgctttcctcagtgagatcgaacagctttttaattaccaattggtagtttatctattgacagcatacaacacgcttatgccgcgcgcatcacatacaccaaaacgaccgtatgtatgcgaccccttcgttcgcccgcatacttactgccgccatcaagcacaagcctcagttcaaggcacacagcgaatcagcgatacccgtcccatatcggcgaaggaaatatcgccggctccagatcggcccattcatcgcataagtcaatggccggcccccgtaaccacctcagttgcacaccatccatgatctccagagcatggcgcaacgtgggccggacctcctcaaacgaggtgaattcggaaggcaggttccagttgtatgtcgaatagtatcgccatattgaatcccgacgattggcaaactcgtcatgtaacggatgcgcaggattgaacgattcgacctgcaatatcgagaacagctgaacaagcatggggcgcgtggaattgcaatgtaccaagaacctcagatacgcgggtaatctgaaatcatcgggcactgaaccaggcaggccggaggccatgaagtcttccacactgccaaacgtgttgtaattctcgtgatacatcgcggcaagcaggttatctttgctaggaaaatatcgcaaaactccctgcttggtaacaccgaccgcatcggccacatcctgcacagaagtaccgttgtagccacgctcggaaatcagtcgcacggcggcatcgagaatttcctgccggcgttcccccggcgacttgcgaacacgcttatgctgcaatgaattcccagatgtcatatccgccagtctatccgcattctccccactcccatgcgcaaccacatccaatatccttggccggatatgcaaaacggtgccaaaacaaaacattctgtcatgccttcgacaccgatatcgcgcaatagatttttctgtatatgcttcttcgcttactcctggaacacgtcggggtgcttcaggtcgccggggatgtcggacagaaggccctccagccccaggaattccttccagaagtcgagcggctggccgtacggcgtggcttcgcggccgtgggcctgaatgttggccttggcctcgaacacctcttcctcgctgatgccctcgaagtagctttccaagcggtcgcgatgctcgggcacgtagaacagagaggacacaatctccgtcaaacgttcggcacgctcgatcggcaaggaatcccagtggcgaagctcgatgaagttcttcaggcgtacgtcattgaagtgcgtggagatgatgtggttgatctcgtacgggttgagttcgcggtccgggtacacctcccccgcgttctcgcggaaggccgggcgatgcagttccttgggacttgctccagaagccacagcttcaggggtatgggtcaggtcagcgaacatgagcggcgtggacagcacgtcgatggcgtaatcctcccacccatagcgcgggtcgaacaggcccggcagcacattcgtgcgctggaagtcgagataatcccacatgcgctggcgcagcaatggccatgggttcgtctcaccttcgaaatacggggtgttgcggaagaagtacgccagaatcggaccgatgacggtgcccaaccgcagtttttcgatggaatcgcgctcgtccacgtagtcgatgctgacctgggtggaggcggagcaacgcatcatgcatgggccgaactgacccacgcggccgaggtagtcggtcattgcatcgtagcgatccttggggttgaccggcacatccgcaaagctggatttgggctggtaaccgtagttgaccagtcggaagtcgagatcgtcaagaatcggggcgagctcgcgatggaacttggaatacaacgtattcaggtcggacggcttcttcagaatgccgattgaagtctccacctggccgccgggttcgagcgagacggcgacgccggggcgcgcgagccccaccagatggccgttctcccagtattccttctcctcgtcgtagtacggagccaagcgtttgagcaatgcctcgatgccattcggctcgtagtagcttacggcagtgtcgtcgctgttgtgcacgggcaggtgctcgatctccacgccgaagccgccggcgccccgctgggagcgtccattctcaaagaacttgagcaggctttcgacgtgcttggggttcggcttggcgagcaggtgcgcgtaactgattcggggagtaaccatgctttgtatcgtattcgagccggccggtgcgcgtgcccgaaagcccgtaatacgctatacgaaaaaccgatagcaggctccggcccggtttctcgctctagagactcccctcagtcgctgcgcgacagctcccctcacagaggccgagccgtaaagcggacagcccagtggactgtccgtaggcgagggtgagccgataggcgaaccagcatgtcgcgagcgaagctcgtccttaattgcggacgagccagagcataaatcagtccgcggaggtgaagccctgcggctcgccggcctcggcgaacttggcgttgtgagccttcttggcggcggcgatcatcagcttgatacgattgagctggttcgcctcggaggcacccggatcgtaatcgatggagacgatgttggcttccggatgcaggcggcggatcttgccgaacatgccgcggccggtcacatggttgggcaggcaggcgaacggctgcgcgcagatcacgttcgggcaaccctgttcgatgagttccagaatctcggccgtcagcagccagccttcaccggcctgcacgccgatggaggtgacttcagcagccttcttgaccagttcgggcatcggctcgtcctgcttgaacttgccgttcgatgtggccagcgcggccttgatcggcgcgttgtacaggtcgaggcccttgcgcatcagggcgtaaaccgtcttgttgccgcccatgccgaggttcttctcgttccagtcggtgatgtaggggcgggtggtcatgaattccatgatgccgggcaccacggcctcgcaatcctgggattcgatgacgtcgaccacgtggttgttcgcgtccggctggtacttgacaagaatctcgccgaccacgccgacacgcaccttgcgcgggatgtcgcgcagcggcaatgcatcaaaggatttcacgatctccttggccagcacgttatacggcagatagcccttcttgatgctcggcgccttggctgcggtcttggaatagccgtgatgctcgatggtctcacgcacgatggtgtcccacagctcgtacagcttgttggccgaacctttctccacctcatacgggcgtacgcggtagaggcacttcatgagcaagtcgcccagaatcagcgccttgatggcacggtgcagcaggggcagggtggccttgaagccggggttatcttcgagcccctgggtagaaatggcgatgaccggaatctgcggatagccggcatcgaccaaagccttgcggatcaggccgaagtagttggtcgcacggcacatgccgccggtctgggtgatggcgagcgctacatggtcgggatcgtatttgccttccagaatcgcgtcgatgagctggccgacgaccatgatggccgggtagcaggcgtcgttgttcacgtatttgaggccggtttccacatcgccacggctcgcgtgcttcaggatgtcgaacttgtacccaccggaacgaatcaccgcttcgaccaaggacatgtggatcgggctcatctgagggccaacaatcgtatagttcttcttcatgtccttgacgaacttctcgcgatgagcgtagcgggacatggtggcgttgttgtggccggacttcttggcgttcttggcgttcgtcacgccggtggtgccgtccgaagtgccgttcttgctggcgactgcggcctgcaggtcgcgttcggcggcacgcttggaggcggcgcgcatggccttggtgagcttcgggttggcggccatggtgctgtcaagcagaatctggcggccgggggttggcgcggtggagccggtcttgcggaatccggtggacttggggccttgcacggccttggccgcggcggcttcgcgggccttgttggcttcgcgttcctcgacggcggccttgagcgagcgcagtcgaatcttggcggcacccaggttggagacctcgtcaatcttcagcagcgtgtacacgtccgccttgtctgccaggatttcggccacctgatcggtggtgatggcgtcaaggccacagccgaaggaattgagctgcacgagttcgaggcccgggtaggaggccacgaagtgtgcggccgcgtacagacgggagtggtaggcccactggttggtgacgcgcaacggcatcttggtgactgtgcggtctcccacgtggcggaatccggcggcgttcttggagcgcgggtcggcttcgccttccgagaggaattcggtgaggttgagcttctcccccggctgcagttcgcagatggaatcctcggagagcaccaccatgccgagcgagcagatggtttcggggatgccgtggttgatttcggggtcgatgtggtagggacggccggcgagcacgatgcctcggcagttgtgctctttcatataggcgagcgcggtcaaaccttcctgctgcacgtcatgcttgaagaccttgtcttcggcataggcggccttgaccgcggtttcggcctcttcgcgggtcacgttggcccacgcaaactcttcgacgatgcggtcaaccatgagctcatggttggcgaggttgaagtacgggtgcatgtagcgcacgccgtcttcacgcagctcaggcacgttggcgccgacgacgagcggatagttggccacaaccgggcagttgtaatgattgtccgtgttgggcacgaggttctcctcgtagctcacgcacgggtagaagatggtcttgatgcccttgttgatcagccacttgatatggccgtgcaccagcttggccgggtagcagatgttttcggaggcgatggattcgatgccggtctcgaacagctcgtgggagctgcggccggagatcatcaccttgaagcccagcgtggtgagcagcgtgaaccagaacgggtagttctcgtacatattgagggcgcgcggaatgccgatctcgccacgagtggccttcttgtcggtcaaacggcggtaggcgaagcaacgcttgtacttgtagtcgtacaggttcggacggtcggaacgcttcttcttggcgtcgccgccgcgttcgcagcggttgccggtcacgaagcgcgagccgtcggagaatgtggtgatggtgagcttgcagtggttctggcacagcttgcacacgtcacgctcggcggtcatgctcatgttgtcgagcgcttcgccggtcagaatggagctggcggtgtgagtcacaccgtccacgacaacgacatgggcttcgggcttggccggctcggtcttcttgaaggctgcggccttgggctcgaacttgggtgcggactcggcctcggactgttcctcggacccatcggccttaaccaccacgtccaagtggtcggcctcatcctgatagtgcatgcgggcggtcagggcggcgccgaacgcgcccatgaggccggcgatgttcgggcgggtgacctgacgttcggtgagcagctcgaaggcgcgcagcacggcgtcgttgaggaacgtaccgccctggaccaccacagtgtcgccgagttcgccggaatcacgcaacttgatgaccttgtacagggcgttgcgcaccacggagtagcacaggccggcagcgatgtcctcgatggaggcgccttccttctgcgcctgcttgaccgaggagttcatgaacacggtgcaacgcgaaccgaggtccaccggatgggtggaagccagagccttttgcgtgaattcctgaatcgtcaggcccatggacatggcgaaggtctgcaggaacgagccgcagccggacgagcaggcttcgttgacggcgatcgagtcgatgacgccgtcagtgatggccaggtatttcatgtcctggccgccgatgtcgatcacggcggtgacgccggggctgaccatctccgcaccgcgatagtgggccatggtctccaccacgccctcgtccaggtgcaggccggtggtgatgaggccttcgccgtaaccggtggcgcaggagcgtgcgatccatgcgccttcgggcagctcggattggatcttcttgacgatgttgatggcggcggtcagcgggctgccttcgttgttggcgtagctggaccagacgatttcacggtcgtcgttgacgagcgtggccttgatggtggtggaaccggcgtcgatgcccaggaagtgcgggccatgcgcgccttcgagggtgccgatgtggatgtgttccttgtggtggcgcttgttgaagtcctcgcggtcggcctcggtggggaacagcggcggcatggtgggcgtgttggagggcaggttcttcagctcgtccagacgcttgaggatctcatcgcaggtgtgggcctcgaaatggtggccctgatcgtcggaatccatgtcggcctgcaatgccgaaccgtaggccacatacaggtgggcgtcggtcggcacgatgaactcgtcgaccttgccttcaagggcacgctggaaagcggcgcgcagttcggacatgaagaacagcgggccaccgaggaagatgacggtaccgtggatcgggcggccagcagccaggccggcaatggtctgcgtggccactgcggtgaagatggaggcggcgagatcaggcttggccgcgccgtcgttgatcagcggctgcagatcggttttggcgaacacgccgcaacgcgaggcgatcggatacaggttctcgtagctcttggccatctcgttgaggcctgcggcgtcggtgtcaagcagcgtggacatctggtcgatgaacgcgccggtaccgcctgcgcacgaaccattcatacgctgttcgggcgtgggcttcaggtaggtgatcttggcgtcctcgccgccgagctcgatgatgacgtcggcctgcgggtattccttgtcgatcgcctcggtttcggcgatgacctcctgaatgaaaggcacatgcagattgtcagcaagcgccagaccgccggaaccggtgatagacaggcgaatcggctcatcgcctcgacctagttccacaagctctttacggatgtcgaccaacaggccggccacggtggcacgcacgttggcgtggtggcgtcggtaatcggagaagagggtgtctttcagggaatcggactgatcaagcaccacggccttgacggtggtggaaccgatgtccaatcccacacgcaggggcttcgggtgtgaagcgggctttacgctcgcgtcagtgacgatgtcaaccatgtgttcctcttaattccgacttccgggtatgtgcgccttcaggcatcatgagccgtttcgggatggctggcagatacctgcggacggcttcgcccggctacttcttctggaatattagtccgaccacctgcccaacgtgacgccgggcatggtgatttcgctcacgggaagggcgttccccaacagttccgacgatattgctgagtgcggcattccggacctgctactacgaggcctgttggccttcgccggcttcgcggtctctcaaatagatttcggggatatctcgttcttgatcgtggagcttggcccagatgaccggttcgccggcttctagggacttggacacatcgaggatgcgctggtttctggagccgcggaattgcagcagcgagtccttctggtctttgaggtagcggccgtcgacgaggatgtcgataagatgcagcaattcaagcttgtctggtgtttctccggggcgcatgagctcttcccatgtgtagccggtccacgaccagatatctttggtatgaccgaattcctggcggatacgttgtgcgagcggcaccagcacgggagtgttgaggaatggctcgccgccaaggaacgtaatgccttgcacccatggcgctttcaggtcttcgatgatcttgtcttcaagtttttgcgtgtattcgtggcctgcttggaagtcccagatggaggcgttgaagcagtcgacgcagtggaaggggcacccggagacgtaaagggagttgcgcacgccttctccgtcggtgacgatgaaggttttgtagtcggcgatcatccgcttggacatgcgccggccatcccattgaccggctttcggatcgttggcaagaccgttggagggtacggaggggccacgcccggtctcgccggccgcaaagtcatggcgcttgggttcgggcttggtcgtatgcaactccggcatgattccctccttgcggaaagcattagctcccctctttgagggggagctgtcgtcgtaggcgactgaggggagcttcggaatagctcttcggactcccctcagtcagctttgctgacagctcccctcagagaggggagcctactcacgaataaccctacttggcctcttcgaaccactcgcgggtggtgccgtcatccagcgtcacacgaccggtttcgccgctcatgtgcttgactcggtgggcgatctcctcgtgacggccgtgcaccatcgggcgctggaccgggctgccgaggtagccgcaggtgcgcttggtgacgttgcacttgtccgggttggagttaccgcactccgggcacttgaagccttcctcggtcggctcgaagtcgccctggaagccgcacacgaagcagtggtcgatcggggtgttggtgcccaggtagccgatgccgatgttgtaggcataatcccacacggcttcgagcgccttcgggttgtcctgcaggcacgggtactcgcagtagttgatgaagccgccggaagcgtagtacgggaagtccttctcgtagctgagcttctccatcggggtgggctgcaaccacaccgggtagtggaaggagttggtgtagaagtcgtggtcagtcacgccttcgatacggccgaacttttcacggtccatgcggttgaagcggtcagtcagggattcagccggagtggagtacacggaatagtggtagccctccgctttgctccactgcttgcacagctcgttcatgcgcttgacgatggacagcgcgaactccttgccttccggatcccagccgtggtcgcgaatccagttcttgccgtagaagaccgcggtggtctcggcaaggccgatgtagccgagcgacacggtggcacgctcgttcttgaacagctggtccacgttgtcgttggcaccaagacgaccaaacgcaccgaagcggaacagggtcggggcgttgaccggggtggcttccttgcagcgcatgatgcggaactggagggcctgatgggcgacttccatacgctcctcgaacagcttccagaagcgggccttgtcgccgtgggattcgatggcgatacgcggcacgttgacggtgaccacgccgaggttcatacggccatcttcttcatccttgccggtctccgggttgatccaaccctgcaggaaggagcggcaacccatcggagccttgaaggagcctgtgatcttgacgatgttctcgtagaacaccacatccgggtacatgcgcttggtggcggactcgagggcgagctgcttcaaatcgtagttcgggtcacccgggtcggcgttcacgccgtgctgcacagtaaagacgagcttcgggaagatggcggtgtggtgttccttgccgaggccgcgaatacggttcagcaggattgcgcgctgcacttcacgagagaaccagtcggtgccgagaccaaagccgacagtcacgaacggggtctggccgttggacacacggttggagttgatctggtattccatggtctgcatggcatcatagatggccttgcgggtacgaatcttggcgaggatttcacgctcctgctcaagttcgtcaacgtcggtgtggaacggggtgtccatcggcagcggttcacgggaaccgaaatgcagcttggcgggctcgttcttcttggcgctctcgacctggcgacgggcgaattcaaccggcatgccgtcggggatggtctcacgagcttcctcaaggaacttctcgtaatccttcttggcatactgggcaagatgctcgtcggcacggttggcggtctggccaccatactggctggaggccacgtccttcatgatctgggtaatctgggtggccgcaatggcgatggacttcggggaagccatcggagcgttgccaagagtgaagccattggccaacatgtcccagaagttcggcaaagagcagttggactgggcagtgaacggcgagtagtcggcatcgtggaagtgaatatcgcccttcatgtgggcgttggacaccgctggaggcagcatgttgaacgcggcagccttggacacggcaccagccagcaaatcacgctgggtggagtagacgttggaatccttgttcgcgttctcgtgaatcagggtcgggtcatgattaatgaagcgggaaacggcctcgttcacatcagtggccttggcgcgctgaatgtctttgtcgagacggtagttggtgtaggcgcgagccacgtcgtacaggtgggcgtcaatgagggcgtgctccacgaggttctggatgtcctcgatcttggcggggccggcgtaacgccccttgatttcgccttcgacttggttggcgaaaccacggatcatggcatcttcttcggggccgacttccttgttcaggtcgccgaaagcagacttgaccgcagagatgatgttgatggggtcgaagtcgaccacacgaccatcacgcttctcaacgagcacggtggaggccttggcggccaccttggtctcgttatcggtgacgatttcctccaacacctgtgcacccatcgggcacccctttcctataaggcgaacactctcctgagttccgcattttggccgcactcgacgtgggccacacgaaattacattgatgtcgttttcttgaacctctagaagaatacggcatccccaccactatatctagtgctcaacagtggtgtgtcgaactatttatagggttttcggctattttccgccaaaaccacaagtatgtgattagcgtaactgttttctgctcgcgtgtcgcacagcgagctcactaacgactctcaatcgtcagcgcaacgcatatctcactcctcttcatagcacccgtttcttcgccataatgactcctttcttctgatgcaccagaccatctccatcatcggctgacacatcgcttcgcacggttcttgcattcatcatcacaccgttttcaggcgacggtaaatttttaccgtcatcaaccagcgcacttatagtggagtgcatgactactgcaatgggctactcctctaccggccgcccaccggctgccgcttcactggcctcggctggctttgagccgggtcaaggcacattcgcgcccgatcagggcactatcaatctgccgaatgaacctcgccctatcgatcagctgcctgcacgcgccgctgaaaccaccgcgcaaaatccgtggccggtaagtgtgctgagccagaagttctacggtgccgtggaacgatggccgtccgcctgggtcaccggccagatcacgcagatcaatacccgtcgcaccggctcggcctacatcacgctgcgcgacgacttcgaggatatcgccatggaagtcaatggcttcggcaggttcgcggccgcggccagccagttcgttcagggcgaccgcgtggtgattcatggcaaaccgaacctgtggatgaagcgcacttcgctgtcgttgcgcggggacacgattctcaaggtcggagccggtggcagcctcaaggccatgatcgacgaattgcgcaagcggcttaagggcgagggcctgttcgatgccgatcacaaactgcctctcccggagtttccgaagactattggcctgatttgcgcacctcaggcacgcgcggaaggcgatgtgatcaccaatgtgaaccttcgttggccttccgtaaccttcaaggtggtccatgtgcatgttcagggcgagcaatgcccggccgaagtggttcaggccattgcacaactcgatgccgacccgagcgtggatgtgatcatcgtggcccgtggcggcggctcgtttgaggatctcatcggtttctcggatgagcgtgtggttcgtgcggcgtatgcctgcaccacaccattaatctcctccatcgggcatgaggatgactggacgttgctggatctggtcgccgatcttagagcctccacccccaccgatgcggccaagcgcgtggtgccggatgtgcgtgagcagtcgcagctcatcgaaggtgccatcgaccgtatgcgactgcgggtccgttcgcgcgtggagaacgagattcgacttatcgagggatatgcgaaccggccaagcctgacccaaccgcataccatgctcgaaccgcatcagcggctgatcgacgattccctgcagcggcttgacatcggcctgcgacgcatcgtggacgatgcccagctcaccgtcgagcgagctcatgcctcactgaccgcactcagcccgcaatccacattgaatcgaggctatgcggtggtgcagtcctccgatggccatgtgctggatgacgcttcgcgggtcagtaccggggatgacatcaccgtcaccctgaaaaagggcgtcattaccgccaccgccacatccgcaaccgcgtaatgcaccatatgcattcacgcatatataccgtatatataaggagaacaagatgaccgagaacaccacacccaccgacaagaacacccccgcctcgtccctgacggacaaggaacgcgagctcatcgcccagatgccatatgaggaggcgcgcgacaagctgattcaggctgtccaggcactggaaaccggcggcctcaatcttgaccagtcgatgcgtcaatgggaaatcggcgaggccttggccaagcgcgcccagggcctgctcaacgacgtacgagccaagctcgaccaggcacaagccgagcaagccgccaacgaagccaccgcaggcacgcagtccaacctcgactgagttgcctcccggcgcggcatcccgcggctcgcacctgaatccggactggactgagttctgcttcccggcatacgatagtggtgattaggccacattggtagcagttatagaagggaaatcccatgtcaacgctgattcttgtattccatccgcacctgaaggacggctcgcgagtgaacgcccgtctgcttgccgaactcgccgcacaaggcgaggacgacatcatcgtacgcgacgaatacgccgaatatccgaacttctccgtcaacgccgacaaggagcacgagctactggaggccgccgaccgcgtaatccttcagttcccgttctactggtactcctcccccgcgctactcaaggaatgggaagacgaggtcatcaccgcaggctgggcctacggtggaggccacgcactcaagggcaaggagctcaagctggtggtcaccactggttccgacgcctccaagtaccgcaaggatggcgagtacaaccacaccatggaggagctgctaagcccattcgcagtcgtggcctacaaggtaggcatgaactatgccgaaccattcctggtgcagggcaccgccaccatcagcgatgcggagctggatcaggccgccgccgattatgtttcggcgattttggactgaataagctgaggccgggtgcaagtcgcacccggccttgttgtttcgcgggctagccgcggtctctcccagtcagcctgcggctgacagctccctcgtcagagagagcttattttttggatcagagggagttgatagctacttcttcaacggcacgtagatcacgtcgtcaatgagctcgcgatagtgctcaacgatttgcgcgcgacgggtcttcaggctcggggtcagcatgccgttggcctcggtgaattcgtctggcagaatctcgaacttacgaatcgactcggcgcgggaaacgccctcgttggcggcgttcaccgcacgctccacctcagcgtgaatgatggcgttcttggccagcgaggccagatcgggttccggtttggcgccttgggattccaaccagttgttggcatccgccagatccagcgtgaccagagcggccacgaacggcttcttatcgccaataaccaagcactggttgaccacgggcgaggtcatcacggaagcctcaagcagacccggcgacacgttcttgccgccggcggtgatgatgaggtccttcttacggccagtgatggaaatgaatccgtcttcggagatatcgcccagatcaccggtgtgcagccagccatcggtgatctgctgggtggtgacctcagggttgttgtggtaccccttgcacaccagcggtcccttgatcaccagctcgccatcctcggcgatgccggcggtgatgccgcacatcggcatgccgatggtgccgatgcgattgtcttccggcaagctcacgcacaccggaccacaggtttccgtcatgccgtagccttccagcaccggcatgccgatgccgttgaagaagtgggagagctcggaatccatcggggctccaccggtgacggcaaagtcggcgttcgggccaaagatggtacgaatcttcttgtacaccacctgctcgtagaaagcgtgagcaatacgaccgggaagcggcagcttctcgcccttctgctcggccttggaccattcgcgcgcgttttcggcggcgcgcatgaacatcttgcccgcaaaaccgctgccggcacgctgggaggcggcgttgtagaccttttcgtacacacgcggcacggcaagcagcagcgtggggccgaaggtctcgaagtccttgaccatggtcttcatattggagctcagggccagagaaatggtgccgccaaaactgaagaattccaggaatcgggcgaacacatggctcaggggcaggaacagcagcagacggcggttgggccatgcgccggcacgaggcatgtactgcaggccggagcgcaccaggaacgcgaagttgcggtgggtgagctccacgcctttcggggtgccggtggagccggacgtgtaaacgatggtggcgcggtcgtcgccgtgggaggcgttcttgtattcccagaattcggcatcggtgacgctttcgccataggtcttgatggcgttcaggccgccggcctcgattacgaacacgttgcgcagggtgggcacctcatcgcgcacggattcgatcttgtcacgctgcccgtcatcttcggcgatggcgagcgtgactttggaatcgttgaaaatccagctgacctggctggcggagttggtctcatataccggcacggtgagtgcgccgatggacatgatcgccatatccagagcggtccactcccaacgcgtgcgagacacgatggcgactgaatcgcccttgttgacaccaagtccgaccaggcccttggccaagtcgatgaccatgtcacggaatacttgggcgctgtacgggtgccaagtgccatcatcgcccttgtattcgatcatggcaccttcgggatcgcgcttggcgcggttatcgagcagatcgaacaggttgatgtcgctgtcaatcggctccttgacgggattggtgaactgcttgacgatacgagtatcgtttatggccttatcagcgatgttttcagtcatactccccatgtaactccacggatgctacaaaacacgcgcgaaacaacggattgtccagaccaaatggccccggcaatccgactggttttcccacgactccattatgccgcttgttggaatatccctataccactgcggcgtcccgtacgtgactatgtacgagaacgccgccacccctgtttgctgagaacctgttagagctgcttagaactgaatgtaatcgacttccgtatgttcgccggtttccaagtatttcgccacatcatcaggaccggcgaacaccagttcgaccgcttgcgcaatcatcagattgacacgatccattggtgtaaggttctcgaaatagccgtacaccggaattcccagcgcatgcgcatatccgatttcgaacatcgtgcccgggtcctcgtccataagattggcgaccacggctttagcagcattaatgccatggatatcgtccgcaaagcatccttcagggcctacttcttcgatctggctgacaaaccgcggcttgaacagtaccttgccatggtcttccaatatcttttccaaacgttccatacttgccgtttgctcaggatcgaagaacggaccggccacatagaagtcatactgtttgtcttcactcatggtctctagtcatagcgcagccgcgtcggacgccagccgttattttcactgtatggacaaggggtcgtatcgtgaacattactacgggataaccgtcaatgactacgtacgttgcccccgatcagcacactccgccactttcgccccctcccgtatcgtcgagcacgcgaaccaagccgaccaaatagccgccatcccatgcgctgattaccgtatccgaatgctgcaatgccttgaacaaccgttcgggccactgcgccgattcccaaccaaccgacttgaacagcgcctcaacctgttcgacagtaaaccgcttctcttccgtgtattcgatagccatggaccctcacgataaccgtgaagccccacatgtctttgcatagtttcgcatgacgggatgatggatggtggaacctatacgtttacacatgcctaatgcctatggctcatcaccgatgaatagaggctgagataccgtcatgtttccgaagccaagtgcccgagatcggattcgaaccgacgacacccgctttaggagagcggtgctctatccactgagctactcgggcaacgacgtttcattgtacacggccgcacgcccagtcgcatcatgttcgcgtggcagcctacataagacgcatggcagtctgtgtaagctacctggcagaacccgccaccaaggcatggccggttttcgtgctggtttggtgcgaactgctcttgcgcacggcgaaaagacaccgaaagacaagccgcacacggtacagtggcaaatcgcacgaaaagcaaggtaacagtaaacaagccggaggaaagggcagcatggcaaaggcacgaagtactaccacaggtgcaagcgtacgagctcgcgccgctgccaagccacgctctgccaaagccacggcacgcccagtatccaagtctgccgtgaagccacacaaacggcatcgtctgcttggttttctcgccacgatgttcgcgcttcttgcccttgccggcactgccgcccgcgcgctgcctgccgatttacaggaactgccatttgtgccgattgtggtatcggcaacgccctggttcacgttgcttggcctgattgccctactgttggccatcgtgtcgcggcgtatccttgccgcactaatcgccatcgccgcaatcgcatgcaatggctattggcaatatccgttcttctactcgaccgacccgctcccccaagccgcgcagaacgccgtggctgcggcctcccccaacaccagcgatgcctacgcgcgcgtcatgaccttcaatgtatacaaggggcaggccgacccacaagccatcgtcgaactagtccgcgatcagcgcgtcgaagtgctcgctttgcaggagaccaccgaggatttcgtcaaaaaactcaacgaggctggcattgagcactatctgccgtatgcgcaggtctcatcgtctgacggcgtattcggtaacggcctctggtcggccacgccacttgccgatccggccgacgatgacgtgaattccagcgcctcattcatgcccggcggcacggtggatatgggtggtcagcagattcgattcgtatccgtgcacaccaccgctcccgtacccggctattggcggcagtggaagcgatcgctggatgagttgggtccgatgcgcgggcatacggatacacggtatattttcatgggcgatttcaatgccacttacgatcacacgccattccgtgattttcttggcgaccggttcgtggatgccgcacgtgaatccggacatgggtttacgttttcgtggcctacgaaccgcgtgtatatgccgatgttcgccggtattgaccacgtggtgcttgatcagggcatgaaggccgggcaatgcaaggtggtcaaagtcgagggctccgatcatgcggcgttgttggctaccgtggcggttgggtgatttcgtattcctcggccagccgcatacactgggacacggcttccagaatcacctcgatgccggacttcttgattgagccgtcatcctttaaatacttcatcaggcgcactgtggatttggtgctggcctcggggtcagggcgagcgccgggagcggcgtcgacgataagcatgtggatagtgttcgaaccgatatcaagcacaccaagtcgcgtggtgcgcgaacgcagattgaccatgatccctattcctgaccttacctaacccgtgatggccgaacaacgggccgaccatcgcaatcagccagccgtgcgccaccatggcgagtcgttcggccggcaaccaacaccgcgaggccagccgaacatcacacaaactcgactactgtacaacaatcacaccggatgccgcgccgttcacaacgatttgacgaacgttccgagacgttccagcccctcggtcagggcctcacgtgaggcggcatagctcaggcgcacatgcgtatccgctgtggccgcaccgaagtcgcggccaggagtcagagccacatgggcttcatccagcgcgcgttcgcagaacgtccaggcatccagaccagtacgggagatgttgaagtaggcgtagaacgcgccattcggctccacctcaaccggcaaaccgatgcgcttgagcccgtcaatcacaatgcggcgacgggcaagcaattcctgacgacgagcttcacattcggccaaactctccggcgtaaaacaggcgagcgccgcatgctgggtgggcgtgtgggcgcacaggtagtagttggtggccaggtcgtcgaccgcttccagcacggtggggtcgtcgggcagaatagcccagccgagacgccagccggtcatgccgaagaacttggagaagctgttgcacacgatggcaccgggatcgcaggccagtacggacttgacttcggtgccgtccggctcacggtcggccaaatcaaggtaggtttcgtccacgatgcgccatgcgccgcggctggcggccagcttgcacacctcgtccaatacgttgaagtcgatggtggtgccggtggggttggacggcgacgtgatcattacggccttggtcttgcttgtccagtactggctgcacaggtcggcggtcaggtggaagcgggtggcggccgaggtcggaacgtcgatgacccgcccctcaaaggagcgcacaagttcgcggttgcacgggtaggaggggtcggccacaatcacatcgtcaccggggtccacggtcagcgcggtggccaacagcagggcggccgaaccgccggcggtcacgcagatacgcttggggtcgatgtcaaggtcatgacgctcgcggtagaagtcggcgatggcttggcgcagttcaggtaggcccatggcggcggtgtacggcagggcccggccgtcgtactgttcgcgcatggcgtcgcgtacggcgggcggcgcgccgaaatcgggctcgccaaggcttaatttgatgacgctgataccttgggcgatcatcttgtctgcttgttcgccgaataccatggcacggaagggattggcctcacgcgctcggcgggacatgactggagacgcggccggagattggggctgctgcgctgcttcgttttccatatttcggttctatccgcctcacgggacaaggtttcttcttctataatcactgtaggtcgattgagtgtaccaacccgtattcaaggaggaataatgagtcgattcaatggcaaacgcgccgagttcgaggccagcggcgaaaagatcaacgtcgcgattctgggtgcgggccgcatagctcacaccatggccgacaccctgacccagatggctgaaggttcactgtattcctcatggattcacccgtatgcggtagcggcccgtgatattacgcgcgcgcaggcttttgccgaccaatggcattttgacaaggcttatggatcgtatgaggagttgacggcggacccggatgtggatctggtgtatatcgccaccccgcacagtctgcacgccgaacaggcgatcctgtgtatgaaagccggcaagaacgtgctggtggagaagtcgttcaccgcgaacgccgggcaggcacgtgaggcgctggccgtggccgaggaaaccggcatgctgtgcacggaggccatctggacgcgctacatgcccagccgcaagctcatcaacgaagttatcgagtccggcgagatcggcgaggtgaaagcggcgagcgccaacctgtgctatccggtgtccggcaaggcacgtatgaccgatccggcctgtgccggtggcgcgctgctcgatgtgggcgtgtatccgctgaacttcctggatatggcgatcggtgccgaccatggccgcacgctggatcatttcgatacgtcgatgatggccgccgaaaccggtgtggatgcacagaattccaccacgttgtattacgatgatggcacgatggccgtgtccaccagttcgatgctggtttcctccgatcgcggcggctacgtgtggggcaccgaagggtatttggtggtcaccaatatcaacaatcccgagtccatcgatatctacaacaacgatcacaagcccgtgcgcagtgttgcggtgccgtcgcagttgaccggttatgagtatgaggtggccgatgcagccaacgcgctgctggatggcaagatcgaatgcgaggcgatgccgcacgccgacaccatccgcatcatggagctgatggatgcgattcgcgaccgttggggcctgaagttcccgtttgaggtctgatttcagctcccctccagaggggagctgaaattattccgctgaatctgcatctccttcaacaatctgctcatacagccgtgcgaggcgttcgtcacgcacggctttcgttaattcgcactcccatacggtaattacacgccagccggcggcctccagttcagcccgctgcgcgatgtctcgattgtgattgcgcagtagcttcgtctgccagaattccacattcgatttcggcatcgaatgtttggaacagccttcatgcatgtgccagaaacagccgttgatgaacacgatggtgtggtatttcggcagtactacatccgggtggccggggtaacgcttgtcgttcttgcggaatcgcaaacccttgcgaaacagatagctgcgtaccagcacctcgattttggtgtctttgccacgaatatgcgacatcgtgtacgaacgggtgccccgctcatacttctccactggctgtttcttgcgattcacgcactccagactaccgtgacgttgcggcgaggatgaaagcctgaacgaacaatcacccatcttgcccgtccgtgtctcttatcgcgggcaatgatcatctgccggtcgagactgcacgattagaccgaatcaaatggatgacatgatgattcgtagggccacggcggccgatattccccaaatcgacgaactgctgcggcaggtgctcgaagtgcatcatgccggccgaccggatctgttcaaaggcggtgtcaagaaatacacggacgaggaattgaaggcgattctggccaacgatcagacccctgtgttcgtggcggttgcgccatctgccaatgacggcactgacgtcgaacataacgccgactcccccgccaccgaccaagtgcaatggcatagcgccaagcgacgtctgctttgcgagatttgcgagagatgaatgcgataccagcgttcatggctatgctccttaatccaatatcaatggatgaacctgccctgccccgtatgtcaccatcataatatatcgaatatcaatataaaaatatcgaaaatcactttcaccattcacccacacacatcgcgacgcgatcgaccgttcttgccttgctcgcagcatccacgaccaacacgggaaagtcactttaaaaaagcactttatcaatgtggataactcggaagctggaaccacatacccccgttcagcttgccaatcagaaacctcatcccataccgtcagatgcacccgcacgcaacgacgcgtcagacaacagaaagaaggaccaatgaacatctctacgtttacccacaactcccacccggcaattcggcatacgcattttgtctagtgcgagattgagagttatgatgacacgaagaaaactcatcatcaagaaacttcggcaagcggcaaagcagcgagggctcgatttctatttgttacggcaaggcagcagacatgaggtttactgcctggacgggttgaggatacccatcccccgccataatgaagtctcagaacgaaccacgctggatatcatcaacgagagcgagcagaaactcggaaaggggtggtggcaatgagcaactatgacgtgcttgtgcaacccgatggccgatattggtacgttcaggtaccagctatcgaacggtcgacccaggccaaaggacttgacgatatcgagccaatggctaaagatctcatcactgtcatgaacgacgacgacaatccggagctcaaggtgacgtttgtgttgccgaaacaagccaaacaacacgtaacagaaatgttccggcagcgcgaaatagcaaaaaaagccaacgcacaagcggctgccgaatcccgactcgccgcacgggccctacgcaacgagggactcacgtatcgacaaatcggagctttattgggggtctcctaccaacgagcatttcaattggtcaacggcaaaacaaagcacaaaacgacagcgtccgaatcgcctcagccaacaactgaatcacgctccccacgcacgcaccatgccacaccgctatcgactccggtctcggcttagcgaacgggtccacaaagcccagactgtttccgcctcccaagctcaagagcaccgagcaggatcttctcatcccagcagattgaggagatcgtccttggtgagggtggcgatggaggcgggagcttcggtgagggcgctggcgccagtgccggcttcgtcggcaagcaaggaagcatcggtgaactggcgggcgagctcgctcttggtatgctgaagctccaagatgcgttcttcgatggtgtccttggccaccacctgatacacgttgacgtcttcggtctggccgatacgatgtgctcggtcggtggcctgatcctgcgcggcagcgttccaccatggatcggcgtggatgaccacgctggcaccggtcaggttcagtccggtgttgccggccttcaatgaaatcaggaaggcgggcgtatcgtccgcattgaactggtcgacgagttcgagacgcttctttttaggcgtggatccggtgatggtgtagtagcgtagtccttgcgcgtcgaaacgttcggcgatcagatcaaggaagctggtgaactgggagaagatcagcgccttcttgccttcattcacgcaggtttccaccagttcggtgatggcggcaagcttggccgactgatccttggcatcggcatacagcagccttggatcacagcagatctggcgcaacttggtcagctcggcgaggatgcgaatcttcgacgtgttgaaatcggcttcttcgctgtgttcgagctgcattctgagccgctgctcgtgggccgcatacagtttgcgctgttcgccggcaagctgcacggtcagcgtggtctccaacttgtccggcaaatcggtcagcacttgggacttcaacctgcgcttgatgaacacgcccaccaacgactgcaattggcgagacacccgggcggcctcaggattgacctgtgcggcggcccgaccttcggccgtgctgccatctgcagcccgggcgttggagatgggcaactcgtagcgctcatggaatcgcttgtatgagcccaatagtcccggcatcaggaagtcgaagatgctccacagttcggagagtcggttctcgatcggcgtgccggtcaaggcgaaacgatggtcggcggccacggccttgaccgctttggctatcttcgtggtgtgattcttgatgtactgggcttcatccagcgccatgacattgaaacgttgctcattggcggtgtaatcatcgacatcccggcgcagcaggtcgtatgaggtgatgagcacggtgggttcatccgcccggaacgcgcggccgatggcggtgcggcgctcggctttggtaccggccaccaccacggcgttgaagctcggggcgaacttggcgaattcggcaccccagttgtacaccaaggacgccgggcacacgatcaatgatggatgcggcccgccatcttcggaatcgaaagtaatatgaccggttacggctgattcactattaacagcattaccggcatccatgccttgagcggtcggcatgccactagattcgttgtggtatcgcgacagcaacagggcgataagctgcacggatttgcccaaacccatctcgtcggccaaaatgccgccaaaacccttgtcgcacaacgtgttcagccattggaagccttcgacctgataagggcgcagaatatgcttgagactatccggcacttcatacgacttagggtcgatgatcttgagatcgtcgatgtattcggtgaacgaagcgtccttgactacatcggagccgtcatccggcagctcaccatccagtaggaatgctcgaccgcccggcaactcgatcagcccggagttgagctgctgctcgctcagatcaaggtcgctggccaatcggtccaacgtgctgagattcgcgccgctgagtttgaccagcgtgccgtccttcaaatgatggaatcgttgacgccgacgatacgaagacagcaaggcacccacttcgtccggcggtacttcatcagcgaggggtgatatctccaccaaattgcctttgatggacaatccgactttgacgcttggcggcttgggcgcgatcagccggtcaaaagccggtgtggtgaagacctcccctacttccttcagtgcgggcaatccctcgtcaaaaagacgaacaatctgcgtggtgtcatcgcgatcgatagtggccgcatcagacacgaattgtttggcggtctttcgcgcggccggcgttcggaacccattcaccgtctgatgagtggcggccgcaacgcgcttgcgctggtcaggcatggtaaagaattcacgcactacatcaatcgcaagatgctcagcgtcgaaatcacgcccaatcacgccccgagacaaggggatggaacgctcatccctagcatgcaccgtcgggccatcgggtagcaacgggacaatggcatcgccgtagtgtgccttgacctcgcattgcacaccatgctcatcacgatccagataaaactggaggctgcattccgtaggacttaattcagccagctcgcgaggaatctcactggcctccaacagtccggcaccaaccagctgaggcaatagcgtgcgtgcgaacagggcgatgtcatcgccggcaatgacctgcccctcgccatcgggttcaaacaggtctcccaatagtcctcgcaacggaatcaatcgtttcgggcaacggacgaatcggcatcccgctgcgcttttacgctgagagcccgccatcatggcggataccgcaccggccggattagtggaggcgagcaacagccatacatccttgccaccatcaatcacggtttccaccgccggcactccggcaagcaggtatccggcatccggaccatacgtattgaaatcacgccgcgcaatgcgcataagaaaatctggctcgccaccatcaaccggcaccgatgcaggctgcccggagaaccatgtgttcaacacgagctgtacgcctctgccctcacgtacggacagcaaccgggccacttccggtgctgaaagtgtcaggtgacggtcgatggcgatatgcccgtaataccggtcctgctgctcggccgcacgacgcacggccatcgcgtcgtcaaggaagcccagcagtgggcgcgaatcatcgtcgaacatatccggcgtatgggtaaaggcaagcttctgcccataatccgtatagtcgccgttcgccatggtaagcacaaattgcggaatcgatttcagtacatagctggacccattggaagtcgatccgatcttaaactccacgctccacacgccatcgatgaaactcaatatcggaacaagctgcacctgccccaagcccacagtctcactatcgccctgatacccgccgcctcgggtgccggcacgagagccgtatccgctattcgtacgtcgtccacctgcgccatttcgtctttttgcagtatcgaatcggcgcatgagcgcattgcggcgacgcgctttggcttgagcatcttgcctatcgacgtgctccatatagtcgatcagcgtccgagacggcctcacagccccggcacggtacccttcaaaacgctgcggatcatcgcagaatatgaaggcgagcgcaatcatgtgcttgcacatgccatagccacggccgtaagccgggcatgagcacttgccaccgacggcttctcccgtatcgaggtcgaattgcacgctggtacgatacctactcgatgggctggtggtgccacgtagaataccgtcaagctcggcatacccggttcgatgattttcgctgtataccggattgataaccatggtggccgctttgcgcgcaatgctacgggcacgagcgagcacggcattcgacgatgacgattccacatcgttgcgtaacgcaaggatagggacggcatgggcttcggcacgcttcgcagccccggcgaaatggccttcgtcctcatcttcgaaccatacggaacgtccttgcctgaaacgatagggcataaccgcatcggcggcggacaaactgtccgttccaccaaacgttacggctctactgccggcagcgcctgcgccaccaagcattccatctgcctcgccagagataccgcctataccgctgctcttgccggcaaagagacccctgtcctcattagtgtcatctgtgtcatctgcgccataccgatcatcgtcgtaatcggcaccttcgtcgcctccccttttccaaggattgcgacggcgcaacgcatggccccaggaaacgccggaatcatcatcctcataaggcaggaggtcatcgtcatccgcattatcgggaacatggccaaatacaccataccctttgctcatgggcgagcctcctttccagcgaatgcatttcagtccaacacttctatcctagacgaggcgcgcggtagccttaatgtatggatgcagacaagccggcgcaacgcaaatcctatgcagggaacaccaccctcgaaatcttcgaggtgctgtggcgtcacagctactttggacatggcctgaccgtgcggcaaatactcgatgaacttgcccgtaaacaccagctggaagatccaagcgagctgccgaccgagaaaaccatacgaaatcagctcaaaaagcttaccgccacggaatttctcggcagacatatcgggcatctcaccgaaagcgaccttgccggcatcgaatgcaagaatccacaacccggctggtatcttgacgcattcctatccaccgccgaaatgcgactgctactcgacagcctcaccttgtctcgcatcagcctcgacaccatggacgatctcatcggtaaaatccgcgaactcgcaggtgccgctgggcaagcagtaggttatcttgagcacgtggccacctacacgcatatcaacggcgagttcctatccaccatcgaccaactgaatcaggccattgaagaaggccacggcgtaaccttccaataccgtgattacggcccggacggcaccctgataccgcataaaagccgtacgggcgcaggtcgaattacctacaccgccgacccttaccagatggtgtacaagaacggacggtattacctcatctgccatctacatggcgaggataatctccgcattttcgtggtcaaccgaatcgccaacgtcagcgccaaaggcaggaacggcacagttccactggaaaaaccagcgccggctgattttgacgcagtgaacttcatgcgtcaccgcccgtatcccgtagccgatgccccgattcgcatccgcatggccgtacgagacgaatccatgctcaacaatgtgttcgaatggttcgacgaccctcagatcaaacattcgccggacggcacacagttcgaagtcatcgtcgatgctcccgaacgcgccgtgttctggtgggcattgcagtattcctgggatggccgcgtagtgattcttgagcccgattcgctcaagcgcaaactctatgatgccgggcgtcgcatggccacagcctatgctcccgaatgatgcagcatcacatcgcacacctccttgccgagttgttcaccagcgaatttcaccggagaacctatcatcccatcgccaatcacgttcggtaattttttaccgaacaactcgatttcaagccattccacgaactatggccccgcctagccgtacttgacgctaaggtggaaccatcacatgccgcgatgcacatgcaacgcaaacgcaacgatatgtaaggagcaactatgagcgaagagcgtaccgcatggggatggggtctggccagcgtagacgccgccggcaccaccctagacgtctggtaccccgaactgaatctcggtgaggcaccggccgaggccgatcgtccaaaccacaatttcggcactctggctcacgatgaagccgacgcccgtggcatccgccgcgtgccggtattcgtcgtcagccagttggacgagccgatcagcaacgccgcggacgcttacctgaaactccatctgatgagcatgcgcatggccaagccgaacacgctgaaccttgacggcatcttcgcccaactcgccaatgtggtgtggaccaactacggtcctttcgccgttgaggacttcacactacgcaaggccgatgtcgaacgcgcctccaccgaagccgctctcgctttcgctgctcaggccggactgcctgccgcagctcctgccaccaccgtcaacgtgttcggtgtggataaattcccgcgcatgatcgattacgtagtgcccaccggcgtgcgtatcggcgacgccgaccgtgtgcgcctcggtgcttacctatcttccggcaccaccgtgatgcacgccggattcgtgaacttcaatgccggcacgctcggcgtctccatggtcgaaggccgcgtttcgcaaggtgtggtcgtgggcgacggttccgatatcggcggcggtgcctccatcatgggcaccctctccggcggcggcaagctgcgcaactccatcggcgagcactcgctgctcggcgccaacgccggtatcggcatctccctcggcgataactgcaccgtcgaagccggtctgtacatcaccgccggcaccaagatcagcatctgggacaaggccaaggccgcagccggcgagccgctcgaagtcgtcaagggtgctgagctctccggcaaagacaacatcctgttcatccgcaactcggtgaatggacgtatcgaagcccgctaccgcaaggtgggaattgagctcaacgccaagctgcacaagaactgaaattgaaataatggagcgttatcttcgttgctcctcagtcgacgtacttccgtacgccttccctcggtacgcttcgataccgcacacattatttcaatttcagaactagccctgctcgttcttatgcagccgtcgcagcatagctggtttgcgctgtacatatagaaagcgcttcactggaatctccagcgaagcgctttctcaaaccaataatcaccgctcgtccatcggcatgaaatcgcgctcgaccggaccggtgtagacctggcgtgggcggccgatcttggtgttcgggtcggccagcatctcacggtactgcgcaatccaaccgggaatgcggcccagtgcgaacagcgtggtgaacatggccggatcgaagccgatcgcccgataaatcaagcccgtgtagaaatcgacgttcggatacaggttgcgcgatacgaaatactcgtcgttcaacgcaatatcctcaagctcggtggccacatcgaacaacgcacgctcgtcggacggcagtttctgcgtatcctcgcgctccatgatcttctcaagatacttcttggcaatcgccgcacgcggatcatacgacttgtatacacggtggccaaggccggaaatcttctggccatcctccttggcatcacgcacgaactcggccacagacttaccggaatcacgaatcgccttcaattggcgtagtacggcctcattcgcgccaccgtgcaacggtccggacaaggcattgacgccagcggccaccgccgaatacaggttagcgtgggcggaaccggcgatacgcaccaccgaggtcgagcagttctgctcgtgatcggcatgaataatcagcaaacgacccaaagcatgcacatacaacgggtcagattcgaacggctcgtacggcacagcgaagcacatgcgcaggaagtcgtccacatagccacgcgcgtaatcggggtacagcatcggctcatcgcgacgacggcggaagatgtacgacacaatcgtgcgggccttggccatgatgatcttggcggcctcatcgagctggtcggtgtcggagatatcggtggtgtccggatagaacgtggccagcgcattgatggcggaggcaagcacgctcatcggatgagcggagcgcgggaacgaacccatgaaggtacggaagtcttcgccaaccatcgtcttgtggttgatgtccgcgcagaactgctcatactcagccctgctcggcagctcgccgtggcgcagcagccacgccacttccagaaaatcggagttctcgcacaactgctcgatggggtagccacggtagcgcaggatcgaatgcttgccgtcgatgtaggtgattttcgattcgcactgtgcggtggtgaggaatccggggtcgagcgttacccagccgtcattgcgcagcttggaaacgacgatgccatccggccctgcactagccttcaccacgggcaggttgaacttgttcgaatcgacatcaagttgtgccgttgccattcgcgcaccttcctcttcatgaaccacttaccccaaacattaacgttcacgcgttcgcgaacgctagtgttcggtactttatgtcttctgtgttaccgccggcagacaccggtcgatacacgaaagccgaagtgcgctcatgctatcaaagcaaacgcacttcggcttgttacgtctcgaattcacgggaaaaccgcaaacatatagacggttgatgagataccgatcgcccatcacaggtcaatcagacacccgccatacgccaaacgccaatcagaggttggtgcgatcggtgaagatgatcgggccgttctcggtgatggcgatggtgtgctcggagtgggcaccgcgcgagccgtcggaggcacgcagggtccagccgtccttcggatcctggaagatctcgtcggtggtcttgaggaaccatggttcgatggcgatgaccaggccttcgcgcagcttgtagccgtggtgggcgcggccgtcgttcggtacgtgcgggtcgccgtgcatgatgtggcccacgccgtgaccgccgaactcgaggttgatcgggtagccgtattcgcgcgcgacgtcgccgatggtgttggagatgtcgccgagacggttgccgggcttggccacgtcgatggcggcggcgagcgcttcctcagtgcacttgatgatgcgcaggtcttcggggtccgggtctttgccgaccacgaagctgacggcggaatcggccacccagccgtccacggagatggcgagatcgagggagacgaggtcgccgtccttcaggctgtaatcgtacggcacaccgtgtagcacggcgtcgttgacggaggtgcagatgtagtgggcgaatgggccggtgccgaagtcaggagcgtagtcaacatagcaggattcggcgcccttgcggtccacgatcttcttgtggacgaactcgtcgatttcaagcagattggtgcccaccttggtggtctcctgcagttccttcagaatgccgccgacgaaacggccggctggcttcatttcctcgatttcacgaggggtcttcaattcgatcatgaggttctttctaccttgttgagacttgttctcaactctagcccagcccggggtcaaccgacagagcatcacccgtggtctgcctagggtccgctagtagcctatcaacggccaaggccgagaaaaagcgcccggcagatacataacctgcacgggcgctttggattgattgtccggagattgattgtctggagcgcgagattacttgcgacgcttgccgaaagtgaacgcgcgaatcaccgaagtaatccccatcaccaccatggcgcatccgccgaagataatcatgaacacggcggagctcagcgggctcatcagcaccacgaagccggcgataatcgagatgatggcataggcgatggcccagccggagcgcgggatgcgccatgattcgactagagccatcacgccttccataatccaaccgaaaccgaccatcagggtgatgagtaatgccaaggtctgaccggtcataccgtagtttcgtacgactacgacgcctccgaaggtcagcagaatgccgacgaacacgtccagcacacgccagccgcccggcagacccggctccacgagagcgctgacgatgcgcaccacgccggaaatcacgaaatacacgccgagcaacaatgcggccaaagccagcgtcttgttcggcaccaacaacagcgcagcgcccaaggcgatggcagccacgcccaccacgccgtaaatgatgcgaatcttggtcttggccttttccggcagccattcctcgatcaggtggaatggactgaaattgccgacataccagttggtctgctgccagccgggttgactttgatcgccccatgaaccattcggctgcccgtccgcttggctattcgattggccgtccgcctgataccgccgaccgtccggaccccatgctggctggccgttcgggccatagttcggattgtaggcgtacgggccgtagtacgggttctggttcggtccgccttgtggctggccgttctgcgcctgctgattctgagtgtcttgcgctcccggcgcaccttgcggaggatattggccgccatgattgctgtcatacgcgccatactgcggttggcccggttggcccgccggattcggctggctcggctggctctggttgggctggcccgtctggccattccactgaccctcgtttggattgctcatcgtaactccttaactcaaggtccatattcaggttccacataccatgttaggcaagttacctaatttgaaccatcactacagttaggcaatccgtctagttcactgacagcgcaatacccataacgcaatatctgcatcaccaacgcttctcccccgccgcgattaggcttagggccatgaccaacgaaaccgaaacgctgacgtcgggcatcgacccggcatcgttctcctccgtcatcaagccgaccaatgacctgttccgctacgtgaatggtccatggatcgacacctaccgcctacccgacgatcgttcgcgctacggctccttcgacaagctcgccgaagacgccgaaaaccaagtgcgcgacatcctcgacgccgacgactgcccggccaccaaatcgcaggctctgtatcattcgttcctgaacaccgacgccatcgaggccgccggccttgacccgatccgcgatgagcttgacctcatcgattccgccatcgacaaggccgctctcacgcgcgtgctcggcaccatcaacccagccggcggccccgacctgttcggtttggccgtttacggcgaccccggcgacccggaccgcaatatcgcccaccttgagcaggccggcctttgcctgccggacgaagcctactatcgtgaggaccactacgtccccgtgcgcgaagcatacgtggcgatggtcgccacccagctggtgaacaccgggtacgcgcccgccgccgaatccaacggtggcgatgaactgccggccaacaccggcgatgacgagagcaatgctcccaccacggttcccagcgaagccgcacttgatatggcccgacacttccttgccgtggaaaccaagatcgccgccaatcattgggacaatgtggccacgcgcgattcggtgaagacctacaaccccaccgattacgccgatttggccgccacgctgaagaacttcgatctcggttcctggatcgacgcctggcagaccgcctatgacgccaccgaggccgccaaggctcagccgatcgatttcaagtctgtgttcgcgcgcgtcattgtgcacgagccgagcttcctcactggtcttgatgcgttctgggccgaggccgatctggccgaccttaagctgtgggcccgtgttcacatgattctgggcttcgcctcctccctgtctcgcgacttcgacaccaccaactttgacttctacggcaaggtgctctccggtgccaagaagcagcgcgatcgttggaagcgcgcggtgagcctggtcaacggcgtctgcggtgaagatgtgggccgcgaatacgtgcgcctgcacttccccgaaagctcgaagcgccgcatggaagagctggtcgccaatctgattgacgcctaccgcgtgtccatcaccaattccgattggctgggcgaggataccaaagccaaggctctggagaagatctccaagttcacgccgaagatcggctacaccaaccactggcgcgattattcggcgctgagtgtctccgcggatgcgctacccgccgagaacgccaaggccgcgaacctgtacgagaccggctaccagctggccaaggtcggcaaggcggtcgacaaggacgaatggctgatgaatccgcagacggtgaacgcctactacgagccgagcatgaacgtcatcgtgttcccggccgcgattctgcagcccccgttcttcgacccgaaggccgaggatgcggcgaattatggcggtatcggcgcagtgatcggacacgagatcggccatggcttcgacgatcagggttcgcagtatgacggcgacggcaagctcaacaactggtggaccgacgaggatcgcaagaacttcgaggcccgcaccggcgcattgatcgcccagtacaacagctttgtgccgctgcagctggtcgagaagtacgctgacgagcctgataaggcgccgcacgtgaacggcgcgctgaccatcggcgagaacatcggcgatttgggcggcgtgaacatcgcgctcaaggcgtatgcattcgcgctcggcaaggcggcaggtaagcccgacgccgaagaagacggctcccccgccgccatcaaggcactgctcgataccgcccccgaaatggacggattcaccggcctgcagcgcttcttcctgagctacgcctccatctggcgcaccaagaaccgcgacgagctggccgaacagtacctgcagatcgacccgcattctccagccgaattccgcaccaacggcatcgccagcaacgtggacctcttctacgatgcctttggcgtgaccgaaggcgacgccatgtggctcgcgcccaaggaccgtgtgagcatttggtaatccccgttatgtaagagaaaaccgctgtgcttgcctcgattacaggcgaacacagcggtttttcatgatgtatggttggcactcagaattcggattcgccgggatcggaagattcggcgaaaccgtcgacgtaggtttgttgggctgcggactgtggctgattagcgccagcgtccggctgcgacatgacggcatcggccatggacgcagccgctgactcggttgatggcgacggcgattggccggaatcggaggtgaccccaaattcgacggggccagattccgacgaggtcgcatacgggtcaatgcccacaccggatgcggcaccgtccacactatattgcgttggcctcatgtgcggtgacgatgctcgttgcccgtttccgccatccatgccttcggcggcaccattggcattgccgttaccgttgccaccattgcctccgttcccattaccggcacgctgtggcttgatcagcgacgtggtgccgaaggtcaggtcatgcccaatgttggtggcttcgagaacggttctactgcgcggttcgccttgctcattggtccactgctcggtgatgagtgagccgaccacaatgatgcggtcaccgcggcgaaccgaactggcggcgttcacggccaaagcacggaacgctttgacgcccacccatgcggttccgtaatcctcccattgtctggtagtcgggttgagtcgactgcgggtgctgcccatacggaatgtcagcacgcggaaactctcagttccgcctagtgtcggatcaccggccacaaagccggtgacggtcactgctgcttgttgatttgccatgatcggtcctttcctcggcctgctggcctgttgtttggatgtggaccgccggagcctgtctccggcttcattgccggcttgcacgccccagcggtacctccactgtgaggcatgacgtttgaagtgcacaagggcaactggcaaatgtggatactgtgacgcagttgaaattttaagaatgtggataagtttcggttatccacaacaaagcgccattctgcgactgggcagaatggcgcttgatgcgattaacgccgaggctgagtaagtgggactcagctgagggcggcgaagcgctcggcgagcgcgtcggcggcttcggcggcgggcacggcgaccttgttttcgccgttgcggtcgcgcagttcgatggtgccgtcgttgacgtaatcgcggccgaccacggcgaccagcggcacgccgatcagctcggcatccttgaacttgacgcccggagacaccttcttgcggtcatcgtaaataacctcaaggcccttggcctcaagctcggcgaccagcttctcggcaccttcaaacgccgcagcgtccttgccggtggccaccacgtgcacggcagccggggcaatcacggacggccaagccaagccggcttcgtcgtggtgtgtttcggcgatgcaggccagcacgcgggaaacaccgatgccatagcagcccatccacaccggcacggccttgccgttctggtcgagcaccttcaggtccagtgccttggagtacttgagacccagctggaacacctggccgatttccacaccacgctcgaagctcaacggaccggaaccgtccgggctcatgtcgccgtggcgaacctcaacggcttccaccacgccgtcggccttgaagtcacggccgtacaccaggttgtagtagtcgacctcgttctcatcggcaccagtgaaccaagcggaacccttgaccacgtgtgcgtcgaccaggtagcgaaccgggttcttcacgccagcagcctcggcctgcgggccaagcaccatcggtccgatgtagcctggcaccagttcggggtgctgcttcaggtcttcttcagtggcctcctcaagctcggcgggagcgaactgggcttccagtcgcttcatatccaccgtacggtcgccgggcacgccgacgacaatcacttcacgccacggctcgtcatgctcttcatcctcagggtgcttgacggtaatcaccacgttcttgaggatgtcggaagcctgccattcacggccatcagtacgcgggtggtcggcgttggcacgctcaatcatgttatcgatggtcttggcatccggggtggcttccttggaagcggcgggagtggcggaagcatcgatttccggcagctccggagtgctcagggcctccacattccatgccttgccggaaggtgccagcgcgaaggtatcttcgccgatcggcatcggagccaggaattcctcggatgcggagccgcccatcgggccggacatggcgaacacaggtacgtacttcaggtcgaggcgctggaagatgcgctcgtaggcgccgcgctcgtcatagtaggccttgcgcatgccttcttcatcgatggtgaaggagtaggcgtccttcatgatgaattcacgaccacggatcaggccggcacgcggacggaactcgtcgcggtacttggtctggatctggtacagggtgacgggcaggtctttgtaagaggagtacatgtccttgaccagaagggtgaacatctcctcgtgggtgggggccagcaggtaatcggcctcgtggcgatccttcaaacggaagatgttgtcgccgtactcctcccagcgatgggtggcctcgtagggttcgcgcggcagcagggccgggaagtgcacttcctgggcgccgatgccgttgatctcctcgcggatgatggcctcgatcttgttcagcacgcgcagaccgagcggcagccaggtccagataccgggtgcggccttgcggatatagccggcgcgctgcagcagcttggccgaatcgacatcggcatcagcggggtcctcgcgcagggtgcgcaggaacatggttgacatacgaagggtattggaagtcatgtgttccaagatattcgcgtgaaccgacaagcccgcctgctattcgcactattccggccttcatcttggcattcggactcattcgtacaacaatgatggctagaagggtaggagggcacgatgacgcagccgaccgagcaacaggggaatcagccggaacccgcggagcaaccggtgtatcaaccggcccagcatgggccccgcaattttctgctgcaaccccgcaattcccaacggcagttccgcgacaaccggtatcgcaacagccaatggccatgccaccatttgcgcaatcgcctatgtcggtcccggaacaagcggcctgtccggagcggccgcgctgattgtgggtgtgcgtttgctgcaagcaccgttgatctacggcacggtgattcttatcgtcagcacggtgactgtgctgtggccatggcgggccgaattctcccgccactaccggtgggtgcggcttgctttgggcggcatcattctgattgtggcagccgcgcgctatgaggcgagcctcaaatcgatgaggacgatcgccgcgcgtattggcgatctgcgctaaatcgcgcgggcgacctgaggcagattaccaacgtccggcgatagcagtcctgcatacggggcagtgcccattgccactgtatccggcagataaacggttggcaatgattcgataccaatcgcgttccacgagcttggccctgcattcagggtttgggcaatatgtggtatcgccttcacgatcatgcacgttgccggtgtacacataattgagtccctcttcgagggcgatgcctcgggcgcgggtcagagtctcgtgcggggtgggcgttacgtccatcatgcggtaactggagtggaatgcggaaaagtgcagcggcacgtccgggcccaagtgctcgcgtatccatgtacattcagcatgcagctgggcgtcgtcatcgttgagtccagggatgagtagcgtggtgagctccacccacacgtgttcgccttctggtgtgcgtgcctcgttgaccgcatagtcgatggtttcgagcacatcggccagatgcgtgccggtcactttccaataaaattcttcggtgaagcctttgagatcgatgttggcggcgtccatggcggcgtagaagtcgggccgggcttcggcgctcatgtatccggcagtcacggcgatgggatgaatgccgagcgctcggcaggcttcggccgtgtcgatggcatattcggcgaacacgatcggatcgttataggtgaacgccaccgaatcgatgccccggtcggccgcgacctgcgcgattttctccggactggcttccatgccgagccggtcgaaactgcgggctttggcaatatcccaattctggcagaatcggcaaccggaattgcagccagccgtgccaaaactcagcacgctggaaccggggtggaagtggttgagcggcttcttttccactgggtccacggcgaagccggagctgcggccgtaggtgtcggagacgatgagtccgtcgtggtttgagcggacgaagcaaaagccgcgttggccgggcttgaggacgcagcggcgcgggcatagttcgcagcgagcgcggttggtaccgtcgtggaattgcgtttgccagcgggctatggcggggttacgaacatctgtgactgacgccgtatgaccgcacgattcccggtgcccaccctctgattctcgatgaccatcctccggcgcttcgcgccacctcccgccagcgggaggaaccgtagaagccgtgggcaaggaactgcggcgtttcccgccagcgggagaggacatggttgctgcgttagtgctcggcataggcggtcacctcgtagcgttgacagtcgatttcgccatcgttccagtcgtaggacgggcggataccggctttggcgagcaggtgagcgacgaaatcgtgcggattgggcagctcatcccacacttgtggcaggaatgtggcgctgcggccacgacggtcggcgagaatcagaccgtctttgccggggcgtaatacttcctcaagttcagtgcgcgaacgtaccgggcgttcgacgttgctgccgtcccgtttgacggcgtcggtctgaggtccggattgcagcgatgccagagtcgcggtcttcgagccggtatcgcgcgaatcggcgtcacaggagttcacggtaatcggctcgggctcgcccaagacggatacctccacgttgagcaacgggtattccacggcggtgaccgggttgaaacgtgggtcacgggtggcggcgtccaccgcatgtgcagctatgtccttgccgagcgagcggtgggcggccagcgaaccgatgcacccgcgtagccggccaccctcggtcagggtaacgaaacaggcaccggactcgttcagccatgggtttgcggcaagaatggacgcggtcgaatcggcggctgttggatgttcaatatgcaaccgttcccggatagcggcacgggcgagtttcagcagcacatcaccatgggctgttcccgattcgcctaagtcatctgcaccggctggagcatctgcttctggtttggattcccacgcggcaaacgagacatatcccactaccggctcgtcggcgtctcgcattgcggggcgaggttggccggcaagcgccaccacgccgtcgtcgccggaagtggaacagccgagctcgaagagcttcatgtccttgcggccttttaacacatccagaaggccgttgatcgggtatgcgccacaggcccggcgagggtgaatcggcagatgcaaagccgcaatgtccgcaatggtctggtcatccaacgcgcgggcgacttcgtgcggatgatagtgcgagagatccgaactaatcacgatgacggtttccgggccaccccacaaagcacgcaacacatcacccgcctcttgtggcgtggcatcgcccgcgttcaacggcacaatagtgaggtctgggccgagcacggtttgcaggaacggaatctgcacttctaccgcatgttcttgtgcgtgggttgggccattgacgatcattgcgggagccgacgcgcccggacgggcatgtgtaccggagcgcaatggctcattgacagacaggcccagagccttacgctcggctgcaatgtctaccggcacagtgcccagcggcgtttcaaacgccgctgccgtggaacaggcgacgcctcgcacggccacacggtgagtcggtcccacgattaccgcgcgagtcacactcccccgccctcgttcgagcaaagcataggcaagcgcggccgccgtgccggaatacacataaccggcatgcggcacgattacagcctttggcactcccgctggaagcgtgggctccaactgttgcagaacctctcgactgtaatccaattgatggttaatgagttgcttgagcgttgtgcggtcagcggggtagaacgaaccagccaccgctgtcggacgtattgcgccagtgattttgccgctgccgtctgccgcgcttgctgcatctgacgcactagccacactaaccgtatcgatttgcacaccggcccgggcggcctcgcgaacctcattgtttccacgaaatatctcggatagcaccataactaccacctcttattccatggtagccgttcagttcctcaatgaagacaagttcgcagtgtcttcttcggcttcaaggggccgattccgcctcttggagacatctacttgcatttcgaggggctggtcatccgctcaatcgcacatagaaacggcttcataccaacgtcattccgccgtttttaagcgctgtctacttggacatcagccccttgaaacggaagtagatgtcccgaaaactcaaaatccgcccctcgaagtgcagaaacactcaaattagcggtcgttcgatatatcgaccgtcagaataacgcgtcctgggcgaagtcatcatcgggattgacaccgaattcgtccggctcggcgggtttgaacgcgcttgcaccttcatcggccaactggtcggaagccgaggccgaggcttcgcgcaggtcgccgtcgagcaccacggcatcgggcgagacgaggaacatgcgttcgttgacgccagccaaatacagtccgcccagcgattcgacgcgggacaacgccacatatcccatgcccggcgcgaaggtgcgcttcagatccatgaccgcacgatcaagcgtcatgccttgcgacttgtggatggtgatgccccacgcgcaacgcaacggcacctgcgagacggaggcgagcacggtgtcgccgtccatcatttcccatgtggcctgtttcatggtgacgatgttgccgttttcgaattccacgatcggccagccgcccttgttctcctgcgcgaagccgcgcacggtgccgagcgagccgttgacgtactggcgatcggtgtcgttgcgcagggccatgacagccgcgccttccttgagtaccagtcgctcgggggccaacatgttcttcttgagtcggtcgaccaggttggcagggcctgctgtctcggcgtggaactcgtgcggctcaagcatgatctggttcaggcgcatgtcgttgagattgtcggcctgccggttcaccgggaataggtggacggcgacctggccgggctcgggcagtttgcccagacgggtgacgagcacgtcacggtcggactgggtcacgtcgccttcgcgaatgtcggtgagcacggtcagcagttcgccggtgtcctgacggtgctgttcggtcagatagcagattaccgggttgagttcgggccataccagcgattcggtgatgaagccttcggggttcaagccggcacgggcataccgttcgcgactggcgatgaattcgggggtgggggcgatgaggtcgcggttgcgcccggacaccgaaaccggcggcagttggaagaagtcgccggacagcacgacctggatgcctccgaacgggcgtgggtcgcgacgcacttcgcggcagacttggtcgaccatgtcgaacagccatgcgtgcagcatggagacctcgtcgatgacgaggatgtccgtagcctgaatcttgcgtttgcgccgggatttgatgagtttgagcagactcgggctcagggcggtggccacgccgacgccgctccacgaatggatggtttggccgttgatatgcgtggaggcgatgcctgtggacgcggtgactgccacgctggcgccgtcggcccgagcctggcggatgaactcgttcaagacataggtcttaccggcaccgggcgcaccggtcagaaacacgttcgcgccggcgttcagaatggctagggcttcggtttggcgcatatcaacctctctagactcccctcagggaggggagccaagtacggcagactacttattgagaatgctggtggccacgatgtcggcggcgatggccttggaggcggcatcatccgggccggggacgggggccatgaaggccttacggtagtagcgcaactcgtccaaggactcgatgatgtcggcgagggcacggtggccgccgttcttcggcggacggttctcgtagacggccgggtaccagcggcgggcgagctccttcaaggtgctcacgtccacgctgcggtaatgcaggtggctcatgaggcccggcatgtagtggtcgaggaacttcttgtcggagccgatggtgttgccggccagcagcgggcgcacgccttccggcgtgaagcgcagcacgtattcggtgaccttctgctcggcctcggccaggctcaggccattctcccactcgttgatcaggccggaacgggtgtgcatctggcgcacgaaatcgttcatgtggttcacagccttctcggacggcttgatgacgtaatccacgccctcgtccagcacattcaggtcaaagtcggtgggaaccacagacacctcgacgagttcgtcgccgccgaagatgtcaagtccggtcatctcgcaatcgatccaaatcaggcgcgagtccttcgcgctgtacgtttccgcgtcatggctgtcgaccatggtgtgcctcttttcttcgctggtcatcgcttatgcagaacagttcagactataccccagcgcatacaagctatctcgagccacatacgcgaaaagggcctgcataagcagacccttttcacaaggaatcaacccctaactagcgcaagctagcgggcatcaaccgatcagttgttgtggaaaccggagtagttcggggcttcggcggtcatcacgatatcgtgcgggtgcgattcgcgcagaccggcgtcggtgatgcggatgaacttgccacgctccggcatctcggcgatgttgtgggcgccgatgtagaacatggactggtgcaggccaccgagcatctggtagagcacggcgttcagcgggccgcggtacggcacttcgccttccacgccttccggcacgaccttgtcgctggaggtcacgtcggcctggaagtagcggtccttggagtaggacttcttgccgcgcggggccatggcgccgagggagcccatgccacggtacagcttgtactgcttgccgtgcaggagcaccttctcgcccggggcttcctcacagccggcgagcgtgccgccgagcatcacggaggaggcgccggccacgagggccttggcgatgtcaccggagtagtggatgccaccgtcggcgatgcagggcacgccagcggcacggcaggcctgggcggcctcgtacacggcggtgagctgcgggacaccgacaccggcaacgatacgggtggtgcagatggagccggggccaataccgaccttgacggcgtccgcgccagcctcaatcatggcctgagcaccggagcgggtgccgacgttgccgccgatgatctgcacgccgtcgaaggcggagtcgtgcttcaggcgggaaatcatgtcgagtgccagacgagcctcaccgttggcggtgtcgaccacgagcacgtccacgccagcctccatcagagcggaggcacgctgccaggcgtcgccgaggaagccgacgccggcggccacgcgcagacgaccctgctcatccttggtggcgtccgggtactgctcggtcttgacgaagtccttgacggtgatcaggccggtcaggtggccttcctcgtcaacgagcggcagcttctcaaccttgtgctgagcgagtagacggtgagcgtcgtccttggagatgttggacgggccagtgaccaggttctccttggtcatgacatccttaaccttcagggtgtcgtaatcctcggaggcgatgaagcgcatatcacggttggtgatgatgccgacgagcttgttgtccttgtccacaaccggcagaccggagatgtggaacttgccgcacagcttgtcgaggtcggccagcgtgacctcggggttgacggtcagcgggtcggtgatcataccggactcggaacgcttgaccacatcgacctgagcggcctggtcgtcgatggacagattgcggtgcaacacaccgatgccaccgttacgagccatggcgatggccatctcggactcggtcacggtatccatggcagcggagaggaccggggccttcatcacgatcttgcgagtcagatgagtgctggtgtccacttcggagggaatgacatccgtctcgttcggcaacagcaacacatcgtcataggcaaggccgagcttggcgaaaatcgggggaaggggagcatacgccgactgggcgtttaattcatcaaggtttgtagccatgtaaacactatatgaaaatgcgctgaccttcacgacacacgcttgtgagcgctcacttatccgctgccgggtcctgcacctcacccacctgcgagtcccgcgaatttgcaggcgaatcagtcatcgaatccgctgcctgagagccaatcgaatcccggctctcccctactgcagactgcgatttaggcactgtatgctgcgcgtttttacgtgcggattcgaacgtcaggttctcggcttggatctcgggaatacgatgccgcagataggggtacatcgtggctatggtcagcaccaccacagcgatggccatgcccacggccacgtgctgcgctttgaagaacagaatcgtcagcgaaccgaatgcgatcaacgcggcccatccccacagaatcagcacggcgccacgcaccgaatgcccgatcttcagcatgcgatggtgcaggtgcatacggtccggatgcatgggcgactggcctttggccaaacgccgcacaatcgccagacacatgtcgagcacaggcaggaacaacaccagaaccggcagcagaatcggcatgaacaccggcagatagatgctggcatgaatcgaggccgggtcaagacgtccggtcatcacaatcgaagcgcaggtgatgagatagccaagcagcatcgaaccggaatcacccatgaacagtttggcgggatgccaattatgcagcaggaagcccacgcagatacccaccatcatcacgtcgatcagcgtggccaacgaagcataactcggggaagaccgggcgatgatatacgaataggcggcgaacgctatgccaccaatcgccacgataccggccgccagaccatcgaggccatcaacgaaattgaccgcgttgatcgaggcgacgatcaggaatgcggtgatcgccatggacagactcggcgaggcggtaatcagcgaaccacccaaaggcagtgagatgatctgcaatccgtcccaagccacgaatacggaaatcagcagctggccggcgagtttcagcatccaatcgagatcccacaggtcgtcggccatgcccagcagactgatcatgatgccgccggcaagaatcacccacatctggtaattgccgttgaacaatcccgagagaaaaggcagccgactggcgaatacggtagccacggcaaaaccgatcagcatgccaaggccgcccatgcgcggcgtgggaatggtgtgcacgtctcgggcacgcacctcgccaaccgcaccgatttcgatggcgacgtggcgaatcagcggagtcaccagccaggtgacgccaccggcgatggcggcaatcagtaggtagattctcatgcgccgagtcccccgccgttgaggtggagggccttgcgaatcacgttttgggcgatgacgccttcacgcaggatctcgatgccgtcgcgcgcgtacggatcggctttgacgacggtgctggagacatggccttgggtgggaccgccgtccagatacaggtcgacttcgttgccgaacgcgtcaaccgcctcctggacagtctgtgcgctttcgtcgccggaacggttggcgctggacgcggccagcggaccagtggccttgagaatcgcgaggcacagcgccgaattggggatgcggatgccctgcgtgccggggcgaccatcggcggtgtcggccaaagtctccaacgtgcagtcgggccgggctacggcaatcggcgagaacgcgccgggcaggaacgccgccgacaaacgattcagtggagacggcaggtcgagaccgagttcatcaagctggtcggtggatgcgagcagtacctgcaacgccttatagcgcgggcgacgcttgagccggtagatacggtcgatggcggccttattacgcggatcgcacgccactccatataccgtatccgttggaatgacgaccaatccaccatcccggatgacacgcgccgcttgtgccagcgattcatccgtgactttcagcgttgttccgccctccacgctcacgacacctccgttcgcctgtgtattcacaatctaccattgcaccattgcgccccgacttgcatagttcatcatcgctcgtttgccgtactgctgttttccgattcgccccatacgcacagaccgtagatacaatgagttcatccatgctctttcgcgaaattacaggagtgttcaatgagcggaatcaatgctgaatccaccaccatgcctcccgtcgaactgcgtatgccgcgcgccagcgagcgcgtgttcgccaacttcaacttcactgtgctggattgttgcccggtgacgattggcgagggttgcgtgatcggtgccggctcggtggtgacgcgcgatattccgccgcacaccgtggccgtgggcaatccggtccgtccgattcgcgaaatcacggacgcggacgcctccgccctgcagtattacgcgcagtagcagcggcggccccgcgcctgtggctacttctcggcgaagagatagcggtctcggccggtccaatctttgccggtggaggcggtggcgaaacctgtggccttggcataggccactaatcgctcgccttgggtgagatcatgctccataaccaatacgccgccgggcttgagcaggcgccaggcgcgctcaataatgcgttcagggatgagcgtgccgtctgccgaaccgccgtatagcgccagttccgggtcccagtcgcgtacttctggttgttcggggatgtcggtttgtggcacgtagggcgggttggtgatgacgatgtcgatggtgccgtcgagttgcgccagcgtggccagtgacgtggcgtcggcgacttccagttggtaattggaggcgatggaggggtatcgtttcgcggttaccgccagattgcgccgggtccattcggcggtacgcggggataattcgacggcccatacttggctgccgggcacttcgctgactatcgacaggccgatggcaccggaaccggcgcacaggtcgaccatgcgcgggtggatcatgctgtgccgggtcagccagtcaagaccggcctggactacggtttcggtttccgggcgcgggataaagacgccggggcccacctgcaggtcgaggtagcggaaaggcgtgtggccggtgatgtattggagcggctcgcgtttggcgcgtcgggaaagcatggcgtggaaggcggcaaggatattggtgacagggtcggcctgaccacccccagtcgctgcgcgacagcccccgccggcgggggccagcgaatcgagaccctcccccatcagcatggccttgtcgatatcgcgtagttcggcgtccacggcctcggccagcaacagtttggcatcatgttcgggcgtctcgatgccggcttcgcgcaactgcgcggcggcttgacgaatcaggtcggctatcactgctggttggccagacggtcggcttcgtcggcttggatgtcggaatcgatgacggcctgcaggtcgccgtcgagcacggcgtcaaggttgtaggccttgtaattcgtgcgatgatcgacgatacggttttccgggaagttgtacgtgcgaatacgttcggagcggtcaagcgaacgcacctgcgagtgacgcatgtcggcggcttcggcggcctcctgctcatgtttcatggccagcaggcgagacttcagcacacgcagcgcggcggcgcggttctggatctgcgacttctcatcctgcatgttcactgtgatgccggtgggcaggtgggtcatgcgcacggcggaatacgtggtgttcacggactggccgccggggccggagctcatgaagatgtcgattttcaggtctttcggatcgatctcgatctcgtcgtcatcctcgtcggcttcggggaacacgatgacgcccgcggcggaagtctggatacggccctgcgattcggtgacggggatgcgctgcacacggtgtacgccgccctcgtatttcatcgaagcccacacgccgtcttcgggagcgggcgtgcccttggcgcggatggcaatctgcacgtccttgacgccgccgagctcggtggtgttctcggactgcacgttcacgctccagccacgcttctcggcgtaacgggtgtacatgcgcagcaggtcgccggcgaacagtgcggcttcttcgccgccggtgccagccttgatttccatgatggtgtcgcgcgcatcatccgggtcacgcgggatcagcgcggtgcgcagcttctcctcggcgtcgggcagttcggcttcaagacgcttggcttcctcggcgaagtcggcgtcttcgccggccatctcctgagcggctgccagatcgtccttcacctgcaaccaggttttgtaggcgcccacgatggcacccagttcggcgtgacgacggcccagcttgcgcagcttgtccgggttggacacgacttcggggctcgccatctgttcttcgatggactggtactcctcaagcgcggttgccgccgccgggaactgttcgtctgccataacacactttctttcgtacggtggtgtctattcggttgtgcaggtcaaaaaaatgtcaaagaatacaaaaacgccagtcctcgatcgggtatgccggagcatgccgaatcgaatcggactggcgtgaagtatgctacttgctcttcttgccgtagcgcttctcgaagcgagcaacgcggccaccggtgtcaagaatcttctgcttgccggtgtagaacgggtggcactgagagcacacgtcaacgaacatgtgatcttccttgccagcggtgcgggtcacgaaggtgttgccgcacgagcacgtcacctcaacggggtggtaatcaggatggataccctgctgcattttacgtctcctatggattcgggggacccgggtcgtcatgcccctatggcaggacgtgaaccggaacctaagggattgtacgcgcctatctggacgtgaagacgcgctgtgccgccgcaggaggcgacgcaaaagagtggggccgcaggggcttgaaccctggaccgggcgattatgagtcgcatgctctaaccgactgagctacggccccacgttcgctgcgtaaaacagccaacttgcaaagtgtagcatgaacccaccaacgccggcacacgcgccatgcacccatgccatgcacccgccagcacaacaagcagcatctcccggcgctacttctcccccatgtaccccaacgggttctcgatgaaccgtcgcaagcccatttcggccgcgccatatagcgagggatgcagcgccaccggcggcacgaacacgcggatcttcacattcgggtatcccagaatttccgaacgcagccggccttcaagcacggtggccagctcgtcgccgaagtgcgtccacagtccgcccaacagcaccgtatcgacatccaccagattcacggcggaagcgatggcggaaaccagcgcatcagcggcctgatcgaccactttggccacgtctggatcccccgcacgccaacgctggaggaatgtatcgatggcctcgctgctggtggcatccccatcctcggcaatgccggcagcctcgaccaaagcgcgacggcccgcaaacgcctcaaggcacccgtggcgcccgcagctgcacaacggcccatccatcgccacggacagatggccgatctcgccggcgaatccgtgcgagcccatcaccacttcgccgtcacgcaccaccgcgccgccgatgccgatatcggtagacaggtaaataaaggaatccgtgcgatccaccacattcaggaaggacgcacgttcggtggcataccccggaatctgagcgatggcggccatcttcgcttcgttaccggccaccacatccagccggcgtgccacgttgaaccgggtgaggttgacgttttcccaacccagattgcgggccaccaacagccacatgtcgtcggtgacgatgcccggcagcgcaagcccggctcccaccactttgcagccacgtcgtttgagtcggctttccaacgggaaggtcatcgcatcgagcttggcgaagatctcgtacgggtcagtgccggtcatatcctcactcacccactcctgaccgagagtgtcgccgttcagatcgagtgccaggcaaccgtagccatcggtgttgatctgcaggccgatgccggcgatggacccgccatgaatctccagcggcgtgctgggccgcccatatgtggtggagacgaccggctcgccttcctgcaccacgccactatcgatcagcatcgaggccaacagcgaaagcgtggccttggtcaggcccgtttccttggccaagtcggccctgctcatgggtttctccgcgcgcaacaaagtgtcgagaaccaccgacaaattatggttgcgcagatcctcctgattgatcctgcgtagacttgccataggctcctacctccttgcacccctagtctcgaacgccgcacaggcgctcacatccgtctatcgcacaatgatattgtgcgtcaaacgattgaaccagatacgcaccctcgcgtgtttctgtttgcaatcatacactgcaatacagtatagtttaatcgtctaacttattggttgtggcgcgccgaaacttgcaagcgcgaccctcatcgaggaggaatgcatgacgagagtactggttgccggcgtagatacgtcaactcaatcaacaaaggtccgcattacggacgccgccaccggcgaacaggttcggttcgggcaggccaagcacccggatggcacctcggtcaacccggaattctggtgggaggccttcaccaaggccgccgagcaggccggcgggcttgacgatgtcgcggccctcgcggttggcggccagcagcatggcatggtcattctcgacaagcagggcaacgtgattcgcgatgcgatgctctggaatgacaccagttccgccccgcaggccgccgccctgatcgacaagctcggtgcaactccggccgagggcgacgaaccggacgacgtgaccgcccgcggcaagcagcgctgggtcaaggccgtcggatcctcccccgtcgcttcctacacgctgaccaaggtggcgtgggtggccgagaacgagcctgagaacgccaagaagattgccgccgtctgtctgccgcacgattggctgagctggcgtatcgccggctatggcccggtgaccgagggcgaggacgctcatctcgaagccctgttcaccgaccgttccgacgcttccggcaccatttactacgatgccgcgcatgacgagtaccgccgcgatctcatcgccatggtgctgacccccgccgagggcgaggaagccgccaaggcccacgccgacgccattgtgctgcccaccgtgctgggcccgcgtgaggcagccgccgtcaaggccgaccccgccattgccggcaaggacgttgaaggcggctgcatcatcggccccggcggcggagacaatgccatggcctcgctgggcctcggcatggccgtgggcgatgtgtccgtatcgctcggcacctccggcgtggccgcggccatcgctgaaaacccggtgtacgacctgaccggagcgatttctggctttgccgactgcaccggtcattatctgccgcttgcctgcaccatcaacggttcgcgcattctggacgccggtcgcgccgcccttggcgtggactacgacgagctggccgaactggcctttaaggccgagccgggtgccggcggcatcaccctggtgccgtacttcgacggcgagcgtacgccgaaccgtccggacgccaccgcctcgctgactggcctgaccctgcacaacaccaccaaggagaatctggctcgtgcgttcgtcgaaggcctgctgtgttcccagcgcgactgcctcgagctgattcgttcgctgggtgccgagatcaaccgcatcctgctcattggcggtggcgcgaagtccgtggccatccgcacgctggccccctcaatcctcggcatggacgtgacccgtccggccaccgacgaatatgtggccatcggcgccgcccgtcaggccgcctgggtgctgtccggcgaggccgaaccgctgacctggcaactcaccatcgagggcgtggagaccggcgagcccaccgaagccgtgtacgaggcatacgccaaggcgcgcggctgatacgctgccagcacaatccatgagataacaactgaataacgattcctgatgaatgccgccatggcaagcatcgcgaagagccgctgttataccgcgctcctcgctgaagcacacatggcggcatttttcgtttcccacgcaatccacaaatacggctataatcaagtcgtttgaacaagtctggagattcttctatgaacgaccgctcccgtatgatgctgtacgccctgaccgccgtcgcatgcgtgatttggatatggcaatccgccaaagaagcaatggccgatggcacgatgatcagcacctcaaacatcatctttttggtatgcatcggcattgccgccgtctactgcgccgccaacgcattgatattgtggtggcgtcaacccagcaaggaggatgcggagaacgatgacgccgcggatacgcctgacggtaccgataccgacaccgcagatgccaagggatccgaggacgacaccgatgacgatgtcgaaaccgacgtcgcaaccacggatgccgatgcatcaccaaccactaaccgccagtaaccatcgttatcgttcgcccgaatcaagcgaatcatcccacttcagcaaaggaacattatggaagtaacaaccgtgtcaaccgtgatcagcgtggtgctgggcgtcatatgcgcgccttgcggcctgtttctggggctcgttcccatgaaggccgatctggtgaccgccaagcagtcaaaggcctcgcagatggtgagcttcatcgttgccatagtgttcatcggcttgctggtcgcaggccatgatctggagacctgggccatggtaatcggtctggtcatcggcttcgccgttgccaagattcccgcgctgcatgcctgggctttgcacaagtggccgttcttcgagcccaagaaagcggctcccgctcccaagcgcgtcaagaaagccaagaagaagtaagctctggccttacctattcgctgaaagcgggatatcgacatcggtatcccgtttttcattggccgtacatatccgctgaggcacatcgccgaatcatattgtctacaccccaagtcagggctgatttcgcgaagaacgtacaccgggatccatccatcgcgacaaacggaaaagggacgctgcgtgcaacagcgtccctttcggaggaggaatggaactcaggtccatccccgtggccaccgggcgggcccggaggccaggtttagctcagcctttctttttcttggagagcaggtcgtaggcgacggcggcgatgacgacgaggcccttgatggtcttgacccaggcggcgtccacgcccatgatggacaggccctggttgagcacgcccatgatcagggcgccgaccatggcaccggggatggtgccgatg

SEQ ID NO: 52 - DNA, 14606 bp, Unknown
  R30_18m  MAG No. k141_23150
cgaacatgttcgcggaggggtgcgttgacggtgacgtattggcgacggtgaacatatcggcggcaggagaagataagctgttctcaggggaacatcagcacaacaaaggagttacgcatgcgagatttcattttccataacccggtgaagatctacttcggcaaagggcaggcgcgccatatcgcacaggaggtggagcgtgtcgagggcgccgttctggtggtgtatggcggcggatcgattaaacgcaacggtgcctatgacgatgtgatggctgcgctggcaggaaccgggcgcaaaatcatcgagctgcccggcgttacgccgaacccgcgattggacaaagcgctggaaggcgtacgactggtcaaggagcatggcgtcggcctgattctggccgttggcggtggctcggtaatcgactgcgcgaaatttatttcgttgggttccggcatcggtgacgatgaggatttgtgggatgactacatcgaaaccggcaaaccggcacctgaagggctgattccggttggcgtggtgctcaccaccgcggcaacgggctcggaaatgggagatgcggccgtgctcaccaattgggaacgtaaccgcaagctcggctatacgtcgttcccgctgatgcccaggttctccgtgctggatccaagctacctgatgacattgcccgccgaacagacggtgtatggcttcgaggacatgttctgccacacgtgtgagcagtatttctcctatccggtggacgacaacctttccgacgaaatcgccgagggaatccaacgtcatattctgcgttcgtggcgagcgtgcttgtccgatccgaaagattatgaggctcgctccaatgcaatgtgggattccacgttggctctgaaccgcattatctcgcgcggcaaggaagaggattgggtgacgcacggcatcgagcacgcgctgtccgcatacaccgatatcgctcacggtgctggtctggctgtggtccacccgcattggatggcatacgtgtatttggtcaacgatgaggtgacggctcgctttgcccgctgggcggtcgacgtgtggggtgtgacgcccaccggcaaaaccgatcgcacggtggccgaggaaggcattgatcgctatgtcgatttcctgcgtcgcgtaggtgcgccgctgactctttctgaggccggcgtgcccgacgatcccgcctctctcgacaagtacgccgatcatgccggtgaggccggcggctcattcgtgcagattcaccgtgacgatgcccgagcgattctcgaggcatgcaaggaaccggtgtcgttctgacggttggactaatcccgtgatttgagccgccgcgtgctgtcccgcaccaccaaagacgtagaaagaaccacgcgcttctgaatcttgcgtccttcattggtatcgatgaccatgcgggctgcagtggcggccatgtcttgcaatggctggcggaccgtggtcaacgccgggcccatgtacgcggcggtctgtatatcgtcgaatccgataacggacagatcttcggggatacggattttcagttgacgggccgcctcgtaaacgcccatggcctgtaggtcattgcctgcaaagatggcggtcgggcgactttgttcgtcttcaagtaacgccatggctccttcgtaaccgcctggcgtggtgaaatcgccttcggtgatgagttcgggagaggtggggatattgcgttcggcgagggccgccgaatagccgtcaagccgggcacgtgagcagagcatttcatccggtccggtgatgatgccgatgcgcttgtggccgagttccagcagatgacgggtggcgatgacgccgcccatccagttgtccgcctgtacggagagatcatctaatgccggattgccggaagggtcgaagacgacgaaaggaatgccgtgtgattggaacatgctgcgttccttgtccgtcaagttggagaacaccagaatagcgccaatgggctggcggtcgatgatgccttcaacccaggaagagtcggggtgctgccggtcgccactttccgcaaccatgacattgatgttgtgcggcttggcctccgtgatgatgcccctgagcacctccagcgcccaaatggtctcaaaatcccgaaataccacctcgatggtgcgttgtttacgggagggggagacgcggcgaatgtagccgttgtctttcagggctttgtcaatagcctgccgggctgcctccgaaatatccgccttgccgttcagggctttggacacagtggccagtgaatagccagtctgtttggcgatgtctgcaagtttgaccttgttctcgccgttgcttttgcgctgttctgccgacgccatcattgaccgccttcatcagagaatgttggtatcagtatattcgaaactttcgtaaagtcaatttgacgataaagaatggtatgtatagataaaaaaggttggaatttcaacgattttgatagtaaaaaagctgatataaatttcgtttgaccgtcaaactaaggctctttatgataaaggtatcgaaaacataaagcgagttttcggtaaagttgaagaaggctgatggggtaggtgaaacggcgaagtttcactgaaaacatcattaattaccagctgttagatatgtaactggctgatatacctttcgaaactttcgtaaatcgcggatcggtttcatgctggtcaagaacaataaggagacgacaatgaagttcaagtccgtggccgccgcacttctggcggcggtaacctgtgtcagcatggccgcttgcgggagcggcagcgacacgaacgccgatggcaaggtggaaatcaccatgtggcacaactccaccactggcgacggcaaggcatactgggaatccgccgccaaggcgttcgagaaggaaaacccgaacgttaccatcaagatcgaagccattcagaacgaggatatggacggcaagctgcagaccgctctgcaggacccgaattccgcccccgatatctttatggcgcgtggtggccagaagctacgtgatgtggtcgaagctgggcaagccatggacctgaccgacaagatctccgacaccgtcaagaaccagatggccactgctgaagccaccggcaccatcgatggcaagatctacagcgtgcagcagtcagtgcttcccggcggcatctggtattccaaggatctgttcgagaaggccggtattactgaaactccgaagacctgggatgagttcaagaccgtggtgcagaagctgaaggacgccggcatcacgccgattgccgtaggcggtaaggacgcctggccggccgcccactggtggtactggttcgcactgcgcgaatgctctgctgacaccttcgacaaggcccagtccgataaggacttcagcgataagtgctggacccgtaccggtgatgatgtgcaggcgctgctcgacctcgatgccttcaacgatggcttcctgaccactccggcccagcagggcgcaagctcctccgccggcctgctcgccaaccacatggcagctatggaactcatgggcggctgggagcccggcgtgatcaaggacctgactccggacaagaaggacatggccgacctcggctacttcgcattcccgaccatggacggtggcgaaggcgatccaactgccatcatgggtggttccgatggcatggccgtgggcgagtgggcgcctgaagaggctgtggacttcctcaacttcgtctccgagaaggaatggcaggagaagtacgctgaggcgttctccaccatcccggccaacaaggaagcccaggatgtggtgaccaacgaggctctgaagcaggtgctgaccgtctacaacgacgcatcctccgtgtccatgtggctcgacaccgtgttcggtcagaacatcggcaacgcactcaacgaaggcgtggtcaacatgatggccggtcaaggttccgcccaagacatcgtcaagggtgttgaaaccgctgcggccaagggctgattcgctctgacccgaccgtaattcccgggctgcgcgaatgcttgcacagcaacaaccgcggcccaatttgttttcttaggaaggcctcaacaatgtcagtttcagcaggcgcgagggtacagcgccgcacgtcgggcttaagcgacaaggctcgcaaacgtatcgaaatcaccatcctttcgcttcctgccctgatcatgttcctcggattcgtcatcctgccggtgttcatggccggctactacggattcttcaagtggaagggctatggcaagcccaccgtcaacggccagttcatcggttttgaaaactacaagatcattctgaccgacccgaacttccagcaggcattggggcacacgctattcgtggtcgtcgcttcgctcgtcatccaggggccgctggccatcctcttcgccctgctgctcaaccagagagtcaagggccgcgcactgattcgtaccctgattttcgtgccgtacgtcgtttccgaagtcatcgttggcaccggctggggcctcatcctccagaccacaggcgcattgaatgcgctactcaagaaaataggacttggcggggcggactggatctccgatccgaaaatcgccatctggacattgatgttcatcatttcgtggaagtacatcggcttcgccgtcatcctgatgattgccggcatgcagtcgattcccgaagacctctatgaagccgcgaaagtggatggtgctggattctggcgtcagcagtggagcatcaccctgccactgctcggccccaccattcgtatctgggcattcatgtcgattatcggttctctccagctgttcgacttggtctacatcatctggggtcagtacgtgtcgtctaccgcaggaacgtccaccatggcaacctacatggtgcgcgaaggtcgactcgccaacaactatggttacggttccgccgtggccgtggtgattttcatcatctcgctggtcattgccttgacctaccagcggttcgtgcttaaccgagatctcgaaggtgcgctcactgacgagagggatgccaagcgtcgtgccaagcgtgcggcgaaggaagcggccaagcttgccaaggtcaatggcaatgccgcagcagttgcaaatgaggtggtttcacaatgacgaccgcagtctccccgtccgtaggcaagggcaagaacaagacctatgatccgtatacactgagaaaatccgcaaagaccccgtggggcaacccggtcgtctacttcttctcactgctgcttgtggcgctgtgcgttggcccggtgctgtacatcattatcggcggcttccgcaccaattcgcagattacgagggacccggccggctggcccgatccatggaactttgagaattacaagacggtgttcacttcgaacatcttctggtcggaactcgtcaactccctgatcgtctccattggcacaatggtgggcgttgtggtgctggccttgatggtgagcttcgtcattgcccgatacgagttcaaattcaacaaactgctgtactcgctgtttgccgccggcatgatgttccccatcaccgtggccatcaccccgttgtatctgctgctgcgcaatctgcacctgatcaactcgcatctgggcattatcctgccccagatagcattcggcctgccacagtccatcatcatcctggtgccattcctcaagtccattcctaaggaactggaagaagcggcagagctggacggctgttctcgcatcggcttcttcggccgtatggtgctgccgttgagctggcccggcgtggccaccgtcggcatcctgagcttcgtgagcagctggaacgcctacatgctgccgctgttcctgctcaacgattccagcaagtacaccttgccgctcggcgtgcagatgttcagctcccagcattcggtcgataccgctcaggtactggccttcacctcgctgtcgatgatccccgcgctgatctgcttcaccattttccagaagaagatcgttggcggcctgaccggtgctgtcaagggctagtcgcagcaaccataaccgtgccgtggaaaggtacatggctctttgggccgattcctttcaacctcttcctttcctcctttccacggcccctttcttttcaatgaggagaagaccatgaagatctccaatcccgtactccccgggttcgatgcggacccctcgatgattcgcgtcggcgacacctactacatcgcaaattccacatttgactggtggccgggagtccgtttgcatgaatcccgcgacatggttcactggaatctgctgcccgggtccttaaaccgcgtttcccagctggatatgaagggcaatccctccggtggcggcatctgggcaccggacctgtcttatgcggacggcaaattctggcttatctacaccgacgtgaaaatcgtcaacggcgcgttcaaggattgcgcgaactatctggttaccgccgacgacattcgtggtccgtggagcgatccgattcgggtcaatggcgtcggattcgacgccagcctattccatgataccgatggacgcaagtatctggtgcagcaaacctgggacttccgtgaatatcatcatccgttcgacggcatcaccttgactgaattcgatgtcaaaaccatgcaattgaagccggaaacagctcgcaccatctggcgcggcaccgatgtgaaattggtcgaaggaccgcacctctacgccatcaatggctggtactacctgttttgtgcggaaggcggcacccaatacgagcatcaggagtccgtggcccgttcgcgtaccttgggtgagctttcattcgaaagcatgccgagcaatccgttcctctccaacttcgatacccccggcacctacctgcaaaaacaggggcatggggcgctcgtggatacgcctagcggcgaatggtattacgcttcgctgtgcggcaggccctggcggcacgagaacgagccggctcatggtgtgcgcggctggtgcacgctcggccgagagacttcgatccagaaggtcgagtgggatggcgacggttggccgtacgtggtcggcggccatgggggagagcgttacgtcgaagccccagccgacgccatcgcaaccgaggcccctacgaatcatagccagcatgacgagttcgaatcaaacaaactcgacctcaactggaacaccctgcgcgtaccattcaccgagaccatgggccgcgtgggcggcggctcgctgaccttgcgtggtcaagggtcgctggcaaacctgtttgaactgtcgctggtaggacgccgttggcaggcgttcgatttcaacgccgaaaccaaggtgacattcgatccaagcaactacatgcagatggccggcctgaccaacttctacaaccacctgtgctggtcatgggcattcatcacctgggacgagaagcgaggacagcgcgtaatcgaagtcgcccagaacgatttcgatacgtacacgtcgttcctcaaagacacagccatcgccattcctgatgacatcgaatccgtatggttgcgaaccaaagtgcgtacgcgtacctacacctacgagtattcgttcgatggcaagacatggcatgagattccggtgacgctggacgccgccgtgctctccgatgatcatgtggcccaacgttatggcggattctttaccggcgcgttcgtcgggttggtggccgtggacctttccggatacggcaaagaagccattttcagccatttcgattacatggaaatatgatgacgccaggcggctttcctgataatcagggaaagtcgcctgactattcggcactggggaatgaaaggcgacacttgtggcaagcgacaatgaacattgcggcgaccgtggccgcgaatgtaccataaccgtctccaacccggtgctgcgcggcatgtacccggacccgtcctggatatgggatacgacgcgcgaggaaatcgtgctggtcaactcctcgtttgaattggtgccggggttgcccattcatacgacccgtgatcttgtgacgtggacgcgcacggcgaatgcggtggatgaggcgatgtctcatcggctgctcattgatggcgtcgaggattccggcggcctgtacgcgccgaccattcgccgtatcggcgggcgatatgtgatcgtatgcaccgtggcccgcgtggatgaggtgaaggcgctcgctgcgggatgctcgcagaaggatattgataactgccgtgacgcccaaggcaatttcgtcatcgaggccgatgagttgaccggaccatggcgcggcccgtactgggtggccggggccgaaggcattgatccggacatctttgaagacggcgatggcacagtgtggtggacgcaagcgcgcctggcattacacccgcagtgggatggtcaaaccgagatctggacgcagcccatcgccccaggcacgtggacgttgcaagaccataaaaccgtgatttggcgcggctatggcatggatgcggtatgggctgaagggccgcatttgtaccgggtgggcgattacctctacctgatgaccgccgagggcggcaccagcttcgagcacagtgagatgataatgcgcacgcacgcaccgcgcggattcgcggcggcgctcgccggttttgagaagaaccttgctgcgcaagatatctggattgagccggcgcgtgacggtgaacgaagcgtggtgggccgcgatgaccggctgtttgaggcttgcaaacgcaatccgatcctcacacaccgtcatttgggagcgggggagccagtccaatgcgttgggcacgccgatctgctgctgcatccgaccgtcggctggctgctcgcgtgtcttggcgtacgcgagactccgggcgaggaacccggagaaacgttcagctactgtggccgggaaacgttcgtggcaccggtcgtatggcagcacaatccggtctcgtggaagctggacggtggggagccgaataagcgtatcgatatcgtcgatcccggttggcctgtcgtggctccggggcttggccggcttcccgagaagttggtcgtggacgttgacgaggatggattgccatgtgcagtgaggggtgtggactctgcgaggtgtgattgcgctgctggtgataatgccgcatgctctgctgagctcatccagctcgacgatacccgcctagtcggcgttcgaggccgtgacgattaccggttcctgcgcgtcgacgggcaggaatatgccgcgttcacccggcccgaatacacgatgatgatgcatcaggattccacccatgttgtcatggtcatggcggaagcggaatccggccaattgacggccgaaatcaccgataggggagataagcggtgcattgcgcttggagcgcttggggccaacgaatggttcggattgcgcttgcatggcaatcgtttggaattccttgccgggcagcctgcacctgacagtattgatgagggaacaatgcctgatattgcactaattgcgcatgcggacgttacttatgctcgtatcatggcagattgtgatgcgcgattcctcagtaccgaatgggccggcggattcgtgggttgtctgatcggcgtaaaacggcggtaatgatctcagtccgctctacaatattgtgcaatcatattgtttgatcgttaaacaaatgcaagggggcaatcgatggcgcacgatctcgaacaactcaagcaagatcacccggatgtggcgaaactgttcgccgatgactggttgcagtaccgtaagtcggagattttgccggaacttacgcgcgaggcgcagtccacgtgcgaccgcatcaatcgcatctactttgaagacaccgccgaagctgagcgactgttccgcaaactcgtgcccgaggccggcgagggcgtggacttccgcccgccaatccggcttgattacgggctaggcctgaaaatcggagaccgtacgttcatcaacatggacctgctgattgtgggcggcggcccgatctccatcggttccgattgcctgattggcccgcgcgtgagcatctatacgccaaaccacgccatcgcccgcaagcctcgactggaaggctggcagcacaacgccgacgtgaccatcggcaacaatgtgtggctgggcggcaatgcagtgatctgccccggcgtcaccatcggagacaactcgattatcggtgcgggcgcagtcgtcacccacgatattcccgccgattccatcgccgtgggcaatccctgccatgtgattgccgaagtcccggatgactggactcctgaagagcgggccgctgccgagggtcggtaggtttgctgctctgaccaactgttacggcgaaaccgggatacaggagagaaaggaacaatgcaatgacgcaatatcatgtttccgcgcaggcggcgaagacgaacggcgccggcagcgcggccgacccgtttctgaccatcggccaagcggcggccatcgcccgagccggcgatgaggtggttgtgcatgccggcacctatcgggaatctgtcgacccccgattcggcggcgagagcgccacgaaccgcatcgtctatcgtgcggccgcgggcgaaccgcgcccggtaatcaccggctccgaacgtatcgacacatggcagcccgaaggcgatggcgtgtggaaagccgtaatcctgaacgcattcttcaacggatacaacccgtacgtggaaaccgtattcggcgattggaccgtatacccggacccaaaggtcgaggtacgccacctgggcgatgtgtatctgaatggcaaatccttctacgaagtcgcctcgctggacaaggtgcgcaacccacagcgttgggataccggccgtgacgccgccaccgattccatcgtgccgctgattgatccggataccaccgtgaacgtgtggtgctgtgcggtcgatgatgaggccacaaccatttgggccaatttccatgaagccgacccgaatgcggaacttaccgaaatcaacgtgcgcgagacctgtttctacccgagccgcccgttcgtcaattacattacggtctccggctttgaaatggcgcaggcggcctgcccctacacgccgccgactgccgatcaggtcgggctggtgggcccgcattggtcccgcgggtggattatcgagaacaatcgcattcatgacgcaaaatgttcggcgatctcgctgggcaaggagatctccaccggcgacaacgaatcgacgcgcactcatcgcaagtccgggtaccaataccaaaaagaggccgtctacaaggcgctgcatgccggttgggagaaaggcgtagtcggcggacacgtggtgcgcggcaacgtaatctacgactgcggccagaatggtgtggttggtcatatgggctgcgccttctctctgattgaaggcaaccgcatataccacatcggcaccaaacgcgagttcttcggctgggaagtggccgccattaaaatgcacgcagccgtcgacgcggtggtgcgcggcaaccgggtgcatgattcggtgctgggcatgtggcttgattggcaggcgcagggcaccgtggtggattcgaacgtgttctaccgcaacacgcgagatgtgatgaccgaggtgacccacgggccgattacgtttatgaacaacgtgtttgcctctgagttcagtttcgacgactatgcgcaaggcgcggcgttcgtcaacaatctgttcgccggtcgcattcgtcacaccgccgtcttggaccgatccacgccataccatttcccgcacgtcaccgatgtggccggcgaggcattcgtctacggtggcgatgatcggtacatcaacaacctgttcttggctgtgggcgattccgccaaaccgttgcgtaccgcggatgccgccggtgcggccggtatggcggaagccggaaccgcgttctttgacggctatccgtgctcgcttgcggagtatgaacagctgattgaagaggccggccttggcgatgaggagttgtatcgcagcgtgaagcagccggtattgctggcttcgaacgcctatgtttcgggcgcgaaggccgcttccggcgaagccgaggctgtggtgagtgatgacggctcttcgttggcattgcgcgaaaccgatgatgagctatggatgaccatctcgttgcccgaatcgattcggtcggcgactggaccggtgatctccactgctgatcttggccagccgcgtattgtcgaggaatatttcgagaatcccgatggttcgccgattgttgtggaccgggatatcaccggtgctgcgcgcggtgcatgctcggcccgaggcccattggcagcgtatgacgatggggaagtgctcatctggtcgaagtgacgggattgcggtttcgactgttgcctctgcctcggcctttgtgtggcactgagtggggctgggctgccagtatttggcaggccggccccttttcgatttgcattggtaacaaatatgatatatggttaaatcattaaactaagtactgtaagtccatgcatacctacgcaacgtcaatggagatactgctatgcgcgcacatcatgttctgctgctgtcgctctgcctgttggccgcagcctacgccgtactgctattcgtttcaccagccgctgcgccgattggcgtcacgctaaccgctgttggtctggtgctggcctcgacgcgctatgcgtggcgcgccaaattcctggctctattcaacgaagcatgatttgatgaatcttcttcttcctctcttctccttttaagcccggacgctcgccgggctttttcttttggccgaggtcgaagtggggagggtgtgctatggccactttcgtgtcgggggtgccgtgctcccaacaatagccggtacatgcattcatgttcacttcagcagattgattgacatatcgggccgaaatgactggtatttttctgccgtccgccagcccgccgcttcggcgtgtcgatgaactttgagaaatttcatcgataagattggtgaaagcgcaaaaaaaggaaaacgctggaaaatacccgttgttaccgctcacatttagttaatcgaatgaatcaacagtgctgtaatccgtgcaatctctgggaaaagagcggtcgtctgattgttaaatcaaaaaactaatggtatatttttatgcaggttcggcaatggttgcctgaccaaaaggaagaggaaacaagttcctatcaatgtcgaaaggaatccccatgaataagtggaccaaggtgcttggtgtggttgccgcgaccgccatgttcatcccgctggccgcctgtggcggtagccgtggcacgaccaccgccggtggcgacggtggcggctccgacaccgtcaaggtcggtatttcgatgcctgagcagatgctcgagcgttggaagatcgatggcgagaacctgaagaagcagcttgaaggctacggctatgacgtcaccctgcagtacgcggatggtaagaccgatctgcagacctcccagattcagaacatggccaacaacggcatgaactacgtagtcatcgcatccatcgacggcactgcgaccggagctgctgccgagcaggtcgcctccaacggcggcaaggtcattgcctacgaccgtctgatcatgaacaccgacgccgttgactactacgccaccttctccttggaggatgtcggcaagatgcagggcgagtacatcgagcagaagctcggtctgaaggatggcaagaagggcccgttcaacgtcgaactcatggccggttccccgaccgataacaatgcaggctactacttcaagggcgcttgggacgtgctcggaccgtacttcaagtccggcgtgctgcagtccaagtccggcaaggttccttcctctgctgatgattggcagtccatcggtatcgataactgggatcgtcagaaggcccagaacgagatggagaaccgcatcaactccttctacaacgatggcaccaagcttgacgccgtgctcgcccagaacgacgccgaggcaaccggtacctacaacaccgtagaggccgctggctgggactactacccgatcatcaccggtcaggacgccgagaaggccaacgtgcaggccatcgtgcagggcaagcagtccatgaccgtctacaaggacacccgcgagctggccaaggccaccgccgaaatgatcaaggacatggtcgatggcaaggatccgaaggctcctgacaccttcaacaacggcactaaggatgttccgtcccagctgctgaccccggtcaccgtggacaaggacaacctcaaggaaatcctcgtcgacggcggctacatctccgccaaggatgctggcctgtgatccgcaggatcgctgattcgattcatccaacggcctaacggctaacagataagggggcgccgcgctgcgtggttgcggtacggcgcctccatccatgcacaggggcattactatcggaggaggtagctgtggctacgaacggtgacgtgattttggagatgcgtcatatcgtgaagcgtttcggcccggtcaccgcgttgaacgatgtgaatatcatggtcaagaggggccaga

SEQ ID NO: 53 - DNA, 17546 bp, Unknown
  R30_18m  MAG No. k141_25999
aatagtgtgcgtgctgtgcgatgctccgaacgagcatcttgatgttctgcacgaagcatgaggttcctgccccaacgatccggcatgcagtcttgaaagatgcgatgcatcgcattatgctcggccgggaacgttccgggggagaggggcatctctggacagagggatactgcgtttgaagagcgcatataggccgtatcgtatgtgaaatttgccgattcgatgctgcgcttgatattggtgaataatttcccgacggtgacgtctgtgccgttgagctgcagggtgacgattgcttccatgatgtgttgcgcctcctgctgtgctatcgaatacgtttcggagtgtcttcgtcggcgcgtagtttgccgatatctgtgttaagagggtccgtcgcttgctgtacgccgcccagcagtccaagcagacgagcaatgcggaggaagttctcaaagctgccattacccgtacgcagcattttggtgaccgttggcacggataatccagcccgctcggccagcaaggctacgggaatgcgctgttgtctgcgcgccaaatcgaggttggcggatatctgacgcatcgcccgactgaccgggattggtgtgcgtgtcggcatattggcacctcctatcccaaattttaacataaataattctttagcttatagttacatagctaaagaattatttatgtaaatttgtatggactagccttatgcggaggttacgccaatatacgacaagaacgaaccaacgtcagcccggaatcttctcgatgatggtgttcaaggtgtcgaaagcctcatcgatttggtccactacctgcttgccctggttgaccatttcggtgatctgttctgtgtggggttgcggcagcgcataaatcgacgtcttgacgcgcttcaagaccacgccggcgtcggacagatcctgcttgatggaggcgattttgggaatggacagcgtgccgtcggagaagttcatgccggacagcagctcttcgatattgaagtccaccaacgtgccctgcgcggcactgtcgattttgggcagggcgttggtcgcggcgtcggcggccgcatccagcatgccgcgcaccgccttcacgtccgaaccgtaatacggcacgtattcggcggcctgccatggcatgccctgggtttcgtcgtgcgccgtgacgatgtgactgccagcgctgtccatctgctcaagcgcctgcttgaagtcgccctgcccgacggattgctgtgcttcagccgcatattcgcccgcctgctgcgcctcgccgatcacccgttgtaccgactgccagaatagccagccggaaacgcccaccgtcagcagaatagcgaccagtattgcaataacaacagtgccgatatgtttgcgcttagccataggaccaatgtacctgccactctgaccagtattatttacggattagcatcgtggcctgggcctcattctggctcatcggtatgttattggcgatgcgtagcggtggttatgcaagtgtcttttgattgatatcggcgcatgacaggtgaataacgtgtagcgggaaagcacgtctatggtcatattggcgttctcggcacagcaataaccgcggtattttttaaggtttgccaattcttccatctggtatgtgccgaacatggtgctgtcatgcgattgcttgacggcatattgcctggcttgaacgatacatcccattatcgcttgcggttgacgttgcgtaaacgtctatcctgacggcaacgccgcgaaacacgcacggcgggtagaggataatcggcttcaagggggatgatcgatcatgaacgagaacgacaacacggcgaacgccgtcaacggttccggcgcgttcgatgtggagggcaatccgctggatacgggccggttgtggcccattgatcaggcggcattgatcagcggcgtgacgacgcgcacgttgcgctactgcgacgagaccggtctggtcaagaccgcccgcacccgggcggcacagaatcaaaccgcgaccgtgatgaacgccatgccgctgtccggctcgttcggggccattcgctccgcgctggtcggcgatccgcgtttcgccgacccgtgtggtgaggcgctctacggcagcaaggcatgcgccgacttcgtcaacgaagccaagaacatccacgcacggcaaatcgccgaacggttcgcggcggaacaggatgtacggaatcagccgaaatgacagggcgtccggctccgattgcgcgacgaaccctgcgaccacgtcaccggcttaatcatccaagctgcgcgaagcggcgcaaaagatgatgagtcggcataagcggcgtagggttcagtctgcgtgttttgcacagtgagttacaggtcctgaacgttcatacgggccagctcggcgcgacgattgatcttgtcacgctgatacaagtagatgccggccagcacgatggtggatacgttgttggacaggaacgcgatgaatgcggaaagcacgacgttccacatgttgccatacgcaccgatgtccgccctggcgaagacggtaatcgccgccacaagcgacagcagcaatgtgatggcgggcaataccagaccgggccacttgctgtccatcttcgaaagcctgatctgcaatatgatgaagccgatgcagatggcgatgagaaacacgaaaaacactacggcaaatattgtggcgccaatcatgattactctccttgcttgagctgcttgcgatattcgctgatgaggattttggcggtgtcgaagtcgagcttgtcgtcgaccgcgagccgtttgatgagcgcgatatacggctcgttctcgatctgctcgcccaacttgattttctggatgagccggtcgagccgaagccgaacggtggggtaggagacgtcgtactgcgcggcgacctccttcatggagcctgatgcgagcagaaaccgtttgatgaacgtcatatcctcgtcatcgaggttcgacatccacggcgggatcatcgtcgtatccatacctgcctccttcaattcacggcgggtttaataaaattaagtataccataaataatattaaaatcaaatagatatctgtttaaagtttttcgtagattagtttgaggtcgtgatgtaagaatgcgtacgcggacgcgaaggaccggcacatgtcggcacgcatgtagaagcatcggtcaatcggatatgcatcgacagcaccctaaggcattgacggatagccgattcctgtcatgcgatcgcttgacagcatgttgtctgattgactctttgagtgccataattgagatggcatgcgtacgcgtcggactttatggaatgcggggacgatatggttgcggacgatgaggtgcgggcctcccatggtgggcgtcggaatcaaggtctgctgtggtttttcggcgcttccgccacattgggcgtggccgccgtcacggccatcacgtgcgccgtcatccggtacggctggaatgacggggagttctggaagctggtggtgccggcggccgtggcgttggtggcggccatcgtgtgggcggcgctcggcttcatgcgtcgcgccgggcggacgcctgacgttccggccgacgcgaacgataccagcccggccgaatccaggttcgattcggcggccgcccagattctggcgatcgtcgccatcaacgtgtggggcgtcatgttcatcgtcttcgatacgttccagattgacccgtggcggtacgtgacatgggtcgtgcccgtgatgttcctgctttatctggcggtcttgggcatcggcagggcttgtttccgcaaacgacagaaggatattcgcttcccggaggaaccaagtatgacgagcagccgtccatcatacttggcataggcgggcagttggacgatgccgggcaggtcctcgttgtcgctggtctggttgagggcatattgggtgccggtcatggaacgctactggaatctgtcaccctagggtgtcactttccgtgtttacctcgacctgccatgcccctggcgcgaaggttgagaaaaacggcgtcaactttcacgacagggggctacctcatgacttggcaaaatgccggcacaccgattcaggcgctcggactggtgaaacggacagggttcgatgctcgaaccgcctcccgacccgcaaacacgcagactgttctcaataatgtttcgttggatattgatggagcgggcttgacggcgatcgtcggtccgtccggcgcaggcaagacctcgctgctgtatgtgctgtccggattggacaggcccgattccgggcgggtgaccatcggcggtaccgacgtctacgcactgaatgaggaacggcgttcgcggttcattcgcgggcatatcggtttcgtgttccagcaatacaatctcgtgccgtatctgacggtcgaggagaacgtgatgttgccgctctcgctcgcccatcgcaaggccgactacgtgcaggtcacgcagctgctgtcccggttcggtcttcgccagagggcgaagacgacggtaagcgccctgtccggtggcgaacagcagcgcgtcgccctgtgccgtgcgctgctcatgcgtccggcggtggtgttcgccgacgagccgaccggcgcgctcgacaccgcgaacagcgagcttgtgctgcaggtgctgcgcgagctggcggatgcgggctccagcgtggtcatggtcacgcatgacacggatgccgccgctttggccgaccacgtgatcttcctgcgcgacggtcaggtcacccacatcgctggcagactcaccgccgagcagattgccgatggcatacgccgcactttcgtaccggccgggtcgccgccgttggttgcggcggcgcggtctgtcggcccgatgatggtgaacgcccagcctatccaatccgtccaaccgggccgaccggtccagcgcgtggcgtatccgcagcagcggaaggaggctcatcgtggctaggtatgtgctgcgtgtgttccgcgacaatgtcacgggatgggtacccacgattctggtggtcgcagtggtgaccacgctggtgggcatatgcatgaaccaattcgtgtggacctcgtctccgtcgttcacattggccgcgcggcaggcgggtcttgatccggccgagttcggcatggtgtcggtcacgatctatgtggtggtgtcattactcgcgttcttctcgttgacggtggtcggctcggccacggtcaaccgtattcacagcacgttcgcgcaatggcggcttatgggcgccagcccgagtcaggtgcttgccagcatgtggatgctcgtgggtgtggcgagcctgttcggttccctgatcggctctctggctgcagtgccggccagcctgctggcggttcccgagttcaacgccatggctgcggaaagcttcgccgatggattcggctcgttcgcacctcctgcgttcacgccgtcgatggccgcgtggctcggatccctgctgttgggtgtggccacgtgcatgttgggcgcgtccatcccctcgctgcgcgcagcgaagatccgtcccatcgaggtgattcgcggcacgggagccatcgggatacggcacggttggcggtcttgggcgcactgggcacttggtttgattgtcatggcggcggcgctggcattggcgttctccggcatgggcacgccacgggcgctcgcgttcggccaggaggcggggcagacattcaacagcgcgctgtgggccggcatcatcgcctcgttcggcatgtacatccttgtcagcatgctgattccgattctgttgggcatcggacgtgtcgtgtgtcgcctgtgcgggtccgcgaccggcgtgctcgccgcccgttccgccgaggcgaaggccgccagcaacacgaacacgattgccccgctcgcccttgccatgggactgtcggtcaccctgctgacctgcgcgcgatcctatggccggatactcgccttgggcggccatccgaagagcctgaactacgcggactcgctgctgctcataacgatgctgtgcatcgtgtccctggccaccagcatggcggtcatcgccctgtcgaaccgcagcatggtcgccgaccaggcattgctgcgcagcatcggcctgtccccacgtcgtgtgatccgcatgtatctctggcagagcctgcagctggccgccggcgcggtcattctctcgctcatcccggtcgccgtcagcgcaagcgttttcgccgcaagatccgcggcgctcgtcggcatccccgtggccgaaatcccatggccgggcgtaatcggcatgggcacggcctgctggctggcattgttcctcatccagttcacgcagattcgccccgcgctacaccgcagcgtggccgacacgatacgcacatgctgacatgcacgcaacatcatacaaaaagagccacaatgggagccatgaaaccgcaatccgcgcaggccaataaggtcacggtcctggccgtgccactggtcatcgccgtggtcgaatgtgcagcgatgctgtgggagcatgcgatcggagcgccggccgacaccatgtatacgtttgccaaagatccgctgggattggctctgctgctggcgatgaccatagccagcagtgcgatactgcttgtccgttactggctgccagccgttgccttggcgcttgaagcggtattgttaatagttgcctcgtactggcggttggactcaatcgtgatgattcagacgctcgtcgcctgctatgcgttcgcccggacagcgagggggcgcgggctgtgcgttggaggcatcggcatgatgctgtcgatgaccgcgtcggccatcatggtgcatccggacgttctcgcgaccgaatgggtgagtcgagtggtaacgttggcagccgtgggaggcggcgcgcttgcagtacgtggcaggcaacaggccaaggaagccgaacacaaagctgccgaggaatgccgtcgggcagccgagctggccttccaacgcgatgccgcaatacgccgttcgcgcatagccggtcaactacacgacagtgtgggccaggatctgaccgtaatcatcgcactgtctgagggtctggccggcaaaaccgatgacccacgcgtggaggatgcgctgcacggcatcaacgaaatcgcacgagagagtctgggcgacacgcgcaaagccgtccgcgcactgaccgagttcgatggagcggcgaacggtgacgatacgcacacccaagaatcagaccagcattcatgggatgacattcggccgattctcgcgcacgcacgccggctgggcatcgtcacggtgttcaccgagactggtacgcgcgccgatgacgaagctcaggctgatttgtgtttcgatgtgactcgcgaagccatcaccaacgccatacgtcacggacagaacgtggtgcatatcagcatcgcctggaaccacagcgagaacggcaccgtcgccgtgattatccgcaatgacggcagtcccgcgcgcaaggacgcgcgcaaggatgacggtactgggctcgtccgtctattccaccgcgtcgaatcggcaagcggcatcttcgaatacggtccaaacgaagacggcgaatgggtcgtcgaggcgaccatcccgtccaacggagtgaacgaaaaggaccacaccgcatgattcgtataatgctcgtagacgaccagcgtttcgcgcgacttggcttccaactcatgcttgacgatgcttccgacatcgtcgtcactgcccagtccgctgacggccgatccgccatcgagacgctcgaacagctcgccgttcagcatcgtccattgccgaatgtaatcctcatggatgtgcggatgcccggtatggacggcatcgaagccactcgccgcatcaccagacgctggcccaccatcagcattctcatccttaccacgtacgacgaggacgattacgcctttggcggtctcgacgccggagccagcggcttcctgctcaaggacgtcaccaagcacaacctcatcgacgcggttcacgccatcgccaacggtgacgcaatactcaccccacgaatcaccagacaagtgcttgaacgaggcgttccgcatcccaccagcagccagcgccagcaagaaatgcgcaaagctttcgacgcactcacccctcgccagcgtgaaatctgcgcactcatctccgaagggctcatcaacgaggaaatcgccaatcaactcaccgtcgaacctgcctccgtcaaacgtgccgtgacccgtatcctcgcaactttgggcctgcgcaatcgcactcaaatcgccatcggctggttcaaagcaggcatgtagacctgctatttgctcagcagctcattcaagcggattgttgttacgaatgcgactaccgcacgccccccccaagacggattccatgttcgacaccccattcggcaaggtgggcttggcggattttagtggtggttgcaacacctgtgtgttttgccgctcttgatggcggtcttggattggtgcgatcgtatcatgctgtgttgatgagttcgagtattttctcggatggtttcctgtagccgagtgttttgcggggccggtcgttgagttcctcggcgaccgcgtcgaggtagtcctcggggtatgcgctcaggtcggtgcccttggggaagtattggcgcaggagcccgttggtgttctcgttggtgccacgctgccagggtgaatgcgggtcgcggaaatacacctgcatgtccagcgtggtcgagatgcgtttgtgcagggtgagctcgcttccctggtcccaggtcagcgagttcctcaggagcttgggcaggtattgcattttccggatgacggcctgccggacgtgtttggcgtcgtgcccgtcgggcaggtgcaggaggatcgtgaaccgtgtcgagcgttccacgagcgtgccgatcgcgcttttgttggccgcgctgcagatcaggtcgccttcccaatgaccgggtatcgcccggtcctcgacttcggcgggccgctcgctgatcatgatcatgggctcgcggaaacgggcctgcgcgaacccgcctgcccgtgcggccggcgttgggcgcgcccgctcctcagggccttgatgacgtcctttttcagttcgcctttggcctggacgtagatggcctggtagatcgtctccgcgcacacatgcatagcatcattatccgggaaatcggcgcgcaggcgccccgcgatctgctcgggactccaatgcgcccgcaatcctgcacgaatgtatgcgagcaggccgggcaccgtatggatcttcgcgggcttgggtcgtctgggccgtccgcgctcatctgctggggccggtacggctcgtacatgccggtcgcgggattcgtgttgcgcaccagctcgcggctggcggtcgacgcgagacgattgagcgtgcgcgcgatcccgcgcacgctcatgccggccttccgccagtcggcgatgctgatgcgctcgtcctggctcagatacctcgaactgatcttttggggaatgtccacggtggaacgataccagtccaccgatggcttctcgttcctgccgttcgatcgtgtccttccgttgcgccacaccttgccggtgcgtttggacacgcccaccgcccgcgcggcctgcgtgaagttcatgcccgcctccagcagctcggcgtagcggcgccgccgcgccgcgcacatctcgccacgcgtcgcgtactccacgccctcgaacacccacctgtccacctggccctcccatcagtcagccaggcgttgcgacgatcactggaacccgcccttcgccatttttttttggggggggggaagagagagaccggtggcggcaagtgtgcgatgggagtcggatgcatcgtccttgcggatgatgcgcaggttcattcctttggccgatggatagtttcggcgaatcgagggagcatggagctatcgtcatgcgattggcctgacatgttgttgcgtttgcggccgctgaagggtgaaatagcggcgacattgcaacgcgcgggtctgggcaaggcatcctgcctttgccttcaggcccgcctttcgtgaagggtgattatgccagttatatcggctacgaatctctcgatcgggtacaagggttccccaatcgtcagcaacattaacctgcggttgagcacgggtaggattatctgtctgcttggggcaaacggcgcgggcaaaaccacgttgatgaagacgctactcggacggataaagcccgtgagcggagaggtcacgtacacagggacgaatatcaatgagatgtccgcggcgatagaccatcccagtttctttccttacctgagtggtagagagaacgtcgaggtggtctccgcgttctggggtctggatgtggacccggaggcggcgttggacggtgtgggcatcaatcgcgcggtgtatgggcggaaggcgaaggactactcgacgggcatgaaagagcgtctggagctgtgcctcgcccttgtgccgcatccgaggttcctgttcctcgacgagccgcagaacggtctggaccccgatggcatagcctccttgtccgaaacgcttcgcgcctaccgggacaaggggaactgcgtcgtcatctccacgcatctgcttcatgagatccagggcgtcccggacgagtgcatcatgattcgtcacggccgggccgtgcaggtcacggatctgaccggggtgaacctcgcggatctgtatcaggggaggtagggtcttgaacgccgtttcccctgttcgcgcgttggtcgcctactactggaacacgtggtatttcctcgccgcggtgtttggggccgtctcgtcccttctgctgggtgcgtggatctcaagcgcggcgaacggaaccccgataaccggagggtattgcgtctatttcaccgccacccagccgttgatctgtctttcgctgctcttcgcatgcgatgccagggtcgcgaaggcgcactacggtggcctgccgcgccacgtgtattccgcgtggacgccatgctcgctcagggccgtgttccgggccctgatcctgacctccgtgaacctgattggcgtactgtgcttcgacgccatcatggtcctgacgggtaccggaatgcacccgcatctggcagctgtcctgtgcttcgtcgtgctgcagagccttgcgacctccctgatctactcgatcgtcgagatcgccgccgatcccagaaccgccggaatcgtctcggccatcctttgctatgcatggattctcctgccgggcgaccttcccgactatgcgacgccctacgtcgcgaacgccctacggaccgtcgggctgaacctgaacggcaccgtgatgtcgccggcggaagcgacgagtcgagcgtccgtcggccccgtgatggtcgtcgtcccgatcgtggtgcttttggttgcctatgtgctgttgagccggttccgtcgcgaaggagtggagaggaaatgaagtccctattgcgtattgagcgtgtggcggtgatccgctggtcgacgctcgccttcgtggccgtgctgctgtttccgttgttctttttgcgttacgggaacacgggtgcggtggtgcagtcggcgatggtgatggcgcttcccgtaaccgcggccggtctcgtcttctcccatgcgagggtgccctcctcgtaccgttccttcagcatccacgaccggctcctgcttcgcttcagcgtgaagtcgctgtcgctcggcgtcgtgatcaacgtctgcctgactttgctgtacgggcttgccgtcgggctcgtcgtcaacgagccgctttcgtcgcgtaccattctgatgcttgcgttcaccgccgtcgtcctttccctggcatgcttcgttctgcgactctatgccagtcctctcgtcgcctggaacgtcgtcgccttcttcatcgtcgccggacttacggtgagttccggcatgttcgaggacgcgccgatgctgtacgccgtcataccaaccacatgggtgttgaacggggtgaaattcgccggttacgtgattccggtcggcgtcgccatcgccgcgataagcgcatgtctgctgttcaaggcggtgaaacgtgtctgaccgaagccgtatacgggtgcactgtttcggatcgtaatcgtccggcagccagctttctcaccgtattccgttgcgggagtgagcctgccgctttccgctgatcccgccatacaaagtcgactccgcacgtcgcgagtcttcgccgaacactatcattggtggcgcagaggtcgtgtgggaatggccgtgacaggggaggggtattgggcaagcttcgggcgccgcgttcggcgcgtggccgtgtgatggcggcggccggcatggtgatggtggggtcgttgggtatccagacgtcgtcgtccctgtcggcgtcgttgttcggcgcgttgggaccaattccggtcagttcgatgcgcatgctggtcgccgcgatcgtcattctcgcactcacccgcccgaaactggctggccggtcgaaaggcgaatggctgggcatcgtaatctacgggcttgcgatggcggcgatgaacgtctgcctgtactcggccatcgaccgcattccgatgggcgtggccgtcaccctggaattcctcggaccctgcgtggtcgccctggccggttcgcatcactggcgcgagggcctgtgcgcggtggtcgcgctggtgggtgtgggcttgatctcgtttacgccgggcggctacttcaatccggccggctacctgttcgcgctgggctcggccgtgtgcttcggcctgtacacgctcttcgccgaccgggtcggcaaggcaggcaccgggctcgacgggctcgccctgtcggtcacggttgcggcgctggccacttcgccggtatccatcactcgcgcgccgcatgtgtcggccgcccagtggggcgtcatcgcagcctcggcggtgctgggagttgcgattccctacacgatggacacgttgtccgggcgtatcacgtcggcgcgcgtggtcggcacgctgttctccatcgaccccgccatgagcgtgattatcgccgcgctgatattgcgacagaccatcaccgcggtggccgtgatcggcgtcatcgtcgtctccctcgcgggtgccctgctggtgtggtcatccggcggcgatgccgtaaacggatgattcttgtcatacgattgcttgacagcatgttgtgaatgcttgagccccgctcataccattcaaatataatggtttttcgcatgattcgttagcgttgacggatcccccaataaggaggtaatcatgtcagatcctcgcgttgaaggcggaagattgtcggtcgcgcccgaggccgtatatacgggtgctctggtgatgttcttcagcaatctcgctatgccggacaccgatccgcagggcaggcccatagtgctgtggttcaacggtatcatcgccgtctgcgccctgatctggggattggcggagacgatgcgcgtccgtaaggaatacccgtggcggtgggcgcgcacgctgttctacgacgtcctgattctcgtcgggctgctcatccgtaattccgattggacccggctcgtcgtgctggtcgcactggtgctatacgcgattgttacggagaaaacggcggcggaaccgcgccggtcctgactgcaagacgatgatgaaccgtcagcgtcacaggattctcgcggtatgcgcacggtggtcgacatcgacacggccgccggcagcgggcgcatgattatttcacgtcgcagacggtgaaggcgaagctggtgagggtgccggtggatttgccgtcggcgaggagctgattgatgtcgggcaggtccttgttgtcgctggtctggttgagggcgtattgggtgccgtcgggcgcggtgaagcgcatgacgggatcgcctttgctgttgtgcgtgcagctgacggtgccgtggtcgacggtgaggggccatgtgtggccgagctggtcggcgctgatgtcctgtgggttgctggtcgcggtgattttcttgctgccgttggtagggtagttttcggggtgttcgatgccgtccatgcaggcggtcagtcccagggccatgatggcggcgaggccggtggcggtgatggtttggatggcgtgtgtcgtgttggtcatgctggtttcctttgtcgtgttcggtggtggtcggggtgcttgttcgtctgccgtcaatgctggtcggggtgttcctcgatgaggaccatgtagccgtcctccaatgtggggtccatgggatgcgcgtcggcgggcggggtgtcggtgatgacgcggtagcgtacgccgcgtgcggtggtgacggcgttggcgacgatcatgccggccggtggcggggtgttggatggctgggtgagccagacacggcccgtggcgtgttcggtgaggtgttcggtcggcccgtcgtagcggatgcggccttggcgcaggacgaacacgtatgggcaagtctgggcgatgtcgtcgaggatgtgggtggacaggatcacggtgcggtcgccgccgaggccggcgagcagcgtgcggaaacgcatgcgttcctcggggtcgagtccggcggtgggttcgtccacgatgatgagccggggatccgccatgagggcctgggcgatgccgacgcggcggcgcatgcctccggagaagccgccgatgcgccggtcggccacgtccgtgagcccgacccgttcgatgagctcgtgcgcctggcgcatgcgctttcgcgtgtcgtcgatgcctttgaggacgcccacgtagtcgaggaattcgagcggggtgagctgcgggtagggttcgatgtcctgcggcaggtagccgagcgtgcgtttgagcgcacggcgggtcctctcgtccttcagatcgtggccgtccatgagtacctggcccgatgtggggcggatgatgccggcgaggatgcgcatgagcgtggtcttgcctgcgccgttcggcccgatcagaccgaccatgccgtgcggcaggtcgcaggtcacgtcgtccagcgcgcggggcttcctcaggaagtccttggtcaggtggttgatggagatgaacatgacgtcttctttccgtgtgatgttttttcggtgggggttccgccggtgccgttcagcgcgttgtgcgcgggtgtgccgagcaccatccacccaacgccatgagcagcatggcgacggcgagctgcgcgatcagggatatggccgcattggcgggcgtgccggtgaccgcgaggatgcctcccgtggccgggtagacggggccgagcccgaaccatccggcgccgacggcgtcgccgatcacgttgaggatggtgccgttgacggtcggcacgggcagcatcggcgaggagaacacgagcgcgaaccatgcgagcacgccggtgatgcgcgcgacgatcatgggcaggatcgcgccgagcagcgaggacaggctcatcgcggtcagcacggccggcccggtgatcgcgagtccggcggccaatgcctgtggtatggcccgccacgagccgtgcagggtctggactacgccggcgcactccagcagcaggagcgacggggtgatgaggatcagaaacgcgccgagcgtgcgagccgcggccagcatgggcgcggggatgggcgtggaatcctccaattgaccaatgccaagtcgggagtgccgcgtgtggaagtcggtgaacgcggccatgtaggcgatcggcatgaacatggccatcgccttggccatgaacgccaaatcgcccgcaccgtggtcatgcggtcctgccggggagatcacgcccagcagaaccgcgagcaaggccagcgggacagccgcgacccataatgaacgttgccgccacacgatgatcatgtggacgcgggtcagatgccggaaaccggtgcaaggactcatatgcttctccttgcgagcgtcacgttgcgttcctcgtcgcccagcagacgccacgcgaacactacggcgatcatggagacggcgattgggatgccgcgttgcgtgaccggatcgagcacgtacgggtcccacagcagggcgaggaacatccatacggcgaccaccgccatgaccgtggcctgtgcggacgcggaccatgcggcggccgcgaacccggccaggcccacgaccagtatcgcgccggccggcgcgatcagacttatccatcccatatcctgcggccataggcccaatacatgcaacggcgcgaacataagcacggcacccacaagagtggatacagccgtgagcgcgaaccgtgtggtttgcacgcgcctccaacccacgggcgtggactcgctcgcctcgaccagcgggtcaccggtcaatgcgaccgccacgcacacgcccgagccgatcaccatcagctgggcgagccagttcaccaccatcaatgtttgcgtacgcgaccacacgccggataccatgacgccggctgccgccaccgcaatcccacaggccacgggcattgccagcaatcccatgccgatgcgccttgcctgagcgcgaatcattcccgtcatgccgaccctccttgaagtccgatgaagttgccggtcattctttttgttcgtcaccaagtaggtagcggccgcctgtcctgaagttcacgcgacatgccgaacgaccagatgagttatcggcttcgagtcggtcagacggtcgcggccgccatgcgcgccccggacaatcgtccggccagcgccaccgcccccacacaggccatcagccccgcggcggccagacctagctgtccggaggattgtgctgcaccggaccggcttgcgtccgccagacccgcgaacccgaacggattcagccggattgcgataatcaacagcaggccgacgccgaagccgacgcccgaggagaaacggatcgcgagcatcgcgcccacgccggcgaccagcagcaggggcgacagccatccgaccagcagtacgccgaacgtcccatacccctgcgcgcccatcacggtggtcaccatcaggccgaacacgacgtcgcaggcgagtatgaacaccagccggaccagcgtgaccgcccccgtacccaacggggtggccgacgagatcatgtccgcgcgggaatccccgaacgccatcgtcacgctcagcagcacgccggccagcaccatcgagcagaacgcatgggacacgatcgtcgcactccagccgaccgcgaagaaccgcgcccccaatccggcgaacgccatcaacgccagtgtggccggcaccacctgccacggcaccacccgcgactgccggcccagcagcagcatgaacaaccgcagactgcgcgcccacgaccatgccggtccgtccaacggggaccgcgacgcgcggatgcgcgccatcaccgccgcagcgggaggcgcgtctcccgaacgggatcgttccacggcgtccaatgccgcaagcagacgcccgtcgggcgtctcgtccgtcaaacggtcgatcgtttcgtcaagatgatcggtcatcaggattcaccgttcctttccatccgcatcgttttagcggt

SEQ ID NO: 54 - DNA, 35029 bp, Unknown
  R30_18m  MAG No. k141_27809
cgcgctccatgagcgcgaagggctgttcgccggacaacgcggccgcggagggattcttcggcaggatgaagaccgaggcggtctaccccgagaagtgggaggaacacacccgcaacgaggtgctcgccttggtcgatgagtgcatacgctggtacaaccacgagcgcatcaaacagtcgcttggttggatgagcccggtacaataccgtcaaagccagggaatggctgcgtgattatctccaagaaaatgtccgcagccccttatcccctaccccttgtggcatgattggtggcggtgagatcaatgacgagtccggcgaaacgtcaccagtcccgacacgcggatttatttggcgaaagacatctttaatgagccgcaagcgctaggccaacacttgcggctcacattatagataaaactagtccggctttaccagacagatttggttatctaattattgttattactctttatgggaggatagccataatatacggaaccgtaatgcggtgaagaagtattgtactttaacaacgtgtatgattctgcctcgccaactttactgctgccactagcaattgaattccaaatttttgaagcgaaagtagaacagttgttaagatagccccatctatcgttatttttaatattagaattcactgtatctaaatcaatttgccttaagggtaattgaatggaaacattctgaagattaataccattggaattaagcttcgaataaagattgagccacagacccttatattctctactgacatctacggattcatcccaagtgcttgctgttatagatttaccatcagcaacgttaatcccagcaatgtctgccgtagaaccagacaggtttgtgatcataagccaagaatgaccgagattcgtgaaactagatgacgagccggatcctgtagtagaataaatccgcagtaaagctacagcctctgcagcgcacgttttgtaattagcaccccgagaaggagatgagataattctcagatcttcgttatctgaggctttctcaagatcttccagagaagcattagacggaaagctggatagggtaggactcctatagggagtttcgatagattctgctgccgacgcatttactgtcacagttccagccaatattacagatactagagcagtgacaatttgtttgagtttctttatttatttctcctttttgtcaggaataaaatagtttcgatagcaccagcagcgacaaggaagggaaccgctcgtaaaaaaataaagatatgaaggaaagctagacacgtattctggatgcaggtagtcaaaaataaagccgcttactgtgcgtaggagtccggcacacactaggagacctgcaagaatgtggcaaattcggcacatattgactcgattctcgaactgcggaggagtgagtcctattgtagtagggcttgccggagaggccaggcccagttcaaggagcggaaggcttgcgtcgctcctgcggaatcgacgagaaagtgttccagcctcctggtgaagagccacgagcaccctgcttggggacccgacatcatcgatgtacgacatacggcatctacgacttcgcccggttcgtgcagacgcttgaaagagcgagggtcatacaggcctcgtggaggcgcgcgtcttctcctttgtgggcgtttgggtttttctggtggtggtcttgatggaccggcgtgtgcctctggaatgatgatatggaggtttcattatatcgtccgccgtctggctgggttgcattcgcgggggattggcgctattctgtaacagcgaaataagctggacttcgttcggttcgctgaggccattccgtggacgcggggtggcctcagtgctttcatcgctggattgggggaggtcggatccatgtcgttgcgcaagccctacaggagtgtgaacgaacagctgcgcattctgcgctcccgtggcatggccgtcgatgccggtgcgagtcatgtgctcaggcgcgagggctattatccgatcgtcaatggctataaggatttgttcctcgaccgaaaggcatgcctgaccgctggtgatgaccggtacggaacgggcgcgcgtttcgatgatctgtacgccctgttcctgttcgaccgtgagttgcgtgaactgttgttttcctccatcacacgggcggaggccgcgctcaaggcagtgtgcgcgcatgagttcaccgggctgcaccccgacgaggtcaacccgtatctcaatcccgactattatgattccaggtgccgtccgagcgccatggcattgatcgacaaggtcttcaagcggatacttgagttggacggcaacccgcgcaacaggggcgactatggcggcaaggcgtatatccgccattgcatggaagaccacaacggccaggtcccgttgtgggtgctggccaacgatctttccttcggccagacggtatggttcttccaagtccagtccccggccgtccgattggcggtcgccgaaagtttcaccggtttgtatgcggacacgcacgacaggccacggcgcatcaccatcaagcggctggacagcatcttcaacagactggtgttctaccgcaacctgtgcgcgcatgacgagcgctgctattgtgcccggtacgatgggcgcgctaacgagaacgtgtatcaggccatcggtgatcttggttatttgcttgacaaggacgattacttggaattgttcggtcgcttctccgcattggtcgcacgggtgacctccaccatgccatcgcggagccaagcgatcctgtctgccatgggtgtgcgcgaacgggaactggccgacagggcggaaatcatactgcgcagctgaccgttcctgctattgggacggtggcgtcgcaggcggctttggaccatgagccagctgatctgggctgtctgcaatgggcctgtgggattcgggatggatttggatgccattggcggctgggacggttgcacgggctgcgtatcgttctgtctattgtccgccatggagacatgctgccgggtgaatgcttctgggcaccacccatgcggaacatcatgaaaccacagggggtattgcgcttttccgtgccggtcggcgaagacgctgagcgccggcagggtggtggaacgttcccggattattcttgggtgcctgtaggtgcctcgtggaaaacgagcgtaaccggcaggtttcccaaaaattgaaaaccttggaacaaagccaaaaacgaccacatgcgattatcatcagaggtgcgcatgatgatggtagtcatggtcttaagtgtctcatgggcttgagaccgggtggtgatgcctgattgcaggaatgcgggttgtgattaggggcatggggtagccgaccaccaagattgagaccaatgcattgggtaacgatgcggcgagcggttccggcattctgccgttggaccgtgactgagatgccgtgttcttcgataatttgtgtcacgttggccctgtagatccagttctcgccacagtaagcgcccgatgtctatttagaggtgcaacacccctgttggtcctgcaattatagcagttcgtcggcgaatgcctcggcgggtgtccggtagtccagcacgcgcatgggacggttgtcggcctcgtcgacaatctcccgcagttccccggccatgtccatccggatctcgctgcgtttgggcggatgccggcggatcatgccgttcctgttctcgttgcttctccgctgccggctggagtacgggtcggcgaagtacgtgtccatgcccggcccgtcgcgcagtcgcgtgtggcgggcgaacccggtgccgttgtcgtgcgtgacgctgacgcgcgcgccggccggcagcggcgagaacatcgccagctgcgccccgacgctttccccggcggtcttgccgggcacgatcccggccatgaggaacctggtcttcctctcgacctcggtgtgcgggttgcatccggcgccgatcacgccgtcggcctcccaatggccgaaaccgctgcggtctccggcctccggcggacgctcggagatgggaacccgtccgggaatcgggaaacgcgacgtcctcccgccgccacgcctgcgacgcctcccgtggccacgtggaagacgacgcgcccagcgttcacggcgacggcggtcggcgtggatccaacggtagacggtctccgggcacacgcgcatggcggagtcgtcggggaacaggacgcgcagcctgccgctgatgagcagcagcgaccagccgcgacccagccattcggccacccgcgcccacaggcgttcgcatgacaggcggtagcgcttgcgcggtttggcgcgcctgcggccggccttgcgccgccgcggggccggcgatgtagtatccgcccgtccacgggcccgtcttcagccgtttcggccggtacggccggcaggactcgttctcgttggacgggaaccacgtgtcgcgtttgatctccctgccgaccgtcgaggcgttgcggccgagcatcagaccgatcctgcggatgatggtgccgttgccgatctcgatccggatgacctggcgttcctcttccgacaggtgcgaacatgctttcccccccccccataggtgcaacatcccttcggactggttatccggacaatctccaatctaacgggtgttgcactttcaattagacaacggggcgcctgacatttcaccaagggcggcttataatggtggaatcagcatatagagattggggttacaggagggtgattgtggaaaacaaaggttggagaattttccaaatcattcaattcatattgttcttatgcattagtgtattccttttcataagaacagtggacgggcatggaactgtacagacactaggagtaaagctgattagtttttccgtatgggcgcttttctaccttggtatcttagccatagagtggttgatttactgtattgtccgacatgctaaaaaataaattgatgtacgaatttgctgaactaatagaattcctttagtctctaaggggataacgaccgaattcttgcgcatttttggattccggccttgatggaaaaggacatgggccgtgccgggtacgattttcagtcgccagacaatgaaaaaccgcgattggaaagaggcatggagccatgtccaaggaaatcatacagttcgaccaggccatgttcgagagcaagctcgacgccatggtgcgcgagaaggtcgagcggatcgtcaacgcgatgcccgacgcttcaggcgaacgagatcgccaacgccgcgagatacgagcgttccggctgatggtggccgaccggtgggtgggaatcagtcgagattattcttgggtgcctgtgggtgcctcgtggagaaacgagggtaatcggtaggtttcccaaaaatcgaaagccttggaacaaagccaaaaacagttggctaggattatcatgcgaggtgcgcatgatgatggtagccatggttccaagtgtctcatgggcttgagaccggcgatggtgcgattgcgggaatggcgcggagagccgtggactggccgcggccgatagccgggaagccgagccgcagcgtgaagcgtcatacgagttgtctcgcgatggccaacgcgccggcaacgaccatgagcgccgagaagacacgcagaagagtccttttgcgttctcttcccagttttttggatccaatcacgacgtatatcaggaccaatccgacggccagcggcaccaaggccagcagaaacagcggtttttccatggcatctcatctcgaatgctgtggttcagatttttcgatgttcggtttttctgcgcttactgacaagagccatggagcagcatgccgatacgcacagattcactatgcaggtcgccgccggcagtagccgtatgaacggctgactgtagaaatcgaggacatctggatccatagatcctgagtatatttcaaaaaccggatatgatgcgagagccggcgccgaactcacgaggaacagtatccaaatgacgggcaatctcaggatggatactgttcggcctttccgatggacttctttcgagaacatgaaaagagcccaagaggtcactgcgattaatgcacccgcgcaatacaacagaccagagaactcgctacgcatgattccgtcctcacttcagtcgcaggtaatttggcttatcgatcttctggctggttcgagattaccatacctgacatggcagtcgaattgcccgttgtctattggcagagcatccgactgttaatcggacggtcgctggttcaagcccagccgcaggagccagacaaaaacccggaacttcggttccgggtttttgttacccgccccccgaaactcctttatcaaggaatcatccataagggatgccgcagcagacggtctccaaggcactgcaccgtgctcatccccatggacgacggcaactggcacgtcaccgtgtactgtcccgcctcgctggacggcccactgctcgacaaggattccaacgaattcgacacggacgacgtgaaacccggcgacaagtcgtacaccgttgccaatccattccacctggatcacgcacccggaacagacggtttcatcttcggccctgacaccctccgacgatagcgatggactaaccattcaaccgcacgcgtaggaggagcgcattccaaccatgaatgaatgacatatagacgtcaagggcttgcgggcatcgtgcccgcaagcccttgacgtctcaatccaacgaaatatcgacttttacccgtttgtcggattcaggctttcgcgcaagtccggcgatgaggagggccaccagcagggggatcgtcgtcagtgtaccccaggaaatcgagaacgtgtcggcgatgtagccgcacagcggggtgacgaccgcggtgaaggccatcaatacgagcgatcccacggagaacgcggtcgcgcggatcgaatcgtcaatgctctcgtgcaagctgctggagatcgtgttcgccacgtacatctgcgcgcaggagaacacgaagaacgccaggatcctcaccgccggcatcggcgtggccgcaagcaccaccgccgacacgatgagcacgaggatcgcaatgtcgccggaacgtggatgcagccgcagcatacccagacgactgccgacgatctgcgcgatattagtgaacactaggccggcgaactgccaccagaccccggtctggtggcccatcagcagcagctgccagaacgtcagcaccgacaacgtacccagattgaacaccaccatattccatatctccggcttccgcagcagcacggccgcggccgccacggtctgcctgacatgatccaacaccgtcagcgaggtcccggactcgcccggctcggcggatccatcggattcgacggacgcctcggcctgccgttccgtcgtcccgctcccatccgtcgctgcggccttggtgcgcgacccggccctcatcagaccgagaagcgggatgatcgccaatacgtagaacaccgtcgcgcccagccagatcagctgggagtcaagcaggaacagcacggcaccgaccgcaccgccgcatatcgtgcacacagcgatcatcgccgacagtcttgacaccaaggtcttcatacccagcgagggatcgtgcttgcgggcgtattcgatgtacagcgaggacgccgcgccgctttcgaccgcggccccgatgccggccagcacgttggccaggcacagcacggcgaagttcgcggaccagaacagcatcaatatgaatcccgcgacgcggcacaacacgccgatgatcagcgtccgttcccgggaccaccggtcgaacagcacggacgtgggcagctcgctggccgattcgctgacgtcgaacaccacattgacgatggagatcagcagcaccgacaggcccacatcatgataggccaccatatagtagaccgaaaaacatccggtaccaagataaataagcgcattatacaaacaggcaaaccgaaccatcaatcattcccttacataaacaaagaaccggtatacgtgggactgtctctcgaagtgtgtaactggccttaactggccggtcgtgtggccggtcggaaaggctggtggacgatgtgtgctgggacaatgggaaacatgacaccgacgaagaagccggacgcggaaaaacgcaacgccgagcgggaggcggcgctcacattcgtgcgcatggccaaggaaaaaggactggacctgacagggcccgacggactgctcaaacagttcaccaaaagcgtgctggagacggccctggacgaggagatgaccgagcacctgggccgcgccaagcacaagaaatccaaggatggcagggccgcgaacacgcgcaacggcaccaccgccaagaccgtggtcaccgattcggtaggtccggtcgggatcggggtgccgcgagaccgcgatggctcgttcgagccggtcgtcgtcaggaaacggcagcggcggctgcccggggtgggtgaggtggtgctgtccctgtatgccaggggcctgaccaccggcgagatcagcgcccacttccaggagatctacggggcggacgtgtccagggagaccgtcagtcgcatcaccgagcgggtcgtggccgagaaggacgaatggtgctcgcgttccctggatcgtgtgtacgcggccgtgttcatcgacgcgaccgtcgtcaaggtgcgcgacgggcaggtcgccaaccgcgcgttctacgtggccgttggcgtggatctggagggcgaccgcgacgtgctgggcatctgggcgtcgcccgtcgccgcggcggcgggcgacgacgcgatgctggacaagtgggaggcgagatatcccgcgatccgcaggctgtggatggacgcgtgggaacggttcataccgttcctggactatgacgtggagatccggcgcgtgatctgcacgaccaacgccatcgaatcgctcaacgcgagattcaagcgctccatccgcgcccgcggccacttccccgacgagcaggccgcgctcaagtgcatgtacctgaccgtccgctcgctggaccccaccggcaagggacggatacgatggagcgcgcgccggaagcccgcgctcaacgcctttgccatcaccttcgccgaccgctggccaagcgagggaacacaacaatgaaaacgccagttacacacttaacgagacaggcccgcgtctgggccggtggccggcgatccgctggtgccgctggtgccggtactggttgaagtcgatcccgatggatctttttgcgtcgagccggtgccggtgccgttcgaaccggtctggctgccgccgacgccttggctggtcgggtcttcggtggtcggattctttgaggtgccggtgccattcgaaccgttggcggtgccgtcggttttcgaatccgaggcgccggcgccggtcgaacccgaggtgccgttggcgtcgaggtcggtggagggggcgtcggttttcgaatccttgctggttcccttcgaatcatcgccggtgcccgtctggggcagagcgttgttctgatcgggggtgcccgttcgcgtgccggtgtcgttgcgcgcgggcgtggtcgtggtgggggatacgagattgtccgtgccgcgtccctgcgtggccagcatcacgacgccggccgtcaccgccacggcgagcaggccggacaccaaggtgacgatcatggcggtgtgcttcgaagcgcggaagcgggacttgcgcagctcatcgaccgagtacgtcctgccgttcgcccggctgaacacgatttcacgcggtctgcgtgtggaggaagcatcatcggcggtcacgcccgtcgccgtatcgggctcgtcccgaacgtcggtccggctgccggccgttcggggggtgccgccatcggcatcgccgttctcggcgtccttcgtgatcccgctgccggaggacgaggccgattggagtttttcgccggaggcggtgagcacgttctggtagatcttggtggccacggcggagacgacataactggccgctgctccgatcaccgaaccgccgatgccgatcttcgatgcgagcaggaacgaggtgacggcggcaagggtgcccgccacgatggatgagagggagattccttcaaaaaacttcttcacaatgcacgaccgtagggtgtcgggctgacaggttgcctgagactcgatggaagcggggcgaggcctacacgagaccttcaaaatcggccttcgtacaggtcggacacgccctgcggcgcacacacgtgcgtttcgcgtcgccgcaggccgcgggacatcgtcaattacgatgcagcgactgcccggtcggtctgatcaccgacatcagtacggcggcgaaaatcaaagcgaaacccaccagcgaagtccacatgattgtctcgccccagaacaacgcggagaacgtgacggcgaacagactttccgtacacatgatgattgacgcctgcgaggcaggcacgtgagccagaccgatgttctgcatgatctgggcactcatcgtggcgccgaggaacagatagagcacgctggccactactgagggtgccagccagctggcgttcggcatgggttcggtgaacaacgcgccgatgatgaacaatacgccggcaacgccgaactgcacaaaagtgacggcgatagggtcgaagcgtttggtgtagacaccaaggcaggtcagattgaacgagaagatgacggcggttgcgatggtcagccagtcgccggcgcccagcgacaacgaaccgcccggcttcaacgagacgaagccgacgccgatcagacagatcacgccggcgaccagattgatggccttcgggcgggttttcgaaatgatccacgtggcgaacggggtgagtacgcagtaggcggccgtcaggaacgcgctgcggcccggttcaatggtctgcaacccgacggtctgggtgaccatcgtgccccagtaggtcagacccaccacgagcgccggcacaatgatcttcggcgtcagatacggcacgatgtgcttatggaacaaggccagcatgcacaggcaggcgcctatcatgcgcagacccatcagccattggggcggaatcgcctccatggcgaatttggcgagcagataactgccaccccataatgcggcgcagcccagcaacatgagtcgggcgagattcgggggaaagctgcgggaccagcggctgcgcagcttgctgaaacgttcgaccaaacccatggtgcacctcaggacagttaggaaaacttgtggctctctcggctcacagattacgggaactaccggccaaaatcgaccggtcgatgggcgtcgggtgtgtgacaggtgtgtggctggtgcgcggccggggcgcggcaccgccaagcaggtaagaaccggatgaaagctgtgcgaaggtgaggttactcacagcgaacatccgggctagtcgcgctcgaaaccggtactctggaaagagtaaaaaaatacgttgtccatagcaatcatgaaaggattcgacatggcagtcattactccggaaatcaaggaattcatcaagaacaacctcggttggatcaccaccgtctccaaggacggcgaactggacctcggcccgaagatgtccctgttcgtgctggacgacacgcacatcgcctaccacgagcgcaccgccggccagcactacgagaacctcaagaacggctctccgctggtcatcgccttcgccaacctcgagaagaagcagggctaccgcttccgcggcaacgtggtgctgcacgttgacgacgacatctacaacgagcaggtcaagatcgccgaggaaaagggcaccaagaagccggccgtgattccggttctcgaagtcaccgagatccagaaccttgcctccggtccgaccgccggcaagaccatcgccaaggactgattagctgacgtattggtggcttcctcgtcagagggagccactttttcgcttttcagtgcgcagtactaggtgatggcctttgaggtcggtggtggcgaagaggtaggtgttgccgccgtccttgagtttgagttttttgcgcagctgggccacggatagggggaaattgcgtacggcgatgttggcgtgcgtgagaccggccaatagctgcttcagttctttcttgttcatggtgacgatggattcgatgacgaatgatctgcctgggaaatcggcaataggttcggccgccacgaacaggtggctattcgggctgatgtgatgcacgacgaagcgctgttcgagaacatcaaagcacccggccttcatgattgaggcgttgggttcgtaaaggtacttccaatgcgaggaatcgaagccgttcgcgctttcctcagccgggaaatcctcggtattacaggtattgcgtgcaaccaaggcagaatcgctgataggggtgtgattgtcgctgttatcgccggccttgtacgacagcacctgcccgtcattgacgcataccacgagcggtgaggcgcaacggccgcgccccaacaccaacaacaattccttgcattcattcccggtggagacgatatgcacctcatgcaccgcgccggcgaaatcggcgacggtcttatgccagtcgagcatgggggagagcttgaccatgaccgtcggtgccttggccagcagcgtatccttcagggtcagcacatccggcgtgcaatcggcaatcgcgtaggtacgcgagccatgatcgtcacggcgggccggatcgaggaagatcatggaggctcggccaagcgtatcaagcactgctgttgaatcatcattgatgatttcggcgtggccaaggccgagtatcgggaaattatggcgagcgataccacataaaatggattgttgttccacatatatggcacgattgaacactcgggacatgtaagaaaagtcgacgccgaaaccgccggtcagatcgactagggatgtcggggaatcgtcgtcgactgcttccttggccaacaatcgctgtgctaaccgggctttgtattgagccgtgaactggctggaacattgttccattgggacttgcggcgggaaaatcagcccatcatgggacgcccagtcaggtagcttgagtgaagcgcgctgccagccggcaatctgctccagcgcgaacggcacatccacgtcgccatcatgtttggcgtgcaaggccacatcacgcacatcttcacggcggtgtttggcgatgaacgcccaggtcgactcagaaatctccatgccgccattctaggggttgtgctgagatgagtatggcaaaccgcaagagaacgaggtggcgaaaaccgatgatcgatgaagtgatgatgctgcgtcatggccgtacgcaatacaatctcgaacatcgcttgcaaggccagatcgatgtgccgctcgacatcgtaggccaatggcaggtcgaccagaccggattcgcgctcgcttcacggtactactgggccaaggtgaaccggcttgccgagcatcccgaagccatcgcccagcccggtcctgacgccgccgaacgcactgatacgcgacagttcgaggaggcccccgccgccggccggcgcatggtggtgatgacctccgacctgttccgtgcccaacagaccgcacacgccttcgccgatattttgggattgccggtcacctgtgaccaacgactgcgtgaacgcagcttcggcgagtgggaaggcatgacccgcgccgaaatcaaagccgtggcagccgacgactacgcctcttggaaacagcacaccgggggcgaaaccaagcatggtgtggaaagccgtgccgccgtgggccagcgaggtgccgatgccgtgcgcgcactggtcaccgactccgcctattcagacagcacgcccaccacgctgatgctcgtcacccatggctcatggattaccgccaccatctccaacctgctcgaactcgacccggacggcatgaacgcactcggcggcatgcgcaacgcctgctggtgccggctcaaagtgcgccacagcgtcaacggcacccccaccgaacagcccctgtgggagttggaggaatacaacaaggctcccgccatcgccgacagcgccgactgggagaacgggccgaccgatctgcgcggaccgcacatgccaagttggcagccaatcgtctggtgacggtcgctatgcgaaaccccgctcgcaaattcgaacggtgggtctagactaatctcggtttggaaccgtacagcgatagaacagtaagaaagcgcggaaggcgggtgaggcgacatgctgagaatcttcagctcaatcaatggccaagtggagcagatcgagaaaccggaaaacggctcctggttatgtttgagcgaacccactgatgtggagctcgccaccgtcgcatcacagaccggcatcgacctggccgacctgcgcgcccctttggatgacgaggaacgttcacgtgtggacgtcgaagacgattacacgatgatcatcgtcgacatccccaccgtggaggagcgtggcggacgcgactggtacgagaccatcccgctgtcgatcatcgtcaccgaaaacctcatcatcaccgtctgcatgcaggacacgcccgtgctccacccattcatggaaggcacgatacgaggtttcaacaccttcatgcgctcgcggttcatcctgcagatcctgtaccgcaacgccacgatgtacctgcggtatctgcgcatcatcgaccgtgagagcgacaagctcgaactgaaactgcgccattccatgcaaaaccgcgagatcgtgatgctcatggaactgagcaagaccttggtgtacttcaccacatcgctgaaatcgaacgaaatcgtgatggagaagctcaccaccctgcagcgcatcaagcagtatccggacgatgaggatctgctcgacgacgtcatcaccgaaaacaagcaggccatcgagatggccaacatctacagcggcgttcttgcgaacatgaccgacgccttcgcctcgatcgtgtccaacaacctgaacaacgtgatgcgcatcttcaccatcatctccatcaccctgtccatcccgacgctgattttctcgatgtacggcatgaacttcgacggcggcatgatgggcatgccgttcaccgacaagccttggggcttcctgctcatcatcgtgatctccatggtgctttccggtgtggttgcctggttcctcacacgttcgcgcatgttcaagtaaggcgtttgacggttatgcaccattggtcatcgttcgtcagccgtagcatgctccgcgcccgccgcccgatgcggcgcggatttcgctcccgactgatggcaggattcgccgcggcctttggcgtgatattgccattgtccggtctggccggttgcggccaaattcaagtcaccaccgtctccggagcgccggagggacccaccatcgccattggggtcgcaaccgacgaaccatcggtgggagcatggcatgacggcacataccagggcttcgacatcaccatcgccaaatacgtggccgccaaactcggctatgcgaacaagcagatcgtcttcaagcaggttcgccccgaaaaccggcgctccatgctggacaatggacaggtcgacatggtcgtcgcctcttggcctatcaccgatgggtccagcgcgatcgttgattttgccggaccatacctcacgaccagcgtcggtttgctggtcaggtcggatgagcgtggccgattcaccaatgacgcaggttcggtgggcgacgtaggcgacggcacggtgtgcgcagtgaaaggtgacgagacagtcggcatcttccgcggcaaccacccgcaggctcggattcaggagcgtagcagttatgcgcagtgcgtcacggccgtgcaagtagggtcggcggatgccatagcctccgatatggcggtgctttccggtcttcaagcggccaacgggccccagtatatggacgtgattgcggacaagggcgaggtcagttatggcatcgccgtgagtcaaggcaccagccaattggcgcagaaaatcgcggaagcattggaagacatggttgaggatggcagctggacggccgccaaggatacgttcacaagccaaacaaagctcatggtttcgctgaacggtgaccccaaagccatcgtctcggatgctgaataacgattgacgacgtgtccagttgcgaggctaccttgctgatttatgagtgacaacgagaagagcacgcaaaccgaagagcccaacttccgctacaacgccgcactggcgcaggacatcgaaaacaagtggcagaagatttgggacgagcaaggcaccttctgggccgccaacgtcaacggcgatttgaaggacggcaagggccgtaacgccgaaggccgcgccgcctacttcgccatggacatgttcccctacccgtccggcaagggcctgcacgtcggccacccgctgggctacctggcctccgacgtgacgagccgctaccaccgcatgaagggcgagaacgtcctgcacgccatgggttacgacgccttcggcctgcctgccgaacagtacgcagtccagaccggccagcacccgcgcgtgaccaccgaggcgaacatcgccaacatgagccgccagctgcaccgtatgggcctgagcttcgacaaccgtcgtacgttcgccaccatcgaccccggctacgtgcgctggacccaatggatcttctcgcgcatctacgattcctggtacgacgaggaggccaccaacccgtccggctccaagggatccgcgcgccccatcgccgagctcgtcgccaaattcgagtccggcgaaaaggccattcctggccacgagtccgatggcaagcagtggtccgacctcactgccgccgagcagcaggatatcttgaacgacttccgcctggcgtacatctccaagtccccggtcaattggtgcccgggcctgggcaccgtgctggccaacgaagaggtcaccgccgaaggcaagtccgaacgcggcaacttcccggtcttccagcgcgagctccgtcagtggtccatgcgcatcaccaagtacggccaccgcctcatcgccgacctcgacggcatcgattggcctgagaaggtcaagctcatgcagcgcaactggatcggtgaatcccatggtgcctccgtgcacttcaccgtggccactgccgacggtgacaaggacatggaaatctacaccacccgtcccgacacgctgttcggcaccacgttcgccgttgtttccccggaacatcacctgctggagaacgtgcccgccgaatggccggccgatgtacccgaagactggaagggcggctatgtcaacccggtcgaggcggtgaaggcctacaggctcgccgccgaagccaagaccgccaaggaccgcgtggacgagggcggtgagaagacaggtctgttcaccggcctgtacgccaccaacccgatcaccggcgcgaagctcccgctgttcactgccgactacgtgctgatggactacggctccggtgccattatggccgtgcctggtggcgaccagcgcgattacgactttgccgtgaagttcggtctgccggtcatctacaccgttgaaccgctgccggaatccggcgatgacctcgccaactacgaaggcaaggcgccgttcgtctcccatgacggcatcgtgatcaactcctccgtcgaggccaccgaagtcaagggcgacgcgctgagccttaacggtctgcgcgtggacgacgccatcgccaaggtcaacgcctggctcgaatccgccggcgtgggcaagggcaccgtaagctaccgtctgcgcgactggctgttctcccgccagcgctactggggcgagcccttcccgatcgtttacggcgaagacggcaccccgcacctgctgccggattccgcattgccaatcaacctgcccgacgtgccggactacgagccgcgcaccttcgatccgatggacgccgagtccaatcccgaggcaccgttgagccgcaacgaggactgggtcaaggtcgagctcgacttgggcgacggcaagaagacctactaccgcgacaccaacaccatgccgaactgggccggctcctgctggtactacatgcgttacatcgacccgaccgacaccaagcacatggtggagaaggacgagttcgactactggatgggcccgaaccacaacaagtactcgggtgatgaaggcggtgtggacctgtacatcggcggcgtcgaacacgccgtgctccacctgctctactcccgtttctggcacaaggtgctcttcgatctgggctatgtggattcggccgagccgttccacaagctgttcaaccagggcatgatccaggcctacgcctacaccgacgaccgcggccagtacgtgccggccgacgaggtcgtggaaggcccggccgacgcctccggcgagccgacgttcacctggaacggcgaacatgccaatcgcgagttcggcaagatgggcaagtccctcaagaacatcgtgaccccggactacatgtacgagaactacggtgccgacaccttccgcctgtacgaaatgagcatgggaccgctggacgagtctcgcccgtggaacacccgcaacgtggtcggcggcatgcgcttcctgcagcgcctgtggcgcaacgtggtggacgagaccaccggcgaggcccacgtgaccgaggacgcgcccgatgagaagaccctgaaactgctcaacaacacgatcgccgaagtgaccgcggagatggagggcatgcgtccgaacaccgccatcgccaagctcatcgtgctcaacaaccacctgaccggcctgaaggccgtgccgcgtgccgcggtggaaccgctgatcctgatgctcgccccgatcgccccgcacatctgcgaggagatgtggagcaagctgggccaccccgagtccctgtccgccgagccgtggccggtggccgacgaacgctacgtgggccacgacaccgtgaccgccgtggtgcagatcaagggcaaggtgcgcgccaagctcgaagtgccggtcgacatcgatccggcagacctcgagaagcaggcgctggccgccgtcgccgaccgtcttggcggcaaagagccgcgcaaggtgatcgtcaaggctcccaagatcgtctccatcgtccctgcggagtgacttgttgcgggttaggctcccctctttgaggggagccgctcgcgtagcgagactgaggggagcgtcaaccgccccacctcaattgtggataacttcataagctagaaccacataccccgtttcagctggacaaacgcccatgaatccatcagcgtggatgcatgggcgtttctcataaccatcgcgcagaccatgccgccaaccgtttgcgcgcattcagcaggcagagcgaagccatgccccaaccgcgagtggaacggcccacgacgcctccgccgcctcccggccatgcacggattcgtccggccggccacccgtcccaaagggcgcagagcggcctgcggcaggcgacccgtgacaaacgtgcgttatcggatctgattggcgtacgttccgccgatgccgtcggagaatcagccagactcacccgggatcagccgcgattgtcgttcaccattgggcatgccttggccgtgatattgctgctgatcgtcgcccttggcatcagcttggcattgctggtccagcagtcgatgaatatggccatgctgtctcaaccgaccgccatgcagaccacgggcggctccgctggagatcagacgatgccatcgcagaacaccacggacgagaaacgcacggatccgcagcagtcggagcattccgatgccacagcgaaccccgaatcggataccacgcaatctccgcacatgcagacggacggcagcgatgccggcgcttccacgcatggtctcatcaacctcaacacggccaccgctgaggaattgcaatccatcaaaggtattgggccggttaccgctcagcggatcattgatcatcgcacggcgattggcgggtatgcatcagtcgatcagctgctggatgtcaaaggcatcggctccaagacgttggagaccatgcgagggcaggtgacggtcggatgagcagggatcggatactgcgcgagcaggggagccgcgattggaggatgctgccgatcgccatagtgatgtgggcggcgagtctgggagcgcacgcattattcgcatggaggatgtctgatggactcggcaccggtcaggcaaaggccgatgccggagctggcattgacgccaccataatcggcatggaatggcctgtcacacgaatattacctataacagtggcgtcatgtgctgccgtggcggcgatgatcgtggtgtctttccgcctgcggatcaggtggacgggaacattgaccgtatgcgttgcggtggcgtgcatcggcagtatggcggcaatcgcgtcggacaccattgcctggcatgatcctgcctccgcacaagctcgccaatccagttcataccacgaagtcatggccacggtgacgacgcccgtgatcgcttcggaccaacgcacatacgattgtcagacggacatacggctgagcggcatcactgtggatggcgcggacgtacgttccacggtcgccgtgcgcgtatacgccgatgaatcgtattgtgggcagttgcgtcgaggcgcggtctatctgttgacgggcgtattgcagcaagcgcgatatggacgcataccgctatggctgctcttggaaggaaaacagccggtagcgcaggtgcgggctccgccgtggcatctcgccgcgatcgcacatatgcaggagtcgtttttcaccgtgaccggacaattgtccgatcaggggcgtgtgttggtgccgggattgacgatgggtgtgcttggccaggattatatcggcggcgatgccggtccgatgccggtcaacagcacgtatgcgcaaacgttggaaaatcagttccgccggtccggcatcatgcacctcatggccgtatccggcggccacttcgtactggtggcgggactggtgcgtcggttatgcatgtggatgctgcttgatcggcggctgacggcgttgctggtctctggagtatatgcgctgctggcattggcgatgttccccagtgattcggtcacccgcgcgttcatcatgggattgataggtgcgttggcgtatgcgatgggacggcgtacgcaagcgttgagcgccctatgctggacgataatcggtgtattggcggtgaacccggatatgtcggccagctacggattcgccttgtcttcggccgccgtactgggtatcgtgctgtttgcggggcggctggccggtgtctttgagcgagcgatgccgcacagcatcgccgagatgatggcgatgaccgtggccgcgcaattgttcaccctgccgattcaggtgttgatggaaccggaattgccgttgctgtccgtgccggcgaacctgctggtgtcaccgttcgtgggattggccacgatggcgggattgatggcactgacgtgcgcatggtgcacgccatggctggccggcgtattcgcgtggatatcgtcatggggcacgctggtgatggaacgggtggcgttgtggctgggcggcagcacgatggccgtcatcccatggaaagacggcgttacgggcgccgtgctgattgtggcggcggaaatcggtatcggcatgctactggtgttcgtcagccgttgcctccagcatgtccgtcgttatgaggccggaatgtctggcgtgcgcttcggttccgcttggcgcgtccgcctcagtctctggtgtgaggagacgagacgcctctttacgcggcggcaagccgaatagccaatgtggtattcggtgcagcaaccatcgcaatcccagccgaataccactatcttgacggcaccggcaaaatcgtgatgccggcaggtcattgtccaacctgtgtggcgagatggtggcatggcgaaaacagcagcgaatgcaccggtaaccgtggtgcccggaggcgactcgtatttgaacgacgcgcgcaccaaggcactgtgcgcgcaggcgttgaaggcgcggcccgacgccgacctcatcgaactcgacgccacatcggccgaccagtatgccttcgatgaagccgtcagcccatcgttgctttccgacgttgccgtggtcaaactcgtcaacctgcagaatgccgacgacaagctcgccgaagctctggtggcgtacaccaagcaggccgccaaggatccgaacggctccagcgtggtgatctgccagcacgagggcggcgtcaaagggcgcaaaatcatcgaccaactggtgaaagccggcgctcgcaaagaggacgtgccggatttgaagaaaccggatgcacagctcaatttcgtgctcggagaattcgagaaacgtggtcgtagagtcgaaccgatggccgcacagcagctggtatccgtgctcggcggcaaaaccggcgaactcgccgccatgtgcgagcaactgtgtttcgactttgacgataatccgatgggcctcgaccgtgtcaaccagtatttgaccgccaatccgcaggtcaccggttttgccgtggcagacaaggccgtggaaggcaaaaccgcagaagccatcgtcatgatgcgtgcagctgtggaacaagggaccgatcccatcgcgctgatcggcgcgttggccatgaagctccgtaccattgccaaagcctcggcggtacgggccggcacgatttcccaggccgaagcgaaaaccaatccttgggtgctgaagaatgcgatgcgccaacttggcggctggacttcggcaggactcgcgcattgcatccgtatgctcgcctgggcggatgagcaaagcaaaacaaacggtggcgacccggtatatgcgctggaacgctgcattgaagacatcagtcataaaggtcggtaaaagtcgataaaggggtatttatgagcgaacacactattgcggctcccaccagcgaggccatgcaggagctcggccgtcgtgtggccggaatggtacacggcggcgatgtattgctgctctcaggccctcttggtgccggtaaaaccacattcgcccagggcttcggggcggggctgggcattaccgaacccatcgtgtctcctacattcaccattgcccgcgaactcgacgggcatttcgccgacggcactccgtctcatctggtgcatgtggatgcctaccgtctgggcggctcagcctatgcgccggggcaggacgccatcgggcgtttgttggacgagctggaatcgctgggattggacgaagaacttgaagaccccggcgagaacacggtggtgcttatggagtggggcgaacaaatggccaccgccttggcgccagaacgacttgaaatccatatcgatcgacctctcgattcctccgatgccgcatccgctggatcagacggcgaactcaccagcaacggcactcgtaccgtcgcattcgtcccagtcggcaagcgatgggccgcgttcgatctgcagtaagccatgcgcctatagactcctcgatgtacactctctagaggctttacgactaggaggattcatgggttgcacgttggtgattgacacctcattcggctcgacggtcggcattgtggggcgcgatcccattgtagagaccgattcgcgcacccatgtggagaaactgcaggtcaatatcgcgcgcgcggtcgaggaggccgggttcccagcatctgacattgcaacagtcattgtgggtaccggtccagccccctttactggtctgcgtgccggtatcgttacggccaaggcactggctttcgcaacgggagcgacgcttatcggccataatgttcttgagcctcaggtgcaatggaatctcattcgccgtggcaaagccggcactctcggcgatactcataaatgccatgtgctcactcttgccgtaaacgacgcacgccgcaaacaactctattttgcgttgtactcggacccgctcgttggcgatcccgatggcgaaaccgtggcgacggctctgattgacatggatatcgattaccctgcatccatcgcgcagcgcgtgaatgatgccgttcatacgtaccgcgacggacttagaccagaagacagcaatgtggatgtggtcgtggatgttgtgggtcatggggcccgcaaatatgcggatgcgctgggtgcaatcgagcagcttggcgacatcaccgatgaatccgtattggaccaaggggagcaaggtctcgctatctttgccactgatgcggaactggttgccaaccgtaatcacgatacgccggtcgaaccgttgtacctgcgccggccggacgccgaagtgccgaacccgctgaagcacgtgctcggccatgccggtgccgataaggcgtgagacgggttgattcgatgattgttgacatcactgccgtaagtcgtgatcttgcggtttgctccatcgcacagttggaaggcgaactgttcggcctcggcgcatggaatgcgaacatggtgcgagaggaactggacgcaccggcccgcacgtatctgctggatgtgctgggagaggtggaacaggcggttgtccgcggctacgccggcttctggtatgacggcgaggacgccgagctcatgaccatcggcgtgggcaaggcataccagcggcaaggcatcgccgctgcgttgcttcaggcactggtcgacgaggcgaagcgtcagggcgcctcgcgcatgctgctcgaagtgcgtgtggataacgaccctgcgctggccctgtatcaccggttcggattcgaacgcattggattgcgcaaacgctactaccagcctgaaggcatcgacgcatacaccatgagcttggacctgaaacctagggtcgtgggctttgccgccccgcagacggcatcggcggacactgaagacatcactggcaagcaaacggagaagaacggagaagcacgatgagcgaaccggttgtactgggcattgaatccacctgcgacgaaaccgcgactgccatcgtacgcggccgcgaactgctctccaacgtcgtggcctcatccatggaggaacacgcgcgatacggcggcgtgatccccgaaatcgcctcccgtgcgcacgctgaggccttcgtgccatgcgtgtccaaggcgctcgccgacgcgaacatgacgttggcggacgtggacgccatcgccgtatccgccggtcctggactggccggttgcctggccgtgggcgtgtccggcgccaaggcgctggcctgggctgcgaacaagccgatttacggcatcaaccatgtgatcgggcacatcgccgtcactcagctgcagttcggcccgttccccaaggacacgctggctctgattgtctccggcggccacacctcgctgctgcatgtggaggacatgccgcgcaagatcgatgtggtgggcaccacgctggatgacgcggcgggggagtgcttcgacaaagtcgcccgtctgctcggcttcccgtatccgggcggcccgcacatcgaccgccacggacagaacggcgacccgcacgccatcaaggtgccgatgggtctgacccaaggcaaggccggtgccgcgcacccgtatgatttcagtttctccggtgtcaagaccgccgtggcccgttgggtggaaagcgagcaggccgccggccatgagattccggtggacgacgtgtgcgcatccctggccgactccgtggccaccgtgctagcccgtaagtccatgcgcggctgccggcagtacgattccaacacgctgatcgtgggcggcggcttctccgccaactcgcagctgcgcgccaaactgctcgaattcggcgagaactacggcgtcgacgtccgtatcccgcaaatcaagctctgcaccgacaacggtgccatggtcgccatgctcggcgtgaacctggtcgaagccggcgtggcccccagcgcccccgacttcccgatcgactccgccatgcccctgaccaaggtctcgatgtaatatttgcacggtattcccaaactgatactgggaataccgtgcctctcatcggtgaattgacagtgacctgtctgcctgatgtgagtagtggtgaggtcttcgccatggatttcccggttgatgatggggtgtcgtgtctggtcaccaatgcgatgaaaataaaaaagcctcggagaaccgaggctttcgatggctcctgcgactgggcttgaaccagtgaccgtccgattaacagtcggatgctctgccaactgagctacgcaggaatattcaattttcatcccgcccggagttacccgttcaggtgagctcctgcgactgtgcttgaaccagtgaccgtccgatatacggttctggcttgcagccgtagggcttcttgcaacaggagtagagagtacacctgctttgcttgtccttcaaatcggcgtgtctcgacaattcctctcgatgcacccggttttccgaagagcttcagccgtcggcgagaacattggctaggctccatgcaatcgcaaatagcattttctgggaagtgacgaagacgtcacttcctttttctatgcgaaggagctgccatgaagtactggaactcgaacaggaaaagctgcgagcatgtcgagccacgcgaggattggaaggaatccatcgaactgtggatcgactggatggaagccataggccgtacggaagagaccttgagaacccgatggtaccagatcgtccgtttctccaaaatcgtgaacaagagcatcacggacgtgaccgaagacggcctcatattctatcttgccggcatgggcaccgaaggcagacgcggagtgcgcagctgcgtcaaggtcttctaccaatggggcatgaaacgcgggctcgcccgctgcaacccggcggactcgtgcaggacgagatgcgcaacgccgtggaatccaccacacgcaccgacatgagattgaccatgcccacgaaccaaatcgtcggcacaaacggcgtcgccacgtactcactcagcaccgcaagaataggatagacaaaaaaggtatgcgccgacatgcgcaaagaagcatgtcggcgcataccggcaccgatatcagagacgtctgccctcgtcggcggaaggcatcaggccggacaacatgcccatcggatcatcagtcatggatacggaatcatagatcggatcgattttcgtgttcgcactatccaccagcatgaggatccggtcacggatacgaggctccacatccgagtacgcctcctcgatgttggaaaggaccagaccggccatgtgcctggcctggccgacgacccgctcgggatcgaggtcgttttccaatgccagcttctcccaatgacgaggcgtcacatccctggcgccggtgacgccgccgatgcgcatgggcagctcggcggacacccaaggccagaaggtcgtggtcaaaacgtcgtacatgggagaaagttctccaggaacctgccaggggcttgccttgcccatttcccgtcaagagggagggaaaggcttatgggcatatccacacccttggcgtattcgagggaaacattcccctcggaatcctccagaaacacaccaacaggagaatcgcccatccaggcgtgcaactccctcaccgggcgctcccgagactggaaagcggcaacgcggctatgtctattcccagcgcatcggctgcggggaacaccgcttcaatcggagcttcgccccgctggagcaaatcatcggcggaccggggatcgatgccggcccgggaggcgagatcgccggcgttccaggaacggttcgccgcctcttcccggaaagcggccgcgatatccgattcggtgcgggcgaaaagagtccggcgtccacgcggcgcttggaaacggctgaggtaacgcgcgtactccagttgcgcctttgtcggctcaggcggtttatagtccagattcgacattgcaggcctccttaacactcgattattctagcctatacagagaaaaaggacatggaatcatcgttgccgtccgatgatcccatggatggctcctggagacgcatttcctcgatttctgctgcggtctgcttcgtcgcctgttcgagctggtcgcacaggctgacggtcttgcccgtgaaagcggccgcgaggtaatgcgggtcaatgtccaaggcgatggcatcggcgcttcgcaggcattccccggcctgctcgatcaatctcatggcctgttccacacgcgccttggcaccattgagaccggatgcttcaagcccctgttccatgggctcgtccgaccaggagcggatatcgagccgggtatcaagcgtgaaatccacccccgcgtcacgcaacgcgggcacggcgctgcgatagcgcccaccctgccagtccgctgtgacccgatccgcgagctcctcgccctgagtcccgcattccccggcgaggaatccgcgcagcgcctcctcgtcatcatcctccatgagcgcggcactgacggccacatggttccgaccgtcatacgactcgaaatacagcatcgtgtcgggcaaccggtcgcggtccgccacggactgtccgccaacggcaacgaccacgtgcacatcatggtgcagctcgccgccgacgacgggtggatcaacccgtaccacgaccggatcaacgcgcagagatcatgcaggcggatggagaaatcgcgccccgaactggtcgagctcgcacgctccgataccggcacgcgcgtcagctggcagtacggaatggaaggcgcggaacgggtacggcgacgacatgagattgaaacgactgcgcgacgactgggcggacgatgccagaagccgcagcctcgccgtccaggaatggcgcgccgcgatggagaaccgcccgcccttcctcgatgacggacgagaaagacacccggagaatctgtccacgcacgacatggaacgcctcgtatccgaagcgttcgtcatcgccgccaacctcaacagcgcggcggacgacgacgaataccgggcagcgatgcgcgagggcctgcacacgttcgacatgctgcgcgaacgctacgggcttacgcaggacggcctgtggataacggccacggacatggacgaaagccctataccagcgcacgtaggaaaaatttgacagcagcctcgaatccctacctccgtcgcatgtcggtgcaaactcagaaggaatgtcctcccgagagtacacatccgctctcattcattgaggtatcgcgcgtaacgagttttcattgtaaatgccacggtatggtgacggattttggaggacgataatgacaatacaatatacagcgcagccggctgatccggcgtcgagtgcggtgctgacgcgcgggctggtgaagcggtatggggattttctcgcggtgaacgggttgaatctgaacgtgccggcgcatggcgtgtatggtttgctggggccgaatggtgcgggcaagtccacgacgatgaagctgttgcttgggttggcctcggccacgagcggcgatatgtggatgttgggggagaaggtgggtggccggcacaggttgcaggcgggccgggtcggttcgatgatcgaggggccgagcttctacccggggttgagcggtctagataattgccgtatggtggccgattacctgaatctgccgggttcggccgcgcccgcgattttgcggcaggtcggtctggccggccatgagggcaagaaggcgagggactactcgctggggatgaagcagcggctgggcatcgcgatggcgttgatctcgcagccggagctcctgttgctggacgagccgacgaacgggctggacgcggaggccgtggtcgaggtgcgcgagatgatcatgggtctgagccgcgaacggggcatcacggtgatcatcagctcgcatatcctttccgagatcgagaagatggcgccggtcgtgggcgtcatcgcggccggccgcctgttgtatcagggttcgctcgacagtctgcgcgaggaggggcacatcgatttgcgtgtctccgacccgaagctcgcggcggcgatgctgggctcggaccggatcgactaccggtggctgccgggcagggatggcggcgtgctgcgcctgccggaactgccggaccagcggatcggcaccctgatcacgcagctcgtcggccagggcgtcgcggtctatcgcgtcgcctccgagcgcaagacgctggagcaggcgttcctcgaactgatcgaaagcccgcagagccgcgagcccacgcctcatcaggcgcaaaatgccatggattccgacgccgcacgcgcatccgcgcacgcatccccgcgtcgtccgttgccgatccggcaggctgcgggtcgggcggcgttcgcggcggcggacggaggcgcacgatgagcggcgcggcagtgttcgcggcgacgggccgccgtccgccgcgcccccgcgcgaagaccggcagcccgttcacgctggcgcgtctggagttgttgaaggtgcggggctcgtcgttctggtggatgctgctgggcatgatgctgctggtttcggcgtgggcgggcatggcgttcatgaaacgcgccggcagtcccgtcccggcgttgaggtcggccgcgttggccgatggcgaggtctatcaggtcgtgagcctgctggccccgattctggcggccctgttgaccagccgcatcgccgtgctggagacctcggagcgcatgaacctcacatggctgtcgttcggccagtcggacgcggcccggttcgtgggcaagctcatcgtcgccggcaccggcgtggggctttgcttcctgatcccgttgctgtgggtgccgatcgcggcgaaggcccttggcttcacggtggccggctcgttcgccgcgctggtgtgggtgccggccctgaccggcttcctgtccgcgacggccacgagcgcggtccagctgatgttctcgatgatgatcgacaagcaggccatcggcctgggtctgggcgtcatcgccggcgtgctgggctccggcctgggtgcgatgaacagacccgcgcttggctggctgttcccggccggcctgagttcggccgcgagcccgttcgtcagatccgtggatgcgggcggcaacgccacgatgctgctcgccgcgcgcccgtggatggccgtggcctccgcggccatggcgttcctcggctggacgctggtcagcatggtcgtggtcaaggtgaaggagtcaagacgatgacacacgcaaacgcagtgaacccggcaaccaatccggcaatcaacccggccgccaatccagctgccggcccgagccatgccgcgatgccccgcgcgcatgcggcgggacgccgcaggccgtccgtgtgggcggcgttccgctgggagacgcgcaaggccggcaacctgtggtactggatcgtgaccgtcttgttcgacgcaatcggcatgttcaacgggtggagccagtacaccggctaccaggcggagttcgccaggcagggcgtgacctgggccgcgatctggggtcaggcgatcctcctgccgagcatggtgttcatgccggtgcttgtggccgcgttcgccgcgcaggtcgaagccaacgagcatcgaggccgcaactggcagcggctgaacgccgccggcaccgtgaacgcggcgatcgccggcaagatgctgcacgggctcgcggcttcggcgctgaccgtcctcgtgttcgaggcagagttcatcctcgtcggacgcttcgccgccggattcgacctcgcgcagctcggcccgttcctgctgcgcggcatcccgctgaccctgtcggtgtgggcgatcatgacgctcacgcaggccgtgagcgcgaaggccgaatcgttcgcgggcacgatgagcgtgatgatggtcctgaccatcggcggatgcgcgctgagcctggccgccccggccatcgccgggccgtatccgctcgccctgatcaccagcgcctccgccgcccgcgacctcgcaaacatcgccagcccggcatccatgctcgcctccacgaccgccgccgccatctggaccgccatcagcgccctgatcttccaccggctcgccaaacaagccgtctgagcaaccgtccacgggctcccctcacctgcgggagcccgccacccaacaccatggaaaggcttcatcatgcacaccaccagccaacacaacgaacgacacgacgaacaacacaacgcgccacacaacagcgaacagtccatacgcctgccgcgccgcgtcatcgccgtgctgatcgccgccctcgccgcgatcatcctcaccggctgctcgaccggcatcggcgtggccggagacaggaacctccaaggcatacgcacccaagacggcgactcctacacgggcggctacaaggccgactacagcaagttcaccggcgaggaggccgtattcggcggcaccggcaagaaggccagcatccacctgaacggcaccatcacaggcacatccggcaccggcagaatcctcgtgaccaacggcagcgacacgaaacgacccgtgcccgccacgaacggcaaaatcgaccagacctacaacgtcacaggcaccagcttctacatctacgtcaccggcgaccaattcaccggcaccgtgaacctcacatccaaggagcaatgaccatggcaaacacatcccaatacccaaaccagcaaccggcgtatacgccggcaccgccggacggcgggcggacatggggcggctgcgccagcctcgcattggccgtccttccccttctgtgcgcgctcgtgccccagctgctcggcatccacctctacacgacgggctgggtcaggaacatcctcgtcatcatcgacttcgtatgcctcatcgcttcgctcgtcatcgcgatcgtcacctatcccgaacaggcgggaggacacagaatcgtcagtacaatcgcgatactcctatccgcaggcctgactgccgccggcggcatgctcatcttcctcatgttcatcaaccagtaggaatccgactgacaacggaaaacttctttggaagttcatctaaccgcatacacgccatacagcacaggccacatgcgatacgcttcaacacggatggggcagcacccagggaaggagaatcgcatgaccgcaaaaaccggaaacgacaagcgccacgcggttaccggcctgatcggccacgtggccgcgttctggcggtccagcccggtcgcgcgcatggtcgcgccgatactgtgcctatgctacgacgtgatgatgctcaccagaatcgtattcacccatggcgggggcgattcggcagccatgaaactgttggagcatcaatggggaatccccgtactcgccatcctatgtgtcttatctgttgtggcgctgttgttccgtatcagaatgccgttcgctattttgtgtgccatatgcggattgtatctatgcgcttgcttgcttcaagcggagccatatctgatgttgcctctcttgtttgccgtctacacgtctacagccttggccgcgaccactgaacgtgccattgcgggaatggttttgtcgggattgtcaatcgtttgcggcctctggattgcgaccttccccgccttgcagactgatatacttctgcccgagtccctccttgcgtcgatgaccgctattttagctctttggtcgcgcaacatcagtcagcggaggaagggagcggccttggtggaagctcaacagcaacgaagcctggaattggaacaggaacgcgatgaagaacgtcggcgggcggacgtcgcagccgaactgcatgacagcgtgggccataatctcaccgctatcattgcacttactgaaggcttggagggattgacacaggagccggtggaaggcgctataaagagtatcaataacttagctcggcaaagtctaggtgatacacgcgaggcggtacggaaactttcatctccggtgacgttacggaaaacaaaaacaggaacggttgaactgtgcagctggaatgatataaacccgattcttcaacatgctcgtgatattggaatcgccgccattctgaccgagacaggaaggcgtccagacgatctagcccaagctgatttatgcttccgagtgagtcgtgaggctgtcacaaacacaatgcgccatgggaaaaatataacgcgaattgtggtttcatgggatcatctggataatggggaactccatataacagtgcgtgatgatggtaagccaacgctgaacaaagataaccgcgctaaggggaccggtttcgggcttgctggcctagtgactgaagttacgcggatcggcgggcaccttcactatggctcatcatcagggcaggggtggactgtttcagccattattccacagcaaaaacgtccatatattcctgcgcaggagggaaacgatgattaacgtaatgatcgtggacgatcagcagccgaccagaatgggtttttcgctcatggtcatgaaagatcctgcgcttcgcatgacgttgcaggcggggaatggacaggatgcccttgatattcttgcggcactgcaattacatgggcagagcctccctgacgtcattcttatggatgttcgcatgcctgttatggatgggctcgatgccacggcaagaatcaaacagttatatccttcaatacgtatcctgattttaaccacatacgatcaggatagctatgcgtttgggggattgagcgccggagcttcgggattcttgcttaagaacgttaagactaaggacctgtgtcgggccattcactcggtgtacgatggagacgccatactcacaccacggattacaaaggaagtgattcgccgaggagttcccaacgtcagcatcaatgctgacactctggccatcagaagtaaattcgattcattgggacctcgcgaattcgaagtctcagcactggtcagcgaaggaatgactaacgctgaaattgctcagcgtctcggaatgcaa

SEQ ID NO: 55 - DNA, 88694 bp, Unknown
  R30_18m  MAG No. k141_33138
aaagaagtagtacaaacacgctcttgagttctcaaaccaccaccacaccagcaagacaggaaaccaaccagaagaaggaacccgccgcgctgagcggcaacaggtgaataacttacacgcaaccacgccacaacgcaaatcaaagcgcacaagaacccaaggaatcggcataacagcgcggttcattcggcgtgtcgcacagagcccaatttgctctgatagggctagcgtaacccctcgaatgtttccggaaaacatcgaatccattattcggctggcgtgtcgcacgagttttcggactgtcagctccatgttcatcgttcggcaaccacaccaccggcgcacaatcaatgcatggcaacaacgctccatcatcggatttcgttcatgaatcacgggtatacctgtagttatgaccaagaagattgctgtattaaccggggcgggcatttccacgtccgctggcatccctgatttccgcggtccggacggtgtgtggaccaagcatcctgatcaaatgagcgtttacgacatcgatctgtttctgcgtaacaaagaagaccgtgagtactcctggcgctggcagaaggaatcaccagtatggaacgcacagcccggcaccgcgcataaggcgctggtcaagctggaacaagccggcatgttgacgctgctggccacgcagaacttcgatgcgctgcatgagaaggccggcaacagcgacagcgtcatcgtgaacctgcacggcaccatcggcacctcgcattgcatgaagtgccatcaggaatatgccacggcggacatcatggcccgtttggatgaagaacccgatccacattgccatcgcaaactgaagtatcgtggcgatatgccatgcaatggcattatcaaaactgatgtggtgtatttcggtgaggcactgccggacggagcgatggagaagtcgtacagcttggccaccaaagccgacgaactatgggtaatcggatcgacccttgaggtgtacccggcagcgagcattgtgccggtggccgcgcaggcgggcgtgcccatcaccatcatgaatatgggtcacacgcaatatgaccatcttgcgagccgcttgattcatgaggatatcgccgtcgcgctgccgaagttggtggacgagacgattgcggagaacaagtagtcctcagcataacgaaagcgccggtgggtggttaagcaactgatgattgttggttaaccacccaccggcgctttcgcgccacctcccgctagcgggaggtattggagcacacttctgcgcggcctcccgccagcggtattggaatcagtagatgcgcttgggctggaatccagcttccctgagtgccacgaggatgcggtcgatgtgctcggggccgttggtctcgaccgtgacgccgagagacaccgcgttggtgtagtggccggatgccttgaactggtcgtggtcaagctgaatgacgttggcgcgctgctcggcaagcagggtggccaccttgacgagctggcccggagtatccggcagctcgacctcgaagttcatgatgcgaccgcgggcgatcatacctttctgaatcaccgcacccatggtcacggtgtcgatattgccgccggacatgatcggcaccaccacgtgcgggccggtggcggcggcgaacttgcgcgaacgcaggttcaggtgttccagcgcggccagcgaaacggcgccggccgcctcgaccaccagcttgtgcttctcgagcatgagcagaatcatttcgttgatgtcgcgctcggtgacggtgaccagatcatccaggaactcgttgatcagagcgaagggcaggtcgccggggtgcttgactgcgacgccctcggcggaggtgaccacatggtcagccggagacacacgacccgcggccagcgagtccttccaggccggggagccctccggaatcgcaccgattacgcgcacttcaggcttgaacgtcttgatggcgagcgccacgccggcacccaagccaccaccaccgagcggcacgaccacgtcagtgacgttcggcacgtcttcgaggatctccagaccgatggtgccttggccgcagatgacttcgtaatcgtcgaacggcggcacgtaaatcatgccttccttgtcggcgagctcagcagcgtgggcggcggattcgtcgaacacatcgccgtacagcaccacatcggcgccgtaggccttggtggcatcgaccttcagcggcggggtgatctgcggcatgcagatggtggccttcgcaccacgctcacgggccgcataggccacgccctgggcatggttgcctgcggatgcggtgacgatgccacgggcgatctgctcttcggtgagcgatgcgatcttgttgtacgcgccgcgaatcttgaaggaaccggtgacctgcaggttttccggcttcaggagaatctcatgaccggtcatctcgctcaataccggcgaagggataatttccgtatgacgggcagtccctttgagacgtttggcggccagcttcagttcggctgcatgatcacgctgcagcgccttcaaaacatccttttgttccatagctttccattgtaagcaccacaatgccgagagacaccggctatctcgcttcacagaggtacattcggcctcttgcagacagctatctgcttttcacaggggtaccgagcatcgaaaaccccgagtataagccttgatttttcaacgcttatactcggggttttgacgttacggtacctctttcaaggcggatagcatttcgcaatagccctgaagtatctctgtgaacggagaaaggtactcaatccgctacaatcgctccaatcgctacagctgaatgacggcggcctcccaaggatcgagctcacggttggcgagggagaccacggcgtgcggggcatcatacgtgctgattaccacgttcgactcggtgattccggcggcggccagttcggcggtttcgcgcggtagatcaacggttcggccggacatgttgaccacgaccagcagcttctcatcgccgagggtgcgggtgaaggcgtagacatgcgcgtcatccgcatcgagcagatgccagtcgccggccgccacgacaggcatgtcgtggcgcagcgcgatgagctgcttgtagaaggcatacaccgaatccggatcgtcgaattcgccggccgcgttgatcgccgcatggttgggattgacggagatccatggctccttagcggcatccggcgcagtgaaaccggcatagacagagccgtcccattgcatcggggtacgcgaattatcacgaccgcgcgcggcgatacccgccaacatcgattcgggcgactgcactttggcttcctcaaccctttgacggtaagcgttcagggactcgaggtcacggtactggtctaggcgcgtgaagtgggcgtcggtcatgcctagctcttcgccctgatatatgtacggggtgccgcgatgcatgtgcagcatcaggccaagtgccttggccgaacgcacacgagattcctccgaggagtcatcaccccaacgagaaacgacgcgaggctggtcgtggttaccagtaaacaggcttgcccagcctgcattcttcacggccgcttgataaccggccataatgctcttgagcttcggcaggtcaagtggcagtggcttccatttgacgccttcgcagtcaaaatcaacgtgctcgaataggaagagcatgtccagttcgccgttggcggggtcggtgatgtattcgttgcgctgtgcggtaacgccgggagcctcgcccacggtgaggaagccctcacggccttcgaacacttcacggcgcatttcggccaggaattcgtcttggcgagggccgtccgcgcagaacggattcgggttggaatagccttcctcacccacgggcagatcgtccagctcggaaccgtactcgccgggcagcttgccagacaggtccgtgcgcttggaaatcagcgtaatcacatccatgcggaagccgtcaacgccgcggtcaagccaccagttcatcatgtcgtataccgcgcggcgcacagccggattttcccagttgaggtccggctgcttcttcgagaactgatgcaggtagtattcgccacgctcagggcaatactcccatgcagaaccgccaaagtaggagccccactggttgggctcggcaccgggctcgccggcagtggtgccgggacgggcgggacgccaccaataccagtcggcgtgctcatcatccttgtttttggacgcttcaaaccaggcgtgttcatcggaagtgtgattgacaacaagatccatcacgatcttgagcccgcgcttgtgggcctcggccagcagctcatccatgtcgtcgagtgtgccgaacagaggatcaatgtcctgatagtcggaaatatcgtagccattgtcgtcttgcggagacttgtataccggggatagccacagcacatccacgccgaggtcggccagatagtcgagccgtgacgtaatgcccttgagatcgccgaggccgtcgccgttggtgtcttggaaggaacgcgggtaaatctggtaaacgaccgcattggaccaccacggatttggggtggcaccgttggtgcggatggaatctggaattactgtgcgttgtgaagtggtcatcgttggctcctccattatttatggtctacattgcctgttgctcatagtctaaaaagcgctgaattacatttccattggggaactgcgttggtgtgccggaaacaaaaaccgcaaagagccggaaggcactgctacggctcaattctcataagctgcacatgctatttagcaacatatgggccctttcgctgtttgtggtgggtgactgtgccgtggggtgatgttggtcgggtaggttggaggcatggatgcctctcacctgttcaccgccgcgcttcggctgcggtcgccttggagggtcgggtctgcggacttccgtgacgccgacggcgacgggcgggagccgcacatcacgatcggcttcgagcccggcagagggttcatgctcctgttcgaggcgtgggtgtggctatatcgcctgtgctcgtggatgatgcactcgaggctcgaacctatgaaggagctcgcccgcttgttccgccaccataatctacctgacctgcggcagctcacatattaacggttcttctgattgcgacgcgcaagagcaacttcgggcgcgcttggattgcctgcttgaacccactggtgcggggatagatgatttagttgacacgcctgcgggaatctggtggggatttcgctggcacaccggatttcaagcaaaccccgcctcgggaaccgctccggacttcggcgttggcccggttcgtatgtcaatcgattgccgtctgaaccgggacagaatccgctgtcccggttcgcgatttttgtccttttttacaaacagggacaagccaatctccgcagttcatatgctccgtaatacaaaatcggcggaatagagccgatcccggaatcaacatgttgtcccggttttcacataaaacgattgacattcataccgggacaatgaaaattgtcccggttcgtgaaaatcgcccgaaaccgcgaaccgggacagcggattctgtcccggttcgcgcgtcaaacggttgatatgtggaccgggacaagccagtggcacggcgacacagcagatgcgctcaattgcaccgtaagccgtacggtttcgtcactttttcattcgcacaacgagcaaaaccacatgacctttgtgcgccaccgccacatcaaccgaccgtcgcctttattgtggcggtttccagtatggcaacaggacagaagagcctcctccggtgagagccggaggaggcttgggtggaagcggacctttacttcacagagtcctgcaattcaggactggcctacggccagacccaacatgacctcgcgagtacgcgacctatccggccgcccgggccgggaaacagcccacggggctgtttccttaatcggctcgtctcgctcgacgcggtgaagtaaagcagcgcctgcgctgttttacttgaccgctcccctcatcacaccaccgacgacccacttttgggcgaagatgtagacgatgaggatcggggccatggccatcaggtagctggagaaggccatcgggtagttggtggcgaactgcgagctgaagacgtactgggcgagcgggatggtctggttcgactggtcggtcaggatgatcaacggcaggaggaagtcgttccaggcccacagtgcggtcaggatggcgatggtggcgttaatcgggctcatcagcgggaagatgatggtccagaaaatgcgccacgtggatgcgccatcgattcgggccgcctcttccagcgaaactggaatcgaacggatgaagccagtggcgatgaacaggttcgtgcccaggccgagcaccgtgtacaggatgatcaggccgacctggttgtccaggtgcagggagcccatctgcttcgcaatcggcagcatgacgaccgggaacggcacgaacatggcggcgatgaagaagtagtacaggaagcggaagaagcgcttatccatgttgcgggccacagcgtaggccacgaaggtgttggtcagcaaggtgagcaccacggcggccaccgtgatgatcgcggagttgagcgcggccttcgggtagttgaccttggcggaggcgtcggcgaagttgtgccactgccacgaggtgggcagggcgaaggtgccggcttcggccggagtcttcagcgcggtgacgatggtgaagtagagcgggatcagaatggtcaggctcagcacggccacggcggcggtcagccaccagttgatcttgtggtccctgcggaacttggcgggcttgccggacttggacggggtaactgttgcagtagtcatttcttatcctcccctaaatcagatctgttcctggctgcgggagatgcgcagctgtacgaaggcgatgatcgccagcacgatgaagaagagcacggcgtttgcggtctggtaggcgtactcgccaccggtcaggccacccttccagatgaggtaggtgacggtttcggtggaggagttcggaccgccctcggtcaaggcgacgacctgatcgaaggtgccgagcgcgttcttcatggacagcacgaggttgatggtgaagaacggtccgatcagcgggaatgtgatcttccagaacttctgccaggcgttgacgccgtcgatggcggcggcctcgtagatttcgtcgtcgatggtctgcaggccggcgaggtagatgagtaccgagtaggcgatgccctgccagacggcgaggaagacgattgggatccagctgagttgctcattggtcaacagcgaggtggacagccacttgatgcccagcgccttgccgagctcgggcagcgggttcatgaagatgtacttgaacacgtagccgatgaccagcacggagagggtgtaggggatgaagaagacggctcggaagccattcttgaaggcgatcttcgagttcagcagcaccgacaggaacagggcgatcacattaatcagcaccgtgatgagaatggcgatgaggaacgtgaacaggtaggcgtggcccacgcggttgtcttggaagagggcgatgtagttcttcaggccgatgaacttgtaatcgccgtagccctgcgagttggtgaaggaatactttacgccgtcaagaaatggcaggtacaggaagaaggcgaaaatgatagccgccggaaccaccatccagtagtaggcggggtccaccttgcgggtggagaaggcggagaccttcttcttggccggtttcttggcagcggtcttggttgcggttgcgtgtgacatgatgttctcctctcctaccgatcactcgaaggtcctggcttggaccttgtcccattcggtctgcatctggttcaggaagcgatcggtgttgccggaggccaccatggtctgcaggtagccgccgatgttgatggacgaaggaatgtagtggtcgcagaagtcggccagtcggttttcctcgaagaacgggcgcacggtttccagcgcatcgttgccgaagtaggtgtccttcagcggcgtgatggcggactgggcgtcggcgtaggcgtcaagctgatccttctgcatgaggaactcgacgagcttcatcgcttccttggggtgcttggtgttcgcaccgatggtgagcatcacgtcgtcgccggcggtgaggatctgctcgctggcgtcatcggtggccggcatctgggcgaaaccaagttcgatatcggggttgatcagcaggatctgcgggatggcgtaggtgccgagcgggatgatcgcggccttgccttgggcgaagttctgcgtgccctgctggtaggtgacgccggtgtccgcagtggagtaggtgaagagctcggattccttctcgactgcggtcttccacagttcctggaacgtggtcttgccttgcttgagctcggtgtacttcgattcgggaaccagcgtgccggccagggaggcgagcggtgcctgggtggtccaggcgtcggccacggaaccctgcagcgggttgatgccggcgtccttgaaggtgttgagcatatcggtgaactcgctccaggtggtcggcggattctccgggtcaaggccaaccttgcggaacagagccttgttgtagatgtagccggaggcgttacccgcgaagggcaggccatacaggcgcttcttggaggaatcggtggtctgcaccagattcttggcgatctgcaccatgccggggttgagggtgtccacaatgggttcatcggtgaagtcgtagaacacaccggaggcggcgaagttgccgaagctgatgtcgccgttgaaggtgatcacgtccggcacacgattcttgacgaaacgggtgcgcagatcggtctgggcgttggcggagttgttgatgttgaccttgatggtcgggttctgcttctcaaagtcggcgaccatggacttgaactggtcggcggcctcggacttgaactggaagaaatccagcgtgacggtgcctgcggtgctggagccgcagcctgccaggccgaacccgacggcgatcgcgcacatcacggcggcggtgcgcacggccagacgcttcagtctaggcgttgcatgtggggaatcggacagcataattgttgactcctttatctttcttttcctccggcttcggtgccggcggttcttccactttccaaggtaacggttcggccatttcattcccagcgccagcgagcccacttgcgcaagcaacaaaaagcgcggtattttgtgattaacgcaataaatacagcgaaggggcttgcatgtctgatgtcaacgcgattccacagtggttttccggatccgagcatacgcatcgcgtggcggcggcaattgcccaatacgggccgatagcccgcactacgttggcacagatgctgggactgagccaaggggccttgtcccgcatcaccagcgatctgatctacgccggggtgatcgaggagcttccggccgaggccggcccgtcaggcaagctgcccgagcgattcacgccaaggggaagttcggatcgtcgcggacgcccgcagacttcgctggtgttgtgttcgaacgcacgcaccttcattggtgtcaaggttcatgggatgtcgattgtggccgctgcggtgaacgcgcatggcgaggtggtgtccggccggcacgaggtgccgatcggggcggatcagtcggctgagtatgtggtgtcggccatcacgcggctggtgcgcgaatgttccgccgatatcgcctcttccggactgccctcccccactgcggtgggcgttgcggtaggtgggcatgtggtcgacgattcgattgtgacgttcgcgccgttcctgcattgggacggggccacggacttggggacgatggtcacagaggcgaccggcctgccgtgcggggtgttcaatgatatcgattctctgctggtggatgcctcctggttcgggccgggtgtcggcgtggatatgttcgccgtggtgaccatcggcgtgggtgttggttattcgctggccgtgaacggcaagccagtgcagtacccggataagagctatggtctggtgggccacgtgcttatcgatccggaggggccgcgctgcaccagcggacatatcggctgttcacaatgcttgactgacgattcgatcgccgaacagtactctgcgattgtgggtcgcgcggtcagttttgaggactttgcgcgcgatgccaagggacgcgtgccgcaggccacgcagttggtgaaccggacgtgtttccggttgggttcgctggtggcgacggtggcgaacatcgcgatgcccggacatgtgatgattgccggggagtccgcgtttttggccaagctcggcaccgattcgctgcgcgatggcattcgtttctaccgtcacagccagacccagccggtcaagttcacgattatggaccacgactggcagctctgggccaaagccgccgccagtcgcgtaatcgtgaagcatattgggtaggccgttcttggctcccctcagagagggaagccaagaacgttgcttcgccacagttactccgccacgaccagcaattacggacttgcctatcggcaaggctcaatcccaccttcgctcagctgtcgctttgctcaggccgtggctattgacagcctactaggctgtcagcttaacgccacagccttgagcaatactgcctgctgggggtggagggacgggggacggatgccgtaacgctgcagggcttcgccggtcaggactacgccttcctcgttccaccagccgagagtgctctggccgttggccagaccggtcaaatccaagctcgggtcgagcgggctgacgcggtaggtgcgctcggggtcaagtccgggcaggtgcacgggcgcggccggataggtctggctggtggtcagctgggtgaagcggtagatggcggcgtcgcggttcggcatcaccatgccatccaagcgcacggccggatcgttggagtcggcgtgcacgcaggtgtcgatggcgaaccagtcgcggtgcttcttgaattcggccacccacacggccagcttggcgagcgcctcgtccggctccttcaacaggttccattcgatgcccatgtggccgaagaacgccatggccatgcgcagttcctggctggtggcacgctgggtggagtgcgcgggactggcacccacgtgctcgcccatcatcgccggcggcaccagcagcgaggtgtagcgctggatgtccgcgcgctcgaccgggtccacgcagtcggagacccagatacggtcagcgtgctctaggatgccgaggtccacgcggccaccgccggaggagcagctttcgatctcaaggcccggatgtgcggtcttgaggcccttgaagatgttgtagacggcgagggtctgcgcgtgcacggccgggcggccggagcggcgggaaccgggctcggtgacgaacttgttgtggtcccacttgatatagtcgataccaagctcgccgacaagctggtccatgcagccgtagatgtagtcgaacgcatccggattggtcagatcgagcacctgctgagtgcggccctgcagcggcagtcggccggtggtgggcgaaagaatccaatcggggtggttgcgggccacgtcggaatcggggttgaccatttccggctcgaaccacaagccgaattccatacccttggcgtgcacgtagtcggcgagcgccttcagggacttcggaccatcgggccagacgtcctgcgcaatctgccagtcaccgaggccggaggtgtcgtcgcggcgggagccgaaccagccgtcgtccaccacgaatcgttccacgccggagtcggcggccttgtcggcgagcgccttcagcgtatcgaagttgtggtcgaagtacacggcttcccatgtgttgaggatcaccggacggccgtgcgagaacaggcgcgggtgcagggagcgcacgtaggagtggaagcgggcggcgatctcgttgagaccatcgccataggagccgaacagccacggggtgtcgtaggagttctggccttcgccagggccagcgagcgtcacttcgccgccgaacaggagttcgccgccgccgatcacgccggttgtgtagggcagacgttcggcggacagcacggagttgccgctccagcccacgtgcaccgaataggcgtcgccatgctcgaagccgaaaccgggcacgccggcggtcaggagcagggatgcgtcgaagtcagggcggccggcgagctgcggcttttcgaaacggccgacggtcagcggctggcgctgcggactgcgttcacgtagatggtgaccggtggtggtgaggatttcgccggcggattcgggcagcgggaagccgagctcgatcttgccgatctcgagcggggctccggcgtctgcaccgaacaggttggttacggtggccttctgacggaccaggccgccggggagcagttcgaggtgccactcgacttccacgccctgctcctcatcgcgcgcggtgactatgacgccgggcacgcggaccggaccggtggcacgggcatggccggccacatcggtgtagctttcgccggacacggcatcgagggtggcttccagcacgccgccggcctcgatattggtcacagtgaacttggggaagagctcgacgccggcgcggcgcagcaccacgcgctgctcgccgatccagctttcggcctgggtgggcaggatagacggccaggcggtgtcgtcgagcgcgccggacacgcgctgcggcttcagggcgtcataggcggccagcagggtgtcgggcttggccagcgggcggccccagtggacgatgtgcggcaggtcgctgccggcaaacaccagaccgatcgccacattggcggcgggctgggtcaggtagacggcggtgagtgcggtgccgtcagcggcggcgccggtgaaagtggaggtgttctcggccatattgtctccttcgacgtgtgtggatttgcattgcactactggtttcgatggtagaagaaatggaatatgttgccttggtgccgcgtgttggttgcgtgaggtaagtaatgcgtccgtgtctatcgccgctgggcgaagaaatcagtcaggatggactgacactcgccttccagcacgccgccgtgcacttcaggactatggccgatatgcggatcgcgcggaatatcccaaatcgaaccgcatgcaccgagcttgggatcccaggcaccgaacgcgatggtgccgatatgggtctggatgcaggcacccgcgcacatcgggcacggctcaagtgtgacggccagcgtgcaatcggcgagattccaagcgcccaaggcttgggccgcctgacgcatggcgatgatttcggcgtgggcaagcgggtcgccatcagcctcacgcgtgttgtatccgcgcccgacaatctggccggccgcatccagcaccaccgcaccaaccggtacgtcaccagcggctgcggcctgaccggccagttccagtgcacagcgcatcgccttgtcatattccataccaacgagtgtatgcctttttctcatatcgtctcatgatgtgcataatcggccgcaatcttaacgttttcttcatggttcccatatacttttggtggagaaaaaatacgagaaggcggcaacatggcggtatttgagctcatcctatgcatcattgcggcggtggtggtgagctcgtttgccagtcgcttcgtaccgaaggtttccacaccgctggtccagattgtgctgggcgtgctggttacgtatctgccgtttttcccggatgcaaagctcgacccggaactgttcatggtgctgtttatcgcgccgctgctgtatctggaagcgcacgaaatcgataagtcggcgttgctgaaaacgctggatctgagcctatcgctggctatcggactggctatcgtcacgatggcggcagtcggattcactttgcatgccgtctggccgtccatcaccttagcctcagccttagcactcggcgcggcactcggcccgaccgatgcggtggccgtcagctccctaggtaaagaagcctcgctgacacagcgtcagcgcagcgtgctgaaaggcgaatcactcttcaatgacgcttccggcatcgtcggcttccagttcgctctggccgccgccttcactggcgaattcgccgtggggcaggccgccggcgaattcgtgatctccttctttggcggcaccttatttggcctggtgatagcagcagcggccaactggctattcgagaccgtgcgatccctcggttgggaaaccaccaccacacgtattctgatggaactgttcctgcccttcctgctgtatttgggcgcggaggaattcaatgtgtccggcattctgtcggtggtggccgctggcctgttcatccgattcgaccgtaccggcgtggggccgaatgtggcacgtacgaatatcgtttccacttcagtatggggtgtgctgagtttctcgctcaacggtgcggtgttcattcttctgggcatgcagctgccgcgcgccatgagggccagctggtctgacccgtatatcagcaataccgtgctgatcggcattattctgctggtcactctggtggtaatcgcgcttcgattcttctggattgcggccatgctgcgcgttgcgcgagatacaatcaccggccagcgccgcaaaatgacacccgaacgctggcgctcggccgcagtgatgacctttggcggccccaagggaaccatcacgctgtcattgatgtttaccatcccgtattacattgccggcggtgcgccgttcccgatgcgtgacgagctgattttcattgcgtcaggcgtgattatcgtgaccttgctgctggccaacttcctgttaccgctattggccccgaaccgtggcaaggatcccagcgcggaaatgattccggtgaccatcgatgtgttacgcgccacggtggaggaattgaccggacgcatcacgccagagaatcgccgtgcgattctgatggtaatcgaccaatacaccaagcgcatcggacgattgcagcagcgcatcggcgataccgatcctcagggattcgagcaattgcagatcgaagcgctgcattgggaaaaggaattcgtgcgcgaccgacttgccgacaccaaggcgcatccggcggcggatacggccacgcaagagctgaacgtcgaagcctgcgagcgcatgcttgaccagattatgaatacgctgcgtcacacttccactgatccgacttcggggcatgcggtatcgcagattcgcggtcgcttacgcatgttccagcggcagatgagcaattacgccaaacgcacggtgtccaagattcgccataccgcaccattggtgagcgaggatcagattttcgcgcgcacccgcgaactgcaggtcgaggcgattcatcatgttatcggccggcttattgacgagatgggccaggatacgtacaacaccgagcattgttcggcgctgttgctggattatcgtcgcgctgaggcttcattgcaggcacgtccgaatatgagcggcactacggaagccatcacgcaggtcgaggacgtaaagcgcgagagctacggtatcgaactcggtgtgattcaggacatgtacgaagccggcgacatcaaccgagcccaagcccgctccctgaggcgcaacatctacgttatgcaggtcgatgccgattccggcatctagtttccttggctcccttctctgaggggagccaagttggggattgctatttccgcatgattctcttcagtatgtgcagtagtgcttgcagtgctcacttcgctcatgggagaacagtctatgaccgcgccggccacaagcgccctcgatgtccgattgctgtgacggccgcgccaattccagtgatggcggctgactacagcacgccagaggtaatgtcgttgtcgagcagccactggcgcaaatcggcgaactcctcaagactcacattgtgatccagaccgtggtagctcttggttttcagccacgtatgctcttccaaccaagcggcggtggcgaacagttcgtatttcgggattacgccatcgttcttgccgtacgtatagaacacggggatatcgtaatcggccaggcgagagtcggcgggggccgtgccgggcacctgaccgggtgtgttgaagccggacagggagacgacggcccggtaccgctcggggttgatgcgcaacaaatgcacggcgaccagtccaccttgcgaaaacccaagcggcaccacgtcacggtcggcgggaatgttgtcggccacccatcggtcgactgctgtggcggcggcatacgcgtcgtagtcacgatcatcgccgataggcagggcatcgtgaaaccacgcgtagttgccggggtcgggactgccttcacgggccggcgcaagtgtcagcggcccgcgcaatgccacgaagtcgttatatggagcgatgaggcgcatgatgtccgccatgtcttcttcgctggatccccatccatgcaggcacaggaacagcggatgcgtggcatgctggtcgaagccgccgcgcgaggtgacgctgtgttccacggtgagtggctcgccaaaacgtccgggcacagtggtggattcgcggccgatcagaggctggctggcattcgcttctttgctcataccaatccaatatagaggtcttgcgcgctgtgcggaaaacgatggaccatgatttcagtcacattgggtaatccgcgccgaatcgccttgggactttccaggggataccggcaatctgtcaggcattaccgctgtttgcggctgcggtgtctgtggctgcggtgattgtctcaagttcgccgccccactgctgctgcagtgcggtcatcttgctgccctcgccgaacaccatccagcgtttgccgttcagcaatcgccaatcacctttcgtttgctcattatcagcgtattggctcagcagttcggaaatcttgctttcgataggtgcccggctgatggctgcggacgattccgattcaaaggacacgaaggccactctcggatcagtgcacatctgtacggtggtgatgcctggcaaaccgcccgcatcaagcccctgccatccttctttgcacgcgccggcagcttgttctatgccttgctccatctgtgcggtatcttcgacgggtgccttgtcgttcgactgctgaatcagtccttccgggaacaatacgcccatggccacgccgataaccaagcaaactatggcgcacaccagtgcgatgatgccgcccgcgcccactcccccgtgagtggcgtaccgaggcatggtgactcgcgcagcgatgaccagaatcagggtgatgctgataagcaccgccgccgtcaacgcaatgtatcgtcctggcactgccgtcataaaggaaatggcgtaaggcgcgatttcatgaaccgccgaggtggccgataccacgacggctagcagtccgctgacaacggcaagtctgcggcacaatatcgacgttgggctgctggcttttgtagcggcgaatcgccggccggcattccgcctggatgggcgtcgattctgtgcacgacgtgagctgcgcgaatcgtcatactgaccatcgccgaagaaatcgtagtcctcatcgttgcgggccatcggtgccccccttcctgccgattacacagccagtgtaccgctatggcttgggaatggcggtcattcgggggaatgattcagggcaaaaaagaaccccggcggttgcccgccggggagagaaaggagagagaagaagaaagggggttcaattgtcgggaactgctgcggctcctgatcagctttccgctgacatcatttatataaccactgctttctgggtctacctctaagtttctctgagaaaaacctgagaatacttgcgattgatggaccgcggaagcgtgaggagcctctcacgtttccgcccaaggcgctagacttgaaggcagtatttatttgcccaaggagtttttcacatgctgctgtccgatcgcgacattctcgccgcacagtccgcaggtcatatctcacttgatccgtggacccccgaaatggtgcagcccgcttccatcgacgtgcgattggatcggtacttccgtttgttcaataaccacgcctacacctatgtcgatccggcggaaaaccagggcgcgctcaccgaacagttcgaggtggatcccgacgaaccgtggattttgcaccccggcgagttcgcactgggttccacgtgggaatacgtcaagttggacccgtccattgccgcccgtctggaaggcaagagctcactgggtcgattgggtattctgacccattcgactgcgggcttcattgaccccggtttcgaggggcatattacgcttgagttgtctaatgtgtcgacgctgccggtcaaactatggcctggcatgaaaatcggccagatgtgcttcttccagctgagctcgcccgctgagcacccttatggctccaagggcaccggctcgcattatcagggccagcggggtccgacgccgagccgttcctacgagaatttctaccgcgcgcacatcgacgactgagcgttgcgacgtaccattcggccggcggatgccggccatttgcttaaccccaaggagatgtcatgaccaacagcgatggtgggttccagttcgacttccagcagcacgaaaagccggtcaggccaacggttcctccgattcccgggcaagagacggcagcatatggcacgcagccagcgacacaagccacaccggctctgcagttcccacaatctgtgcagtctgtgcagccgacgcagtttgtacagcccacacagcccgcacagccgacgcagcccatcgatcaggccatgacgcaaccgttctcgccgcaattcccggctgcggttgccgcacaagcaccacagccggcggcagccacgcagccagtagtatccgagacaccaatcgccgctgcgcccggccagcagcaatacgtttgggatcagacgacgcaaagcttccgcccggtggaaccgacagcgccggtgacgccagccgcaccagcggcaccggcgacatcgcctgtttcggcagcttcaaacgccgcgacacaagcgttccagcccagtcaggccgagcagcctgcggtagatgccgaggcaacacaagcattccggcctgatcaggtcatggcaacacagcttttcgaagctcaggccatgccgaatgccgaaaccgaggccacacaggcattccagcctaattcagctgcggccacacaggcatacggcgcatcatccaccgtatccggtgagaccgttgccatgccggcaacgcaagtagcgtctgccgatgatgctgcagccacacaggtgttccaaccggccgccctggctgcttcggcacaggctcagcctgctgtgatgcctccctccattccgttgaatcaggtctccgatgaggacgattccgatggcgccgagcctcgtcacggcggtagcggcaaaaagaacacccgcaaaatcgtcggcattgccgtagcagtagtcgccgtgatagcgctggttgtcgccggcctgctctggtggcattccaacagcagcaaggcgagccaagccgtggcattggccgagtgcaaggtagcggccaagcagtacacgaatgctcagaagaagctcaccaccgccatatccaatggccaaaccagcgcgcaaacatccaccagcgatgtggccgatgccaatacgctcaccacgctgaatcaggcgttgcaagacgccggcaatccgaccgacaccgccaagtgcgattccagcctcaacgccactgagctgaagtctcacactaaagagctgcagaatgatgccagcgacatggctgacaagacggatgccatcaacaatgcgatcaaggccgttaatacttcaaaggcgacggccgataccgacacactgaaatcgaacctgagctcagctatttcgcaggcgcagggcacgctggataattccgcgggcagtgtggccgatgaaaacacccgcaccgcgctgcaaaacgccatcaccgaggccaatacggtgatgaacgggaccagtccgtccgaatccgacgtcaacaatgcgatttctaaactgcagaaggccgagtccgacatcaccgcctcgatacaggccaagcagcaggcagatgccgccaagcaagctcaggaagaggctcagcggaaggccgaccaagaggcacagcagaagtctcaagacgggtccacctctactgacggccccgacggcagcaacaactgaggtctgcagcgttctcccgtttcccatggggcggtaacttccccatggggcggttagcgcattttcctttttcgcggaataacgccgttttcagcgaccgccccatgaggaaatcatcgccccatgggataatcaccgccccatgaggagccgtttggatatagcagtgggccgggccctgaataccagagcccggcccactgctatatgcccacaatcagggctattgcgatggcttaacgcttggctatcgcgcgtagcacaatcttgcgtagctcggaggcaatcagcacgattgcggccaggcagatgcattccacccaagccatcgggctcaatgccacggtgccgaacggaccgttaaggaacggcacgtaaatcaccacgagctgcagcgccacggacaaaccaatcgcaccccatagccacttgttggagaacagacccacgaatgcggactgcagatgcgaacgggaggccagcgcgttgaacagctgggcaaacaccagaatcgtgaagcccatcgtacgggcctcggtcatctgcgcttcatggccgatggcatccaccgagcggtcggtgaacaagccgccggataggtgcatgtccataccaatcagcgtgacgatggccataatgacgccgacgaagatgatgtcgccccacatggaggcgtcaatcacgcggtccgtcatcttgcggggtttgcggcccatcacatcatcggtctgcgggtccacgcccatagccaacgccggcgcggcatcggtcagcaggttgatccacagcaactgtgtggcgagcagcggcacggtgacgcccacggtttccggctggcggatgccgaggaagccagcaaacaccacaccgaggaacacggtgaacacctcacccacattggaactcagcaggtagcgcaggaacttgcggatgttgtcgaagatcacgcgaccctcgcgtacggcggccacaatggtggagaagttgtcgtccgccagaatcatcttggcgctctgcttggtcacttcggtgccggtgatgcccatggccacgccgatgtccgcggacttgactgccggggcgtcgttcacaccgtcgccggtcatggccacgatgttgccttgacgctgcaaggattcgacgatcttgagcttgtgctcgggggccacgcgcgcgtacacggacacttcggacgtggccttgtcgagtgcggcctcatcgggcagctggtcgagctggtcgccggtcaacgcctgaccgtccttggcgatgatgccaaggtcggaggcgatgcgggcggcggtcagcgggtggtcgccggtgatcatcaccgtgcggatgccggcacgatgggcctcggtcacggagtcgcgcacctcagtacgcggcggatcgataatgccgaccatgccattccagatgagatcggtttcgatggcttcggcctgatcggcgatgtcggacacctggcctgcggcgttgacgcttacaccgggcacatcagccaaagaactggtttccagcggacggcaggcctcgccaagcgtacggtaggcctcggaggagagacgttcgacggtggcgagaatcgactggcgatcgccttcggtgagcttacggacctgaccacccacgcggatgcgcgtgcagtagctcaacagcacgtcgggcgcgcccttggcgaacacggtgagcttgtctgaatcggtgctgtccttggcgatgatggacatgcgcttgcgttcggaggtgaacggaatctcgccaacgcgcgtgtagcgcttgatcttgcgatcggccttgaccttgcgtgcggccacgatcagcgagacttcggtggggtcgcccacaatctcccaacggccgttctcctcgcgtagttcgccgtcgttcgcgagcgtgccggccacaagcgtggcgacgacttcatcggccacaatctgggcctgctcggattcaggactgacgccaccggtcataaccatgcggccttccggcgcgtaaccggtgccggtgatctgcactgcgccggacggggtgaccacgcgctccacggtcatctcgttgcgggtcagcgtaccggtcttatccgagcagatcacggaagcggagcccaaggtctccaccgaatgcagtttcttgacgatggcgttgtgcgcggccatacgctgcacaccaagcgccagcaccacggtcaggatggcggccaagccttccggcacggcggccacagccagcgagacggccaacagcaaggaatcaatcacgtcatggacgtcgtcgaagccttccagcacggcgagcgccaccagcaccacgacagcgatgacgcacaccgcaatgccgaggatcttggagacgtaatccatctccttttgcagcggggttttctcatcttcggtggcggagagcatgtcggcgatcttgccgacctgcgtgttcataccggtgccggtcacgattgcgcggccggtgccttgcgtcacggaagtgccgttgaagatcatgttggcacggtcgcccagcgccttggcttcggtgagtgtgtccggcttcttaccgaccggcacggattcgccggtcagggaagcctcggcgatgcgcaggctggccgcgttgaccagtcggccatcggcggagactgagtcgccttccgcaaggacgatgatgtcgccggggaccacgtcggcggtgttgatgcgcatgactttgccgccgcgcagcaccgaggtctgcggggccgtcatttgggcgagcgcctcgaccgcggcctccgccttggcctcctgcatgtagccgagcacggcattgacgatcagaatcaaaatgatcacgatggcgtcgaacggcagcacttcaccgccttccgcgccgggctgcgcattggccttttcgatgaaccatgcgatcaccgagatgatggtggccgcgatcagcaggtagaccagcgggtcctggaactgggccaggaatttcttccatttcggtacgggcggggcggtggcgagctcattcgggccgaatttggccagtcgacgcttggcttcttcctcgctcaggccctgggatgggtcgacattcagggctttggccacgtcgtcggcactggtcagacttggatcagcttcccccaatagcgcttcctgcgcgcgcacttcttccgattccacgacctcgttcgttgcggtcgcggacactgcggattgatctttgagatcatccataatgttctccttggtattgccgcggagtagtcagccttgcggccgctaccgggttttctctcccggctggacgcacaggactgcgcggttatggacaccggcgcaactgctgccgatgcatacgattgctattattccataactgcgtggcgcacttggcgcacagcgtaatagcgttttgcctagaacaggcgacgcaaccaggcttcagccaaatcaggccaacactgcacgcattcgacgatgtgcgcatagaagccgttgccagcggtttccgcattggccagggacaggccgtggctgccttcggggaacaggtgtgcttcgatgctcacgccggcggcccggcaggcctggatgagcattagcgtattctccacgggctcggcttcgcggtcggaggtcatggcgtagccgccaccaggcaaaatcaggatggccgggcgtatgcggtccggttccatctcctcgctgttgtcggccacatagccaaagaatcgcgcctcgttgccgtcaatgccagcgatggtttgttggattattgcatgccatacatcatacgcgcagagaatagttctcgataagaaccactcaccatatgcggtcttgcccgtatctccaaaccgaataacgcttacagcgaatcgtgaagaacgtatgccgcactaccgttacagagcattcgacagctcgacatataacttaagaatcgtgagaatcaaagcaattcataacctaggaatagtgagttttacggcattatataacttaggaatcgtgatataatagctcataaatccttgaaaatactaggaatatgagcttaacatgtataagagaaaagtatacgaccatctacggcgatggaaagcagcgagcaagggtactactgcgttaatgattgaaggagcccgccgcgtcggcaaaagcaccgtcgccgaggaattcgcgaagaacgaataccgctcatacatccttatcgactggcagaaggctccgcaggcggtacgagactcgttccgcaacaatctggatcatttggacacgctgttcatggacctttccgtctattacggcgtacgcctgcatgagcgtgacaccctctttattttcgacgaagtacagctcttcccctttgcccgcagcgcggttaaacaactcgttgcggatggtcgatatgacttcatggagactggctccctgatctccattaagaagaatgtcgaaaacatcttgattccctccgaggaagaatcggtgagcatgtttcccatggattttgaggaatttctatgggccagaggagaagaactactcgccgatgcgatacgacaatcttttgcggacaggcgagcaatgtctccgctgctggacaacaaggcggaacgcctgttccgtgaatacatgctggtgggaggtatgccgcaggccgtagagcgttatctgggaacatccgatatgggcaatgtcgatcgagtgaaacgccaaattttgcacctgtacgctcaggacatagagaaatacggcgaagattcgaaagaacgggtcaaacgtatcttcgatgaaattccagggcaactttccaagcatgaaaagaagttcacactgtcgtctttaggcgaaaacgcacgcgaacgtgaatatggcgatgctttcttctggttggatgaatcgttcctgatcaaccgctgcatgaatgccacggatccgcatgtgggcctgcgcctacaccaagaggactccacgatgaaatgctatatgggagacaccggcttgttagtaacgcaagtgtttgccgaccgcgcatacacgtcgaatgagttgtaccgcgatatcctgttcggcaagctggaagtgaatgaaggcatgctggtggagaatgtcgttgcgcagcagctccgggcctcaggccatcgcctgttcttctattcccgatattcccgtcaggcgaaggaccgcatggaaattgattttctccttatcggggagtattcaaatgccgccatgaaggccagggtctgccccgtggaggtcaaatcgacaaagagatacaaaacctcatcgctcgataagttcaagaataaattcgacagccgggtcggcatgcaatatgtgctgcatcctagaccaatgcgcgttgaaggagaccgcctatatctgccgttgtatatggcgcattgcttgtgatgattctagaacgtatcgcagagaatgattctcaataagaaaagcgtgaggattacgatgcctcaatcgcacatgcagagcgtcatatcagtgagatcccgccgttgcggaccatgtttgattgtgcggaaaagttcggatgcctcacacttttcttgacgggaattatttactgtgaggcattgcgcaggttggcggccatggcgcggtcgcgcaagcctttggtgagcttgagaccgagggttacggcgatcaggactatcgtgcaggcgatccacagcgttcgaccgccgaagttgctgatggtccagccaccaatcagcggcgccagcgcaatcgataccgaccacactacgttgtagacgccctggtacgtgccgcgtgccgacgcgggtgccatggcggcaaccgtagtggtggcgatagggaatgtgcccagctcacccagcgtccacagcactacggcaagcgcgaatccgccccaggaatgggccgcggcctgcaccgcatagccgatgacggttacggcgaggcccatcaccagcacgcgtgaattgcccatgcgcgagaacagtttcatcgcgggaatctgcagcaggcacaacataccgccattgatggtgagcagcaccgaatactcgcccagccctagaccaaggtccgtcatggcaatgggcaggccggaggtgctttggaagtacacaaggaagtagccgaacatcagcagggagaagccgaggaatggcgtatcagtgagcacgcgccgccaattgcgagacatggagcccttggcactggcagccggtgcggcatccgagtgattcggcccctcgacgccggcgaattccgcatgcgtaacactgcgttcgtcttcatggcgcaccgcacttggcaccgatacagtaatccccaaatgccgcacctcgcggaagaacgcaatcagcaatatcgtgacggctatcatcaccgccgcttcaacgtagaacatcattgaatacgagatcttgaccagctggttggccacaatcggcccaatcgcgtacccaaaattaatcgcccacgattgcagtacgtacgcacgttgctgacgttcggcgggcaccacatccgcgatatacgcggcgatgaccgggctgggcagtgaggcgaacgcaccatagacaaacagggccgcgcctaaagccacggggtcagtgagcacggaaacgaccagcagggcagccgctgcgccgatttcgccgatgataatcatggattggcggccgaatctgtcggataaggtaccaccgaacaggcagccgatgattgcgccgaagccgtacatggccacgactgtgcccaccacaccctcatcgaggcgcagcgcggaaaccaaatatatcgacaagaatgaggtcacgaagcgacccatccacagaatcagaatcgccaaccataatccccaatacagcagggacagtccgaatatcatgcgctgcttcttcactctcaataccttaccggctaccgacggcggaatagccgcgttttggcgcggggtgctgggacaatagcacctatggctatcaaaaaaggaccgaccaaggggtcgggtggcaagcatcgcaacaaactgaagggttacggccccactcccaaagccgaggaccgcgtctatcacaaggcgtataaggccaagaaagcggccgaacgtcggcagatggccgacccgcgtctggcagcccgccgtcgagtggacaagttcgcttcggcggatacttcggatctggtgtacggccgtaattccgtgctggaagcactgcgcgtaggcgtaccttcttccacgctgtacatcatgtctcgtattgaacatgacgatcgtactcgcgaaatcgtgaaaatcgctggtatgaacggcctgcacatgctggaggccgatcgtctggagatggatcgtatcgcccgctccggcaaccatcagggcgtgattctgaaggtcgatccgttccagtactcctcgctgaacgagctggccgatcgtgctgagaagaaggccaaggcaatggaggccgcgaattcggcggccgcccgtattgctgcgcgaccgctgttcattgcattggacggcgtgaccgatccgcagaacctgggcgccgtgattcgttcggcggccgcattcggtgccaatggtgtgattctgccggaacgccgttccgcttcagtgaacgccgccgcttggaaggtgtctgccggtgcggccgcgcatatgccggtggcgcgcgtggtgaacctgactaaggcacttgagggcttgaaggagcgtggatactacgttgtcggccttgacggtggcggcgataagctcgtcggcgagactggctttgaatccgatccgctcgttgtagtgctcggttcggaaggcagcggtttgggccgactggtgcgcgaaacctgcgacgcgattgccggcatcccgatcagctcgtctgttgagtcgctgaacgcttcagtggcggcgggtatcagcctgtacgcggtgtccaacgcacggcgcaaggctgcggcggagtgattgtcgcttgaggccgtaataggttgtacacacaaagaagcccctctatttgaggggcttctttgtgtgatgggctcacctacagacagtccaccggattgtccgcttaatgactccacactgccgcatccggatcgtcatcggggttgtagccgtcgtcgtccgggtcgctgtaggtggattcgtcgtcaatgacgccggaatcggcctcttcgttaagttcggcgagtgccttggaatcaaggttgtagctcggcagaacgttgtcgatgtagctggtcacggcctcgcccatcggcacgtcgtggccggccttctccgccaggaaccagcgatggtcaagcacctcatggaagaactgagcaggctcgatctgggagcgatattcacgcggaatcatacgcacggtcggctcgaacacctcgcgcatccagtcggtggccacgatttccagatcctcgccctcacgccacgtggaggcacggtaggcgtcaagatcgttgagcagacgacgggcctggttctcctgcacgtcaaggccggtgaggcgcagcagcttgcggttggcgtagccggcgtccaccacgcgcgggcggaccagcacacgcttgccgtcctcggcggtcttcatttccagctcgtccacgtcgaagcccagctcgttgagcttgttgacgcgctgctcaatcttccacatttcgtccgggttgaacttgtcggtgtcggtcagagcgctccacagcgagtggtagcggtcgaccaggcggttgcccacctcgatctcatccacgtcgccgggcagtagcttgccggacgccaaatccataagttcgccgatgatgttggtgcgggccaagtcgatatcgtattcgcgctggccgtcggtgagctggacttgcaggtcaccggtctcggcgtccaccaggaaggcggagaaagcgtcggcgtcgcgcaggaacaggacgttcgacagggacacatcgccccagtagaagccggccaggtgcaggcgcaccagcagcacggcgagggcgtcgatcagtcgttcggcggtgtccgggcgcaggttgcgggcgaacagcgcacggtacggcagtgagaacttcaagtgccgggtgaccagaatcgcctccagcggctccccttcacgggtgtgacggccggtgaccacggcgatcggggtcacagttggcagttcgagcttctgcagtcgacgcaggatctcgtactctcgctcggccacctggcgcgtgatctccttcatggcgtacacctcgtcgcccacgtgcacgaatcgcacgacgtggcgggagatgcctcgcggcaggttggccagcaggtcctcaggccaggtggccaagggcttgtgccagggcagcgtgaacatctttgggttcgagctggcggcggtgattttcagtgcttgcggttccgctgaatcggcgtgttcgtcttcggctttgacagacgtggccttcagcgcacgcggatccatctggggcaattcgttcaactccatgtgttcgattttacgtgtcgttcgcgatgtgtgctccttggccacgacttcggcgcgttatgtttacgggaaaacaccgtttggtctctccctcagaccgtctagaaggcaaaagaaaagccccgcagctatgcagggcttttccaacgaggtcataagagaggaagagaataacctcgtttaatggttgacgaagcgattagacctcgccaagtatctattagttcagacgcagctcagtcgacggagcgaacaggtgcatcttggccgggtcgatcttgatcttgacggtcgcgccaaccttcggcagcgcacgcggattcacacgaatcgtggtgagcttgttctggtcggacatgacctgggaagcctcagcggcggagccatcggtgacgatgttgccgtagatgtagccatcggagcccagatcctcgacgttcacaaccttcagggagaaggcgttcgggtcgtcagccggggccaggccagcgtcctcaggacggaagccgaccacgatctggccgttgtcttcggcggtgagcttgttgacggcctcagccggcaggtccacggtgtcctcaccgatcttcgccttgccgttgaccaccgggtgggtgttcaggttcatcgacggggagccgatgaagccggcgacgaagacgttggccgggcgatcgtacagctcggtcggggcgccgacctgctgcaggataccgagcttgatgacggcgatgcgatcgcccatcgtcagggcctcggtctgatcgtgggtcacgtacagggtggtgacacccagctggcgctgcagggcagcgatctgggtacgggtctggacacggagcttggcgtcgaggttggacagcggctcatccatgaggaagaccttcggctcacggacgattgcacgacccatggccacacgctgacgctgaccaccggacagagccttcggcttacgatcgaggtactcggtcaggtcgaggatctcagcggccttctcgacgcgcttgcggatctcttccttcggagtgccggcgatcttcagagcgaagcccatattgtcggccacggtcatgtgcgggtacagggcgtagttctggaacaccattgcgatgtcgcggtccttcggctgcatcgtggtgacatccttgccaccaatgaggatgcggcccttgttgacctcctccaggccggcgagcatacgaagggtcgtagacttaccacagccagaagggccaacgaggacgaggaactcgccatccttgatatcaagattcaaatcatccacggagggcttatcgttgcccgggtagatacgagtgacgtggtcgaaaacgacttctgccataattactaatcctttcagaggcaggtacgtgcctcacgatccgttgtaaagggatttgttctttactgcgcttccgccctcgccaccgacgtacaactttgctttcggaaactgcaagcttcagcgtttacttttttccggttcagtgaaggttctcttcgttgagccgagaactactatacacggaccgtggaccaaggcaagtggcgtgtctgaaaatgtagttaactttatgggcgtttctgggggtgttgtgtggttcggcccatgacacgcctgtttctcgaacgtgcgaaccggcacgcccggcgtagagcaggcctgccttcccgaactgacggattccatcagtcgccgactaatgcaacacagactcgaaggtgacgccgttgcgggcggctttgcgctcggccttgcgctcctcggcgttttcgatgcgctggatgcgcagctggcgccagtcctcgcgcatgtcgcggaaacggtcggccagcgttacgtcatcgttctcggcatcgccatcagtaccgctgccatcggccttaccgaacgtgccatcggccaccttggtgatgcccagcttgagcagtccgagcaactcacgcaacgtttccggtacgggctcatcgccctcatcggcggactgggtcaggccctcgatgcgacgacgaagcgcgtcggcgtcctcgggatcgatcttgagcccagcgatcagcgactggcgcatggtctcgtaatcgaggttggcaaagaaattcagctgttgcagcgtcatgaagcccttgagctcggggaatcggtggacgatgtattcctcgcggtcgtcggcggcgcgggtccagtcgcgggtgagctgcggatcccagttggcggtaatcgatccctcgcgcatgcggtagtggtacagcgccttgggcagacggaccacgcgcgtggcctcgccgatcacgttgcagatacgggagagatcctcgattttgcgccccaccgggaaggagaatccggtgccctgataggtggaggcgggtgccaggaaggcccagaaatagccgtcgatctcagccttgacctgctttttgatggcctcgaccggggtcaggatctgcacctcggtgaagtcgttgtggcgatagttggacagcagcggcttgttgttctcggagatggtgtcgaactggaacatcacgaggtcggcgtcatactcgcgcatggcgttcaggcagtcctccaccaacgtgggggccacggtgtcgtcggaatcggcgaagtatatgtacgcaccggtggccccggcgatgccggtgttgcgggcgtcggacaggccgccgttgggcttgtgaatcacgcgtatgcgcgggtcgcgggcggcccaggcgtcgcacatggccgggcaattgtcgggcgagccgtcgtcgaccagcagaatctccagattggcgtacgtctgcgcagcaacggacgccacgcattcgtcgaggaacttctcgaccttatataccgggatgatgatgctgaccaacggctcctgttccatgcctccagcgtagcgccgtcgtgcgaacgcggcggcgctacgggttcgcggaccgcgaaacccttagaagtcccagtcgtcgtcatcggtttcttcggctttgcccatcacgtaggaggagccggagccggagaagaagtcgtggttttcgtcggcgttcgggctcagggcggccaggatcgcggggttcacatcgcaaatctcagccgggaacaaagccgggtagccgaggttcatcagcgccttgttaccgttgtaccgcaggaacttctcgacgtcatcggtcaggcccacgcggtcgtacagcgactgggtgtactccacttcgttgtcgtacagctcgttgagcaggtcgtacgtgtagtcctgcagatccaggcgctcggcatcgctcagctgggcgatgcccttctggtacttgtagccgatgtagtagccatgcacagcctcgtcacggatgatgagacgaatcacgtcggcggtgttcgtcagcttggcgtgcgcggagaagtacatcggcagatagaagccggagtagaagaggaaggattcgagcaaggtggaggccaccttgcgcttgtacgggttgtcgccctcgtagtagtcgagcacgatttccgccttcttctgcagaaactcgttgttctcgctccagtcgaatgcggcatcgatctgttcggtggagcacagggtggagaagatggacgagtagcttttggcgtgcacggattccatgaaggcgatgttggtgtacacggcctcctcgtgcggggtgagcgcgtccggaatcagggagacggcgccgaccgtgccctggatggtgtcaagcagggtcaggccggtgaagacgcgcatggtgagcgtgtgctcgtcctcggtcatcttctgccagctggggatgtcgttggagacggggactttttcgggcagccagaagttgccggtcaggcggtcccagacctcaaggtctttctcgtcttcgaggcggttccagttgattgcggagacgcggtcgatgagtttcagcggtttgcgcggaatggaaatcggtgccatgagtgttccttattactcgttgtcgttgtcgttatcgtcgttggatttgttttcgaactcctccggcgcggtcagccggagcagtgccctatagatggttcgtgacattgttggttccttagatggtggagcccccctcagtccgcttcgcggccagctcccctctctgaggggagctgtcggcgttagccgagtgaggggagtaacaacggctctctggttgttcaatgcgtgcggagaccgccgtctgaggccgaaggcgtacgaaggtacgtcgagtgccgaagaaaggcggtatacgctccctcgaacgatcagagcatgcaggagacgcagccttggacttcagtgccttccagggcttgctggcggatgcggatgtagtagagggttttgatgcccttgcgccaggcgtagatctgggccttattgaggtcgcgggtggtggcggtgtccgggaagaacagcgtcagcgacagtccctgatccacgtgctgggtggcctcggcgtacgtgtcgacgatggccttccagccgatctcgtaggcgtccttgtagtacccgaggttgtcgttggtcatgtaggcggccgggtagtacacgcgcccgatcttgccttccttgcgaatctcgatcttggaggcgatcgggtgaatcgagctcgtggaatggttgatgtacgagatcgagccggtgggcggcacggcctgcaggttctggttgtagatgccgtccttcagaatcgcgtcgcgcagggcctcccagtcggccgcagtcgggatcgcgatgccgtactgttcgaacagcgcacggacccgttcggtgcgcggagtgagcgaacgacgaccatcggtgtacttgtcgaagtagttgccctggccggccggcttggcgtagtcgctcgtagcgaagctggcgaacgtgcggccatgctccacggcgagcgcgtgcgaggcacggtaggcgtggtaggccacggtcatgaagtacatgtcggtgaagtcgaggccctcttcagaaccgtactggatgccttcgcgggccaggaagccgtgcaggttcatctggccgagaccgatggcgtggccctcctcattggcgcggcgaatcgaaggcaccgcgttgatgctggtgtgctcggccaccgaggtgagtgcgcggatcgccgtctccaccgtgtggcccaagccgccatccatcgccttagcgatgttgagcgaacccagattgcaggagatgtcgcggccgacatgcgcatacgtgaggtcctcgttgtatgcgctcggctcctgaacctgcaggatttccgagcacaggttggacatggtcacgcgaccttcgatcgggttcgcgcggttgaccgtgtcctcgaacacgatgtacgggtagccggattcgaactgcagttcggcgatggtggtgaagaacttacgggcgtcgatgtaggtcttcttgatgcggtcgtcggccaccatctcgtcataatgctcggtaacggagatgtcggcgaacggcttgccgtacacgcgctccacgtcgtacgggctgaacagggccatctgggccttctgtttggccagttcgaacgtgatgtccggaatcaccacgccaagagccagcgacttgatgcggatcttctcgtccgcgttctctcgcttggtatccaggaagcgcaggatatcagggtggtgggcgttgaggtacaccgcgcccgcgccctgacgtgcgccgagctggttggcataggagaaggagtcctccagcagcttcatgaccggaatcacgccgctggactggttctcgatgtgcttgatcggggcgccgagctcgcgcaggttgctcagcagcagggccacgccaccgccgcgcttggagagctggagggccgcgttgatgccgcgcgaaatcgactccatgttgtcttcgatgcgcaccaggaagcagctgaccggttcgccacgctgggccttgccgaggttcaggaaggtcggggtggcgggctggaagcggccggcaagcatttcgtcggcgtattcgatggcctgctgctcattgccggcggcgagctccagggccacagcggcgcaacgctgcgggaagtcctcaagatagaggcgaccatcgaacgtcttgagcgcgtaggacgtgtagaacttgaacgcaccaaggaaagtgccgaactcaaagccggcggattccacgtgctcgtagatgcggtcgaggaattcagcggaatactggttgaagaccgcagggttgtagtactggttgctgatcaggtattcgagacgctcggcggtggaggcgaaccgcttgctgttggtggccacgtgccctgtcacgtattcgcgttcggcggccttgtctttgtcgaactggatcttgccgtcggcgtcatagaggttgagcatcgcgttgagcgcgtggtaatcgtgcgccgggtcgtactgttccgctgcggtgtcggcagtattgtcgagcggcaggccggtggcggtgaggtcagtcattggaaatccttggaatatggcagaagtgtgtttactcagacagttgctccccccagtcaacttcgttgacagctcccctcggagaggggagccaatacctcgagggggtcaagatttactgttcggtgaagaagcggacgaggccgtttcgcacggcggcagtgtcttccggggtgcccatgagttcgtaacggtagaggtagggcaccttgcatttggcggcgatgatgtctccggcggcacagtaggcctcaccgaaattggtgttgcctgaggcgatgacgccgcgaatccacccgcggttggctggatcgttgaggaagcgtttgacctgaatcggcactgctttcttgaccacgccgccgccataggtgggcaccatgatgacgtacggttcgcggacgtttagcgccgggtcggcggcccgcaacgggatgcggtagacgttgatgccttcgtcctgcaaacggcatccggccacgaaccgtgcggtgttttcggaggccgacgagaagtagaccaatgcgccgatcgtcttgccttcggccgcgaattcgggctggctcagactcacgcggacaccgtggcggcggcgcggttgtcggcggccacctgctgggcgacttcgcgaatcaggtcggggcggtagccggtccaggagttgtccggcgtgatgaccaccggagcctgctggaaaccggcggcctgcagctgctcaagggtggaggggttctgcgtcaggtccacggtttcaaacggcacacccagcttggtgagctggcgcttggtggcatcgcactgcgggcaatgcggcttggtgaacacggtgacggtcatggcgactccccttgatgtgtggttctgatgaacagtgaagcgaaggccatattacagcggtgtgatttgaaatcaaggcactatatgtagtggcgcgtgtcacataacaaacctagatatagggtttttcgttgatattccgccattcccatgcacccccgaaaatcggcgtgcagcgacccgcccaatcacatgtggcattgttcacatttgcgtttgaaccgctcttcgactgatcctcaaccgccctgcaaccgccatcttgagtttcgaggggctgttttgaccctttccggagatctatctccgtttcgaggggctggtactcaagtaagcgcatccccaaaatggcggaatgacggtggggcgaagccgtttatacccgtgttctagcgggccaccagcccctcgaaacgggagtaaacctctacggaaggccaaatcagcccctcgaagcggagaacggatacctcggcaccccgtgtggagccagaagacccggccggatgtccaaacgagcatccggccgggccttaaaagtagttgttcagttatcagaatcgatgcggcgcgatactactccgcgtctttacggctccaacagatcttcgatgcggcagccaagcgtgcgggccaaagcgagcacggtggagacggcagctttgccaaggtctttgcggcgctgctcgtacatttggatggagcgcagggtaacgccggagcggcgggccagcccggattggctgagtccggcgcgcacgcggatcgtgtgcagccgggagtcgccctcggtgcgattatgggcggcccgctcgtcgtacacgtcgacgaatcggctttcgtcggcttcgtgcagagtcgggtacagtcgcacgatatcgtcgagcgacagcacatcgagaatgtccgagaaccgcactcccctggtccattggcagtatgcgagtacccatccggcccagtattcgggtgttgagccggcgcgcagtgcggctggcggcatatcgagaatgcgcgcccaaccggtttgccgcatgatttcggccaccagctcctcgccggacatgccacacacgtatttgggcgtgcctcgcccgaaaagcgcggccgcctcggaggtggcgaagaagtccatgaataggccgaccggcaacccgcaatcgttcagcgcataatcgaaggcgccggccaagttggccatggcgtccggcaagtatgtctcatcataggcggggatcatcgttggtcactttctcgcggatgatgtcgcgcatgaacaggccgtcgagatcggcttctgcacttttgcggcggtaggcttcgcgagctgtgcggtcgcgctcgttacgcaatccgtggtaggtcgaagcgcgggcgatttcgcagccttggaaccgcagtgccgcgaatgcctgaggactggcgagtacgatctgcttgccgagctcgcccaaccgcatcgcctcagcgagttggtcgatggaaatcgcgttattgacaaaagcgcgggcgaacgagaaatacgaatcgtcggcacgatatccgacgatgacgtcagcctgactggcatccggcagaaacacttgtttcagatattcgatgccttgcgcggcgacggcggtggtcggctggaaacgacggttttcgaccagcatggccagccagttcaggatggtgtagggcggctgggacaggtccaggaagaggagcccgtccgtggtcaacgtgtaccgattcgcgaaaccgtcatccagtcccgcgcacgcccattccttggccagctcgacgctgcgcgtgcaatagaatccgcggccataatcgttgttcggcttgaccagcccgtattcaggatgcttgatgacatgcgaagagccatgccacagttcgatcgatgcggtctccattggccggctccttctctctccttacatattcttgattatatcactgtggtgatagtcataggggaaatacgagatgaaaaataccgctgtatacgttcgtacacaacgtgaaatgtatacgaacgtatacaacactgatgtccggagtcatgctccgcagtggcgcagcggacgcgccactacaatcggaatatgggactgaagacgtggaagaagtggacggactggccgctgatggtgctgtccgtggtgtttctggtggtgtattcgtgggaaattctctcccgcacgcatatcgcgctgtgtgaaaccgtcatcaacgtgatctgggtggtgttcgtcgtcgattatgtggtctcgctgtggttggccgacgatcgctggcagtggttcaagcacaacctgttcacgctgctgaccatcgcgctgccgatgctccggcccttgcgactgttgcgtttgctgaccgtgctgcacgtgctgaaccgcacctccggcatggcggtgcgcgggcgcatcaccgtatacgcggtcggcgcggtgggaatgctcatgtacgtgggcgcgctggccgtgtattccgtggagcgcggggcgtccggatccacgatcaccgacttcggcacggcgttgtggtgggcgttcgtgaccgtgaccaccgtgggatatggcgacttctcgccggtcaccttccaaggcaagatcattgcggtggtgctgatgttcaccggcatcgcgttgatcggtattgtgacggccacgctggcttcgtggatcgtggatcaggtcaatctggagacggatcggcgcgaggacgctcgggagaaggaagtggccaaggaagccgcgcaagaggctattgcaacatcagccaatcccgaaatcgacctattgcgcgaggaagtgcgtgagctgaccgctacggtagccggtctgcgcaccgaacttgagcgacgttgattggcgaagcgggacaaacaacgattctgccaagaaggtccgcgtcagttgttgtcaccgcggattgcggcagaatcattgtcgccacggctgttttcttcagtcggctcaacccaacttttgataatttttatttttttgatacttttgataatttttattttaggttgattcagcgaggaggcggtccacatgaaggcaaaggaaaacccattcaagccaacggcaggaggggaaccgcccctgctcatcggccgaggcaaagttatccgcgatttcgagaaaggtctcgataacggagtcggtgccccagggcgcattatgctcgtcaccggcgctcgtggaaccggaaaaaccgtgatgctcactatgttcggagaccgggccaaagcgcgcagatgggatgtcatcgaagaaacggcctctgccggactatgcgaacgccttgttgatgccttacgaaccgggcgaggggcccttgaccacctcactatccgaccatcgttgacttttgctggagcgggcatcggcctcggagaagccgaactatccccgaagcgtatgcccgaaacgttgagaagtgccattgccggacggttggatgcgcttgagaagcgccatgctgggttgcttatcaccattgatgagactcaagcggctgagcgatccgacatgattgccatcgccactgccatacagcatcaaatcagggaacgacgcaatatcgccatcgtgttcgccggtctcccacagatgatttctgatttgttcaatgacgaagtcatcacgttcctacgtcgcgcgaaaacgaacatgctcacagatattcctcttgatgaagtgcgcgatgctttcgccacaacattccgcgcctccggcatgtccatcaccgacgctcaattaagcactgcagccaatgtgacagccggatacccctatatgattcaactggttggctaccatatctgggatgccgcagacatgcgggactcggataccatcatcgacgctgatgttacggcaggtatcgaggaagcacgtattgaccttgataacgccgtgtgcatcccggagttgcaaggcttatccaaaaacgaccgtgagtatctcgaagccatggcagcgtcagatggtccctctcccaccgtgaatgttgcacagcgcatgggcaaaacgcctaactatgccgccacctaccgcaaacgcctccttgacgccttcgttatccgcgaaacagaacgaggcgaagtcgattttgccgtgcccttcctgcgcgaatacttgcgtcggaatcagtaatcggcacaatgcacagtatcgatatattccgttccatataatgacttttcgcattcagatacacaatggacggcctgttgagtagcactcagcaggccgtccattctatttagctattcagttatcggaaacacacctcaggccttgaccggagcgccagcgacctgctgggaggccatcacgccgaacaggtagccgtcttcggagaagtattcgaaggtacgaccggcgaagtcgcggcattcgaatctgatatcgttatcgattcgatcagcggctcacgatactgcccttgcatcgctgtgccactgttgaatgtgcccggctggctcacctttgggtcaccgccgacacatccttgatgccgatggttatagagtcgcaaattcacgactggcgcacctgcccacgcacctatcctgtcatttcgagcgcataatttgctaccacatccggtcagggcaatcgaccttaatggcgtaaacggcacttctcaatacgtaaacggcacttattcttggctcccctctcagagaggggagccaagaaatatcaagctcggcctcccaggagagagccagaataatgcaccatcaaggcattaggatggagggcatgagcgatttgaacgcgttgaatcttgagcccggcgaagtggttggtgggtatacgctgatctcccggctcggctcaggagctatggggtcggtgtggcgggtgcgcgacgacggcggcaccacctatgccatgaagattctgcgcgactccctgaccgacgagtcagtggcaggctccggctctgcgtccacggccctgcacgaccccgacctcaagcccgatgtcacgccgcgcgagcgcctgcggcgcgaggccatggccttgaagaaggtcaatcatccgggtgtgtgcggcatcgtggatatggaactcgacgatacgttggcgttcatcgtcactgaactcatcgagggcaagaatcttaaggatgatgtggccgccaatggccggtatgtgggcgacgatctggaacgcttggcccgcaagctcatcgaagccaccaaagccgtacatgcggccggcatcgtccatcgcgacatcaaacccaccaatgtgatggtgtcggccgccggaccggtattggtcgatttcggtatcgcgatgggcgagggcgaaagtcacgtgacccgcaccggcctagtgatgggtacacccggattcatcgcacccgagattattgacggtgccgaatccgacgacgccaccgattggtggtcggtggcgtccgtgctcgcttttgccgcaaccggcgcgcctgtgttcggcaccaagccgatgatggcggtacttgagcgcgaggcctcgggcaacgcgaatctttccggactaccggccggcacattggctgccttccattctgcactggacccggatcgcagggatcgttgcacgccggatcaattgctgaatgccatcgccttggatgcgttgaatcccaacgcttggcagggcgagcaggcgggaccgttcgccgcgggagccgtggctggacaaccggctgcgatcgttgccgaagccgcggaggcgatgcccccttttggcgcggccggcggcgttgaccgcaataatccccgaaccatctggcgcgcggccgaggaagccgctgaggctcccaccatggccgtgttctccggcaataagggcgataacggcgatggcgaaaccgccgtattctcgccggctggcgccgctaccgccacgctgcccttagccgatatgccgccacgtccgccggccggtgcggagcaggccacgcaactgttgcccgacgctgctgccgatttcaccgacgacgccggcacacaggtactcaccggcgcgaccacaccgatgccggaccaaaccacaccaatggccggcgccaccacaccaatgaccaacaccgattcgactccggccccgaccacgccgctggccgagcgcaccaccgtactccccacgccgcagccgtcatcattccccccgtccggcaccgcccagagcagctgggatcccgcaagcaaccagcccacagcggtggaccccgccattcgcccggcattgcagcgcatcatcgaccaaaccgcccaagcggcccccaccgaaaccatggtccaaaatcctcccatgcccaatccggtggacgtgaagcgaggggaatatctgcagcgcggcaccctgccattgatcctgctggcggcgccgctggcggcactggcggcaaatgctccgctcgtggccatcatcgcggccactgcgttgttgtggctactgctcaccctggcctataacaccgaaccccagcttgagcgcgagggcaaacgcggcggcgagcgcaaaaactccgattcgtggattcgcgtggcgacttttccctggcatctggtcaaagccctgctgctggccattccccgcatactgctgctagtcatcatctatatggcgggaaccgccgtggccaccgcggctctggcactgcccgttcacaccatctcctggtatttcaccgcggattggggtattccggtgccgttgctcaatgatgtgccgttctccgcttccgggctggcgctgggcggtttcatggccatcggctggctggtcactgtgttcgccccacagtcgatgatgattcggctggggggcggcgtactgcgcgggctcaaacacagtcgcccggcgggcgcgccatccaccgaagtgggtggggctccacctgctccagtggcgccggcgcccaagggcggcgggcgcggcaccgtgctgttcaccatatgggccatcatcaccgtggccttgtgcgcgatgccgattctgggcatgccgatcaactggatgccgttcgcctagagcggggcggaatctcacacatcagccatccgcacacatggccgttgtgtatccgatacgttcgttccgtcacacttttacagggaattcacctcagatcagctctgggtgcagtcctcctcaggcccggtcattatgatggggcccaaacattgaagcgattgcaaggggatagctatgtcagatccgaagcgtcaggccaagcgtgccacacgcgctgagcgccgagcggccgaggaggccgcccagcaggcacgggccgagcaggcggctaaggaacgtaagcagcagaccatcatcggctgcattgtggtggccattattgtggtgctggtggccatcgctggattcgccgtatacaaggctatgcggccgtccaacaccagcagcagtagccagcaaagcaacatgaccgtggacgaggcctatagcaagctcaagaaagtcagtacccagccggccaacgccgatgacaaggccggcttcgtgatctcgagcaaggggtacggtcagaaggccgaaggggcgcccaccgtttccatctacatggagccgctgtgccccggctgcgcctcggtgaaccgccagcttgacccgacgctcgtcaagctgatgaacgccggccagctcaacatcgatttgcacttcctcaatttccaggacaacaagagctccgacaactactccaaccgcgcgttcaacggtgccatctacattgccgagcatgatgacaatcccgatcacctcatgagctacctctccaacatctacgctgaggatttccagccgggcgaattgtccaattacgagccggtaagcaacgccaagctggagaagcaggccgtcaatgccggcgtgagcgaggatgtggccaccgcggcattcagtggtaagaacgaatacgtcaagtggctcaccgcctccaacaactacacgatcctacgccccgaactgttcaacagctccggcgcgttctcctcccccacgctcaccatcaatggcgaatactgggatctgaagcagctcacgctggcggacaccagcatggtggacggattcctcaagtccatcggcttggactccgatcaggtgggcgtggaaggccagatgccatcgatcggcgccaacaagaagccgatttcgctggccgattaattaccggcgcggctcggcctgaattgaccactcgagaactaccggtatactagagatttgttcaaaacgatttacgcgttaagaacaatcgcctctttagctcagatggccagagcggccgccttgtaagcggcaggtcgtcggttcgatcccgacaagaggctcgacgcgtagaaaagtggcgtattatatgatacgtagatttttctacgcatataattcttaccttgggtaagtactccaggagccttcccccaactatgggcttcctggaatgagggcggagcgtcccccaaccagctccgcgccttcaggggggcgggaacatccccttctctcccgccccctttttcttttctttttttgagctcagaacaatctgacgagcaggaatggtgacggtggccggtgaaaccgcagtacgggccggaacaaccgttacgatgggtggcgtaatcgttcatccagcaggaagagtatggcaatggcacggcgttggaccccgcagcggtttgttacactgcgtcgcatccgcgtaatcgcctgtatcgcggcgaccagtatcgcgctggctggatcattcgcgttcaccgcgcgtaaatccgtagccctgaacatcaacgggcaaaccacccaagtcaccacatatgcgatgacggccacccgtcttctggaggaacaaggggtggatatcaagacccacgatatcgtcactacctcgtccggcgaccaactcgccaatcatgccgtggtcaccgtacagtccgcctaccagaccactatcaacatcgacggcacgtccgttcccttctggaccgtggccaccagtgccgaccagttgctgggatttttcgaggaaaaccagaacaacgccacaaaaatcaccgtcgacatcgacaatgtgtacaaccagctcaccggcggactggtcatcaatcaggatggcccggtcaccgtcattgcggacggcaagacttccgtggcccccaacggcaaactgcctgcggcctccattcttgactccaaaggcatcgtgctgaacaaagaggaccgtgtgagcgtcgaaaaggacggcgataccactatcctgcgcgtacggcgcgtgacgcatggcgagaaaacacgcacagccatagtgccatactccacacaaaccatcatcgactccaatcttcctgaaggccagtcggagatccgccagcaaggcgtcaatggcgagaaaacccaggtgtataacgtcacgtatgtcgatggcgtggccgaatcggagacgctgaaatccgaaaccgtcaccacgatggccatcgaccagatcatcgccgtaggcgccgccaagtctgataccgataaaggttccgacaaaaaatccgactccgccgataacggcaaggccgattccggttccaacaatcagcacgagtcgtccggtaacaatgccaacaacacaggcgacaagaacaacagcagctctggcaacaacacgaacaccgataccaacaacaatgccggcaacaccggcggcaacaactccggcaacaccggcaacaccggcaattccggtaacactggtaattccggtaacaccggcggcggtacgaacaacaattccggctcttccggctccgattcaggaacaaccaccacgccctccggccgactctggcacgccaccgtagcccaggctcaggcctatgccgccggtgccgccgcgcagcgcgggtggacaggcaacgactgggattgcctggtcaaactatggaaccgcgagtccagatggctgtggtatgccgaaaacgcgagctccggtgcctacggcattcctcagtcgcgaccagcagacaaaatggctgcgttcggcgccaattaccgtgacgatgccgccgtacagatcgattggggtctgtggtacatcgcacaagcctacggcagcccgtccaaggcatggcaacattccgaacaaatcggttggtactgatcggttacgaagcccacaaggaacacacgcttatgaacgacaccattcccgccaccggtcacctgttaggtgccgccgatatccgtcgtatcgcggccgatgccggcatcagccccaccaagaaattcgggcagaacttcgtcatcgaccccggcacggtccgtcgtatcgtacgcgaggcgggagtgaccgctgccgatcatgtcatggaagtcggccccggcctgggatcgttgacgctggcgattctggaaaccggcgccaccatgaccgcagtcgaaatcgatccgccgttggccgaacgactgccgggcacagtcgccgaattcatgcccgaagccacgtcacgactcaccgtcgtcaatcgggatgccttaaccgtcaccccggagaacgtgcctgatttcagcgatgacgcatcgtttacgctggtcgccaatctgccgtacaacgtggccacgccgattctgctcacgctgttggagcgtttcgacaacctcggctcgttcttggtgatggtgcaaaaagaggtggccgacagactcgccgccaagcccggttccaagatctacggcacgccgagcgtgaagctcgcctggtatggcaccgccgaacgggtgggcaccatcggccgcaatgtgttctggccggctcccaatgtggattccgcgctcgtcagattcacccggtatcaggccgatgacccggccgccccggaagcctcgaacagcacggccgacgacggcacacaacgggaactcgtatttcgtctgatcgatgcggcattcggtcagcgtcgcaagaccctgcacgcggcattgaagaccattgcgccttccgaggcattctccatcgccggcatcgatccgacccgtcgaggagagacgctcaccatcgccgaattcaccgctctggccaaggccatcgaatcgtgtggagatggagatgaggcacaatgagtccggtaatctcacatccacgcccagccgctgcccgacatcagttcgatgagctctcccccatcaccattacggtggattgcccggcgaaaaccaatctcaccttggaagtgggacctgctcacgacgaatggggcggacgccacgaactggacaccacctactgtgcaatcggcgtatacgacaccgtcaccgcaaccgccaagcaacccggagcgggattctctctggagctcgaaggcgcttatttgggcgacttggcctcctcacgcagcgacatgcgccgcaaccatgcggtactggccctcttcgccatggcccaggcggccgagcgcgagccggatgtggcgttgaccatcaccaagcgcattcccgtgggtgccggactaggcggcggttcagccgacgccgcggcgaccatgctggcggtcaatcgtctctgggatctgaactggcctatagagcgcctgcgcaccattgccgccacgttgggcgcggatatgccgttctgcctgaccggtggccttgcatacggcaccggtttcggcgaacgcatcacggatatcgcccccggcagccgcgatgagctggcgctgatagaacagggattcagcggcgaagtattggtcggcgcgtaccagtcgcaactcagcactcctgaggtctaccacacctttgacctcgtgggagccgcagaaggcgaccgcaatcatctgcaggctgcggcaatcagcctgcatccccgcagcgggcaggccatcgacgccgccacgcaggcgggtgccagccatgcattcgtctccggatccggcccctcagtggtcgctttcgccgccgacgaggcagcggcacaacgcattatcgatgtgtggcgcgatacggctgtggtcgatcgcattattcgagccaaatctcccgcacaccccaatatcggcgtcagacagtgacgctaaggtagcaaccagccacccgacccatgaaagaagtccaccgatgacgtatcaggttgatgaacgtgaagcccgcaaggcgtacgtgcgccaccgccagaccatcgtcttttccatcagcggcgcggtattggcagtagtgctggtcatagccctactgttcaatttccacgttttcggcctcggcgaagtggagactccggcccgccagccgaattacggcaacgcggcaccgtgcgcggtcaaggacagcagcggcaaagcgcaatacgtgtccaacgcttcggtcggcatccgcgtgatgaacggcacctctcacggccaattcgccaaggccgtgggtgaggctttggccaatcgtggattcagcgtgcagaaaatcgataactattccagcaccggcgttgaacgcaccaccatctacttcggcaagaacgccattaatcaggcgtatacgctgatcggcaatttcaccgacgccaccatgatcatgacggctcgcgaggatcaactcatcgatgtggtcatcggcgccacgttcaacgatctgcaggacaccaaatcctccccacaatccggtaagaccatcaccaatatcgagggttgcaaggccgccgatagcatgaccaagctgcccgccgacaccaaacacgacgcatacacggcggagtaaggcgcatacagcttcatcttcgcgaaaaaccgtacgctgacacgtattcagcgtacggtttttggtatcggactagtatcggactactgaatctcggcgtaccagcgcttgagttcttcgacggccacatcgtggtccaccggaccgttatccaagcggtattccagcatgtgcttgtaggcgcggccgatcatcgggccgggctccaggcccagcaactccataatttcgttgccgtccagatccgggcggatcgcgtcgaagtcctctttcttcttgagttcgcggacgcgctcctccatctcatccatggcctgggagaatatcatcgccttgcgcttgttttgtgtggtggcgtccgcgcgcgtgagcctgttcagccgctcgtacaggtgcccggcatccttgacataccggcgtacggccgagtcggtccacggctcgtccacatagccgtggaagcgcaggtgcatattcaccagttccgagacgtcctcgaccagatggtggtcaaaacgcagcgccttcaaacgcttgcgggtcattttggcacccaccgcgtcatggtggtggaagctcactttgccgcccggctcgaaccggcgggtcttcggcttgccgatatcgtgcatcacggcggccaagcgcagcgtcaggtcgggggcgggcaccgggccgtccgggccggtttccagggcgatcgcgcgttcgagcacaatcatcgtgtgctcgaagacgtccttgtggcggtggtgttcgtcgatctgcaattgcagggccggaatctccgggaagacgatgtccgcaagaccggattcgaccaacgcctcaaggccggcgcgcggacggtcggagagcagcagcttggtcagttcgtcgcgcacgcgctcggcggatacgatgtcgatgcggtcgcgcatcgaggtaatcgcctcggccgcgtccggcgcgatacggaagcccagctgggccacgaatcgcacggcgcgcatcatacgcaacggatcgtcgtcaaaggactgtcgcgggtccaccggcgtgcgcaacacacccttggacagatcactggcaccaccgaacgggtccacgaattgcaggtcgggcacgcgcagggccatcgcgttgacggtgaagtcgcggcgggacaggtcgccctcaagcgtgtcgccataattgacctcgggcttacgcgagtccggatcgtacatgtcggagcgataggtggtgacctccaccttgacctcggtgccgtccgggcggcggcgcatggcacccagcgtgccgaacttgcgccccatgtcccagaagccgtcatgcccccaccggcgcagtatcggctcgaactgctcaggccgtgcggatgagcagaagtccaaatcgtggctctttctatggagcagcaaatccctgaccgggccgccgaccaatgccagctcgtaaccctgttcggcgaacagtcgaccaagttcgatggcttcgggccatacttcgaaattcaatgggcaccttcccgcgtgcgacgtttttctgccctaccagcataccgttaccccacctgcacacggggttgagtaaggtggagaatatgattacgcccgccgaccttgcccgcatactggggcaaacaccagattcggcggatagccatacccaagaccacctgctgtatacgtccgaaactccgcatcattccgccgattcgggcgattctcccgatgtcggcggcaccgtgagccactccaccaatcaggccgttcatcaagacgaagtagacgcagtaccgactgcgcaacattccggtgtacccggcacacccgcaacgcccgccacacccgcaccatccgaatccgaaatatcggacgccgccagcgacatgcccacaccgaagccgatgatgcccacaccggccaccgtcttcggcatgcatgccaccgtcaccatcgccactaccagcggcactatcgaggggcaggccgatggtatcgccggcgaggccggtgccgagacgattgccgaggtcgagccgattatcgccacggcacaaacgtccgtaaccatcgtcacgaacgattccgcggcgaccgcccacgcggccgtagatactgccgttgcggtcgccaaggccgccgccgcgcataccgcagcgataccgactccgcgcgacgtgctgatgccgcctgcggcacgtaccgcaccggccgcaacgccggtcaccatgccggtctcagcgccgtctgcagcaccagtgaggcccgcaacgtcagcgcatcccacgccggccacggtcttcggccggcatccgtccgcggatgttgcctcgccggaaccggcagtgccagtagaaccggtgacgccatccagcccgactccggccatgatgccgcaacgccgtacgtcggacggtccgaccacattcgcttcactggatgcccaggaactgccggtcgtacgcgaatattcggcaggcggtctgattttcgatgaccagaaccgcgtggccattatcgcccgtcattcccgctccggccatctcgaatggtgcttgccgaaggggcatatcgaaaaaggtgagaccccgcagcagaccgctgtgcgcgaagtgcatgaagagaccggcatcctgggcgaggtgatcgattccatcgccaccatcgactactggttcaccggcaccacgcagcgcgtgcataagctggtccatcacttcgcgctcaaacagaccggcggcgaactgacggtggaaggagacccggatcatgaggcggaagacgccatctgggtacgttttgaagatttggatgacgtgttgagctatcccaacgaacgcaaaatcgcgtggctctacgccaggaagaagaacaggcaggcaaacgagtgaacctacccggagtcttacgacattgcacacgtctggcacacgcactggcggctggcgtcgccgttgtggcgatgctggccgctccattgaccgtttacgcgaacgatacgacggacacgactgattcatccgatacgacggacgcaacgggcaatcataccgagaatcagcccaagcagagcattgccatcacgcaaagcacccccatcgtcacctccaaatcgggctatcatgtcaccgcggtcatcagcaatacggacagcacggccacgtcaagcggcacactgcacctgaccaccaatacgctgttcacctttgtctcgcgcaccgatattcagaattgggccgagaacaacgcccccatccccacccccaacgagttgggttccgttgacgtgccatcgattcccgccggcggcactgccaccgtcaccatcgaggtgaacgccaatcagcagacccttgcctccatagggagctgggggccgaagccgctgatgctgtcgtatatcgtcggcaatcagatactcgccgatttgccgagttttctgacccgatcttcggatgggctcaacaccgcgacgacaccggccatgaacctgaccgtggccatgccctacaccgccagcggctggcaggtcgataacaaggccatcagcaatcgcattgccgaaaccaccacttcctcgacatcaacatcgtccaagtccaacagcacggacaagtccgataacgccgacgccggcaacgcggccaaagccactgatacgcaagccatatccttatccgagcaggatgccgataccgcgcgatcccttgggcagacattcgccaagcaccgctcgctgcaagtgatcgcggatcctctgtattggcgtcagtccgcagtgcaaccgtccattgccggcatcatgcagcccgccgactttgacatcaccgcctataccgcgctgggtgataccgcggcctacgaaaaggccggcatcaccactgaacagtggaacgccaagcaggcggccgcatggtatgccgccggaaacgactccgaaacaccctccgcgtacgcatggcagggcaacaactgttggacgttggatgcgctgaccgcagcacgcgagcagggctatgacacggtgattgccgatgcctctttcgatgccgaccagactgaagccgtacacacaggcacctacgtggtggatacgcctgccggcgatgtcaccgtgctgaaggagcaatcgaccttgggcacgctggccaagggccaagccaccagcacggacgcgcaggccgagtccagcgatgccggtcggttggcccgactggtcgctcagagcgcgttctaccagatggaacagccctatacatcccgatacctgcttatgacgttctcccgcaccacggaggccagctggatcgatcaggtgatgagcgccttcgagcaggcgtcctggttgaatctgacggatctgaagaccatggccaaggccgatccgtacaatgtcagcgattcggtcaatcccgacaaggccgatgatgccaacaccgccaatacccggtcggcattgagacagttggccgacagccggcatgacatcatgcgcatggccacctccatattgaagaacgagattgattccgacgaggtctcgtcgttggccccacaggccctggcccggcaggatgccaatgacaccgtctcgcacagcaacgatccgacgcaatggattggctctttgctggtgctgcatgacgatatggcgctgcgatccatgtctggctccccccagccgacagccacgcgaaaagccatggtcaacgccgcgaaaacactggccagcgatcttctgaacggcgtacgcatcaacccatcggaatcaatatccgtgttcagcgaatccgcgaaaatgccaatcaccgtcagcaatgaccttccttatgccgtcagcgtgcaggtcaactcgctgactgactccatgcagatcgtcacctcgcgaaccactgacatcgatattcccgcgcatagcgacgctcaggtgaccttcaccatccgcgtttccacttccggctcatcgacggcccatgtgtcgctgagcgaccgggaaggcaacagcttcggcaacacgcaggataccgcgatcaccagtgtgatgcgcgtcagtgatgccagcggtttcattatcatcggcttcgccgtgctactgtgcattatcggcctgtggcggcagttccatcggaagaaggaccccgacgaatgagttcaaccgtaggtcgtaattccctgatcatggccacgggaaccgctgcttcccgtgtgaccggtcagctccgcacgattcttctcgctgcggccatcggcaccactggattggcggccaacgcctatcaggccggttccatgattccccaatccgtgttcacgctggtgtccggcggcatcttcaacgccgtgctggtgccccagatcgtgcgcacgttgaaagaaaaagacgcccaagaacgactgaatcgtctggttacgttggccatcggcatcctgttggccatgaccgtggtgatggcggcggccagccctctgcttgcccgcctgtacgtgggtagcgacgatcaccagatgatagccctgaccacctcgttcaccctgtggtgtatgcctcaggtgttcttctacggcctgtatacggtattgggtcagatcctggccgccaaagaccatttcctcacgtatgcgtggagctcaaccggtgccaacattattagttgcgccggttttactggttttattctgctgttcagcaaggccaatgaacagcccctcgaattctggaccgccgacaagatcgcgcttaccgcaggcacctggactttgggcgtggccttccaagcgctgatactgttcctgccactggcccgtatcgggttcaagtacaaacccagcttcgggcttggcggctttggactcaggtctatgggtcccgtggcgttaggctctttgggcgtggtggtcaccagcgagatctgcggcattatccttacccgtatcgccacatccgcaccgcagcgcgcccacgaactgacgggtgccagcctgttcagcgtggcaggcaacgcgacctatcagaatgcgtacaccctgttcatcctgccctattcgctcatcgccgtatcggtatccacggctatgttccccaaaatctcccgttccatcgcagctgcgaatctggatgaggcacggcacgatctggtgagcgcgctgaacaacgtagggctgctgatcatatttttcgccgccgccatgattgtgttccccgaaccgatcatccgcgcattgcttccgtccgtctcgatggacgagaccatgctgatttcctacgcgcttatcgccctatctgtgggcactcctttgggatcggcgttcctgttgatccagcgcacgttctatgcctttgaggacggcctgcaccccttcctgtccgcggtgatgcagtatgggttcacctcggtattcatgatgatcggcatgatggtacttcctcctgagcattgggtactcggcatcgcctgctcggtgacactcggtggattactggcgttgccgctgacattgatgatgttgcgccgcaagttcgaaggcaatcttggtggtcgggagatcacgaggacatatgccaaggccattgtggcggcactggcttccggagttgtggtctggctgatcaaacgaccggtagtcgcactgttcgacgcggatattcgatcggtaggcgggcacatgagctggtggtctgcactggccatctgcgtggtgctcaccatcgtgctggccgtagtatatgtggctgtgttgtgggtgatacgcaccccggaactcatcagcgcctatcactcgatactggcccgtctacacaagactccggccagtgaggacgttgctgtgacagcccagccggaaaaagtcgacgatacgcaaatcaatcctgagacggagcccgtcaaggatagccccacacgtagaatatctaagaccagtctcgaacaccaatcacacggagccgaacgcactatgaaaccgcaactcggagacacgattctcaaccgatacaccttggtatcatcgttgcgtgaggagcctggcattcaggcatggaaagccaacgaccgtgtgttggcaaaggattgccagctgttcatcattaccaatcgcagcgctttcgccgcaatcgatgagctcgctggtcgcatcgccgccactcgccctgatcgtgtgattcccgtactgaaataccgtatggaatccgacgtacttctcattgtcatgccggtggacagcggccaatgcctgactgactacatggtggataccgacaagccgctcagctacagcgccatccggtcgattatcggagaatgcgccaacgtgctgcgcgaggtcattgcggatactcccagcagcatcgtcatcacaaccgacaccgttcgagtgactacctccggtgtgcagattgccgatgcaccatgtgccacgatgctggccgacacgtccgctaccgatctgcgtacggacggtcctgaacggtatgcgattcgccagcttgcggcattgctctatgccctgctgacacgcacgccaagccaagcgacacccacattcaatctgcgcgccttgccgcaagacacccctggcgaattccgcgtgatttgcaagcgtggattggccttaagcaagcccgacgagcacacgttgccgatggctgcccttgtagaactcgacgccttgttgggtaattggaagccgctctctgaactgagcgatgctgatatcgctttgccgagcgtggaaagcgattgctcgattaccaaggcgatactgaagcccgccaacgagaccgatatcgtgcctattcccagcacgttgattaacagcagcagtcttccggaattgtctattaccccttccctgccggttcagccggccgccgtccccgctccgcacgcgatgtcaccggctcctctgcctgatggatccagtactgctgacggcaaccagtctcaatctgacgcccgccgtctgtttgacttcaacctttctgacgcctgggagcacgagaatctttccggtgaagacaccggtgactggtacagcgaaatgaatccggcccccatcggcggtccgggtgataatactcggttgacggtgcctattgttaccggcggtatttccgatgccaccgtgggagagacgaccagtcgtattcccgtgttcgatgtcagcggccgtgctgtggcccccggtgaggaatcgctgcgtgccttggaagaggagcaggcccgcattgccgaagtaagcgccattcctccgagcttcacaccgaaggatgtgccggatgacggggatgacagcaagttgcccgatgaacatctgttcggcaaactgtcgaccaaggtcgttgccatcattgtggctctgatattggtagtggcagcggctgtttgggcagtgcatgcgttccgatcctccggagacaatcctgccgatgcttccagcaactccagtgaaggtgactggcccgatatcaatgctgacgctgtgccattcggtggcagcaagaacgcgacgaacggtggcgccactgacgattcctcaaagtcgagtgatgccactcagagcgaatccagggactcggcatcagacaagtccaagaagtccgagactgctgattcgtcgtccaagaagaccaaggccaagaagtccggcgataaggattccagcgctgctccgcaaccgcgccatgagaacaacacggcgtttacgatttccagcgccaacttcctgtcgaatcctggcggccaatccgggtacgcatactacatgcaccttgaccagccgcaggatgcgtaccgcatggttatcaccatccgcacatccggtggtaagggctatattcgcgcaaataccactggagaccccactcagggcgagcaggtggccgaattcacctttgctgaaggtggcactactgaggtgaagttcaccaaagccgtcaatacgcaggatctgctgctgtgggtgccatcgggtagcctgccgcagaaccagctgtacatcgagaaggtggaggtcttctaatcggcatctataccgataactgacccaagaagggcggtaccgttcgcatacattcgacggtgccgccctttcttcgcgtctggctgaatgacatggaatatcgtatgggggtgtgacaatgtttcacgtgaaacataacgtcatcattatcggttctggtcccgctggctacacggccgccatctatcttggccgtgcaggtcttaatcctgttatggtcactggtgcgttgtcgccaggtggacagttggtcaacaccactgaggtggagaacttccccggattcccggaaggtattcttggcccggatcttatggatcgcatgaaggaacaggccaagcgcttcggtacaacctatatcgcagacgatgtctcttccattgaggcgtgtgagagtgattcggtcaagccgacctatcgtgtaacgctctccgatgactcccagttggaggcatcggcgcttatcatcgccacagggtcgtcattccgtaagcttggggtgcccggcgaacaggagctgtccggacatggcgtctcgtactgcgccacctgcgatggcttcttcttcaggaacaaacctatcgtggtcgtaggcggtggcgattcggcttttgaagaggcattattcctgacccggttcggttcttcggtcaccttgattcaccgacgcgatagcttccgtgcctcgcagatcatggtggaccgagccaaagccaatccgaccatcaccctgctgaccaacacagtggtgacctccattaccggcacctcctcccccacacagaacaccggtgcacctattgccattcctggcttgacaatcaaacgaccggctgtggcaccggccagtgtcagcagcattgccgtacgtaacgtggtgaccggagaagaaagcacgctggacaccaacgccgtattcgtggctatcggccatacgccagccactgattttgcagctggtgttgtggaccgtgacaatgatgggtatgtcgtggtgcagggtgccagcacggtgaccagtgcgccaggcatctttgctgcaggcgattgcgtggatcgtacttatcgtcaggcaatcagcgcagcgggcatgggctgccgtgcagcgctggatgcgcaggcctatcttacggactgattgcggcgacctgatgatggcttgctgttctgactgctgcctgtgacataggagcagcgctaggtcagtgttacagcatgccgcccttggatagtacgcaccggtcaaaggcatagaaaggcccctcaggcgacggaaaatcacgatgtgtgatttgtcatcctccagcctgaggggttttctattgcgacaggggctacaacgcaggcatacgcccctgccaggaatcacgcagaggctataacgtcttgcgcgtacaacgcactgcacagcaataatgccggcgacagtgacaagccgatacaatgccaagtgacaacgctaagcatcggtgttgtcactgacgatgccggcgacaacacgaatgttcttatcgtgttacacccatttggaatcggcatcgccttggctcggcaccagcagctgcaggatgcgatccatatcctctggtgacgagaagacgatttcgatgcgaccatgcttggtgctgcccttaatcgacaccttggtgtcgaaatgattttccaaactctgctggatggcggaaccaacccaaggattggtcttggacgtcttgggcttcttcggctgctcccccgacgcaatcttcatggcgacgatttcttcggtgctgcgtacagaaagaccttccgcaataatacgagaagccagcttgtccatttcctccggatcgctcagacccaatagcgcacgcgcatgaccggacgatagcacaccggcagccactctcttttgcacagaggccggcaggttcagcagtcgcaaggtattggcgatttgcgggcgagacttggacaccgacttggacagttgtacttgtgtcaacccgaactcttcaatcatctgctggtaggcagccgcctcttccagcggattcaaggccacacggtgcaggttttccagcaatgcatcgcggagcatatcatcatccgcagtggttttgacgatggcgggaatcgtctccaacccagccaactgggatgcacgccaacgacgttcacccataatgagctcatacgggctgtccaaatgaccggcaaacggatttgtgctggattccgtctcgtcgtgcttggcggctttggccgcagcaatctggcttgccggacgcttgcgcacgactatcggttgcagcacaccaacttccttaatggaagcagacagctcattcaactcatcctcgtcgaagatggtacgaggctgatgtgcattgggcccgatatcagacagtttgagttcagccagataaccaccggctaccggcttgagctcgtccttcttatctgtgtcagcggtctttgccgccgatgcagtctgagatgtttcacgtgaaacatctttgacggtgacggatgtacgatgtgccgtctgagacgcagacggcttgccgccctgctgaggtgcggcgaccttaccggtttgaggtttctccgtaccgaaaaacaggtcgctaggatgagtaatggtgtccaatgcgggcatggatgcacgtttaccggcggctttcttggctgctttgctggacgataccatctgaggcgcggcaggctttgattcctgctgggcagtagccttcttggcgggggttatgtcagcagtggccgccggagtagacgaatcctcctcaatcattgcgggctgctccgccactggctcctcccctggcaatgtggggaacaaagcgccaaggcccttaccgagtcgtgattttgatgccattacttgttcctcctcgcatcaatggtgtcaaggacttgttgcgaacgctgtgcgatttccaaagctgcttcaccatacgatatggcacctatgccacgaggatcataggcaatcaccgattgggagaaactcggcgcttcggagatcttgactgaacgcgggatggtggtattcagcacaatgctgggatagtgtcccttgacctcgttatatacttcacggctcaatagcgttcggcgatcgaacattgtgacgagcatggtggacaccagcagtactggattgaaatgctcctgcaccaaaccaatcgtgttgatcagctggccaagaccctccaatgcgtaatactcagcctggataggaatcagcatctcggtcactgcacacatggcgttgatgaccaagaggcccaagctgggcgggcaatcaatgaacacgtaatcatagtgtttatctgattgacgcaggtagaggtccaaggcctccttcaacaatgtgtttcggttgggcagatcagccacttccaactcggcaccgctgagatcgattgatgcaggcacaacatcaagtgtgggaaaatcaggacagaccgtgataacatcacccagatcggaacgcccctcgataacgtcatagaccgagggctctcccgatgcatgagatacacccaacgccgtagaggcattgccctgcgggtccatatcgatgaccaacacctgcgcgcccttgttcgccagcgccgcagcggtgtttaccgtggatgtggttttacccactccccccttctggttggccacggcaatacgacgggtacgttgaggtttggggaaatcggttttcttgagtacatcgtagcgtgagctttcatcagccatctggctgccaagcactgaaccgtgaccatcgaatattcgctgaagcgtttcggaagccgattctataggttccgactgatgatccttggtggacatcgctcctccttgcacagacgtaagttccagtgttctcattcgtatggacatgatgctcgttatccacaattgcgatatgcaatgtggataagtgtggataagtgtgaatgacgttgagtgttagattatgtatttgcagacgaaaaacattgaaaaatcagtgttttcatcattctgcacatcgtcccgtaaaaatgtggataacttatacgcacatatggaaatgtggataactcaatcagtactccactcatcgcttatccacaatcaccacgtgggtaggctcaagatccggtccgacagccgcctcaacgacgcgtggacgacgaccaccgaattttgcaatctccttgccagccttgtcgatttcagcctgagcagaccgtcccttcagtgcgatcaactgtcctgacggtttcagcaacggcaacgtccagccagagagtttggtcataggagcaaccgcacgacacgtgacaacagcgaacggatgaatttcccgcttccgtacctgctggatgacggcatcggagcgtccacggataatctcaacgttctgcagttgcatcaggtcaacacattcatgcaaccattcgattcgccgctccatcggttcaatcagcgtgaagtcatgatcaggcaaacacgcggcagccaccaatccaggaaaaccaccaccactgccgacgtcggcaactgttttgaagcgaataccattcgtcacattccgaacgtacggcacaatcgcagcggaattcagaatatgccgttcccaaatgatatcgacgtcacgggggccgattaatccacgaggttcaccctcttcggcaatcttggcatggaaacgctccaacttcggcaacgcatcacccaagacctcagcaagtacaggtgacccctgcagctgatccgtcatagccatctccctcaccatgtttcacgtgaaacaatcaacatggaaaaggcgtcgctcattacgacgccattctccctacggtcactcttgtttgtttagagacgacatccgttgaacgtccttgtcatctcaaaaactcgtcgacctattactcctgatcaagctcgtcgtcttcggcaacatcctcgattttgttcttgagatacaccgtcacgtaacgatgaggctcctcaccgtgcgagcgagacttcagcccctcttcccgaaccacatcgtgaacgactttacgttcgaaggaattcatcggcttcaaatcatacggctcgccggaatccttcactgcgtcaatggcatccagggcgatatcacgaaggtgctgacgcttgcgcttcaggaaaccgtcgacatccacaatcagatgagaacgctcgccggtcttctgctgtacagccagacgagtcaattgctgcagagcatcaacgacttcaccattatggccaataagatgtttgatgtcggtatcgtcatcagcaacgatttgcacggtggggcggtcattacgcacgcccatctcaatgtcgccctcatagtcggcgatatccagtaggccttcaaggtaatccgcggcgatgtcagcctcttcgttgagctgatcgatcgacttcacgtcatcctgtgccatacgctactccttcatgtcgtgtttgaattccaagtctaagccctgctcccccgaacagagaaagtaatgtcggtgcgtgttgaatgtttcacgtgaaacatcgaacgcgcaccgacatggtcgtcacttctttttgcgcttacgcacgggctgttgacgctgatagccctgagtggccttacgctcagcctcttccttggccttggccaatgcttcttcttccagagagggcaggccggcctttgcgcggcgagcattctcattacgatgatcacgcttctccttgtccgccgcagccggagagccaggggtcgggaatgcatacacctgccacagcgtacggcacaagttgcaaacgttgttggtcagccagtacaccaacacggcgaacgggaaggaaacacccgagaagatgtacatcaccgggaagagccacagcatggccttctgcatggtctcggtctgcttgttcatcgaagcagctgccatgttgcgcttcatgttgatgtactgaatgagccacaagcagaagcacatcaggaacacgaagataccgatgaccaccttgcctgcagtagatgcgcgggtgaagttatcggtcacactgacaatgccgaacacatcggtttgggtgaattgcttggcggttgctacgtcgaacgcgcccaacgcatcgcgtttaccgttggcaatgtatggaatggccgacagcgtatagaacatggacatgaacaccgggccctgaatgagcataggcaagcaggagccagccggattggcgtcattgtcttgatacagtttcatggtttcacgactcatggcttccttggacgcctgatccgtcttacctttgtacttgttctgaatgcgctgcatcttcggtgccaatgcctgcatcttgcgcatcgacttcatctgcttgtagaacagcgggaagatacaagcctgcaccaccagcaccaggatgataatggcaagcacccatgagacaccaatcgggctcatgcccagcatcgcgaagaagtcatgcacgatcttcatgatccaggtctgcaaccactcaacgggagtcaggattttatatagaaatccccaaaacccgctatcaagcagaaattcatttgagttcatcgttgggcctctctttgggttgtggccaatggtgtcagtcggggctcttcatgagccttcgaccacgaaaatctgtaaaaaatggaataccgttgtggaacatcgtcgattcccccacgactccacggccggcaacgcagtaatctcagcatggcgagcactccccctttgaacgcgccataccgttccaatgcctcaatggcataattcgagcacgttggataatacttacaacaaggcggtgtgtttgccgagatgtgctgttgataccagcgcaccccaccaatcatcaccgccttgaaagaagctgtcatgcctcagccaccttatgcgccactgtggcaaaagccttcgcgatctgctgatctagcgaagcgaacgatgcggtcgcggcactgggcttggcgcgcaaaacgatatcgcaatgcgcgggcagcagatcctcatgggctctggccaatacacgaaacctacgcttcaccgtattacgggtgaccgcatgtcctaccgatttggagacagctaatcccaaacggcgatgcaccgtccggtcgtcatcatcatgatggtcgtcgggcaccaaatagtgcacgacgatatccttgccacctgctttgcgccggcgtttcagcacggtgacgaaatcacgatggctttgaagccgctccacctcgactatgcctgtggcactgatcggaatgatcaggcggagagggacttgcggcccttggcacggcgacggttgatcaccgcacggccagaacgggtgcgcatgcgcaggcggaagccgtgcttcatgtggcgacgacggttgttcggctggaacgtcctcttcataatccattgctcctaggtctattcggcaacgcttcgcgctgccctcacgtgagtcaagctataccaaagtactctcacccctaccctcaagtcaaaacggacggagtattttcacatttcgacacgttgcgagacacgcctcaaatctcttataatcggcggaataccaaccattcacggccaaaagttatccacaaattacatgtctgttattcacaatccagttatttcaacacgcgacacggtggataacttgtctaaaccagagtaaatattatctgttgtacagatttcgccacaccgatagaaggggccaccatggttaacgcttccggcgaccccgtaatcgaggccgcccacatctggtcagacacgctgacggtgctcaaacacagcgcttcgctcagcccacgagaaaaaggctggttggaaggcgttgttcctgaaggcgtcttcggttcgaccatcgtgctgtgtgtggacaacaacgatacgcttcaagccattcagggtgatttgaacgattccctgcttcaggcattgcgtacggtaaccggcgaaaatatgtttcccgcgttcaaggtcgtgccgaaaaccgagcccgaaccgctttcggcggcaaagccggcgcagccatatccttcggaaatttctccgaccgtcgccgagttcggtaaagaatcctatggtgcaaagccggtagccgcaccgcgggaaccgatgcccgccaccgagtcgcagttcccggtcggtcagcagaagatgaatcgcgatcccgagactcatctcaataagaacttcacgtttgattccttcgtgcccggcgattccaaccgttttgcccgtacggtcgcactggccgtggccgaaggttccggtcaggatttcaacccgttgtgtatctatggcggatcgggcctgggcaaaacccacttgctgaacgccatcggcaactatgcactggtcaaggatcccgggctaaaggttcgatacgtcacgtctgaggaattcacgaacgaattcatcgacgcgctgcaaaacccgaaccaaagccagggtcagattgctgaattcaaccgtcgataccgacaggttgatgtgttgcttattgacgatatccagttcctcggcggcaaggaagccaccttggatcagttcttccatacgttcaatgcactgcatcaggcaaataagcgtattgtcattgcttccgatgtggcacccaagaatttgaagggtttcgaggctcgactcatctcgcgcttcgaatccggcctgaccgtagacgtcaagccgccggatctggagacccgaatcgcaattcttcgtatgatcgcctcgatgaacggttcgaaaatccccagcgatgtgttggacctcatcgccgaacgcttcaccgagaacattcgcgaacttgagggcgcgcttacccgtgttacggccgtggcctcgctgagtaatcagccggtgacccgcgccttggccgagcagacgttgcaggacttcttcaccaccgatgtggaaatcaagcccacggacatcatcagtcaggtggcgaagtacttccacctgacgtttgaggatcttgtcggtaaatcacgaaccaaaaacgtggctgttcctcgtcagatcgccatgtatctggctcgcgaaatgaccagtatgagcctgatggatattggccaggtctttggcgggcgcgatcacaccacagtaatgcatgcctgcactcgaatcagtgaccgaatgcagcaaaaacaggagatctataactacgttatggagctcacggttcgcctcaagcaaagcaacaccaactgacacaacgcttctgagagacgaaaaacggcacttttcggaaagtcagtccgaaaagtgccgtttttggttgctcaggcggattctggtggatacgtcgaggcaacggattcgagacatcagattcctcatggctcccctttgtgaggagagctgtcgtcgcagacgactgaggggagtttcgaaggggaacacgcaaaaaacccatgaaacgagagaatcgattctgaggaccgattttgcgggtttgggcgagcgagacgaaaaaagtgccgaaaacggtctccagaatcgattctcctcgacgaaaaacagccttcaacacgccgtgcgaaagtacgaaaaccaaaaaagttatccacacagttgtgcacagatgtgggtaaactcggcggataactcgtggattacccactgttttgttgtggaaaactcgtgcataaccgcgacctcgatgtggaaaactcaaattcgacgaactggctgtggaaaactcgcccacttatccacaagccatgcagaatttgtccacaattttcagggacttatgaaccgttgcatttgtagggctcacccctacttatccacactatccaccggccttattacgacgattacttactcagttacgtgaaaagcatcatcgccacagtaacagccagtcacccatcgtacgtaagttcgccacctaacggctagaatatttctcagccaatccgacgaagggaacaatcacacatgaaagtcgaaatcgatactgcagccctggccgacgccgtagcctggacctcccgagtcatcgacgcacgtccctccaacccgattctcgctggtgtcaagctggaagccattgacggaacgctgcaattctccgccttcaactacgagatttccgctcgccaccacatcgaagccggcgttgacgaagccggttccgtactggttcagggcaagctgctggccgatatcaccaaatcgctgcgttcggagaaaacgtacctggtcaccgacggctccacgctgaccatcacgtccggcaagtcgaagttcaccttgcagctcatgcccgacaccgagtacccggatctgcctgtggtaccggccatgctcggccaagtcgatgccccgactttcgttcaggcagtgaaccaggcatgcgttgccgtctcccgcgaagaaaaccgcccggtactgaccggcgttcgcatgcaattccaaggcgacaaggtcgtcatgacctccaccgatcgcttccgtttggcccgcgccaccttcacttggactccgcagaacccggacgtcgacaccaccacgctggttcgcggctccctgctcaaggatgtggcccgtgctcttgacgagcaccagaacatccgccttgatttcgatgccgatagcccgacgctgctcggcttcgaaaacgccggccgcgtctccacctcccagctcatcgacggtgaattcccggcggtcgaccgcctgttcgccgacgaatacccgattcaggccgtagtcaacaagcaggatctgctcgacgccatcagccgtgtggctttggtcgccgaacgcaatgctccgattcgcatgaccttcaccggtcaggaagtggcgctgtccgccggatcggtcgacgaggcccaggccaacgaaacactggacatcgacatggatggcgacgacatcaccgtggcattcaacccgtcctacctgaaggagggtctgtccgccgtgaccgaaccattcgtgcgcatcaagatgacgaccccggtcaagccggtcgagttcaacggccagcaggaagctgattccgacgagtccatggactaccgatacctgctcgtgccgatgcgcttcaacaactgagatccctgaatttccaacgattcgctaatgcacatctcccgtctcgcactcgaccactaccgctcatggagtcaagtagtggtcgatttcgtaccaggcgtgaatatcctgttcggcaagaatggcttgggcaaaaccaatctggtggaagccgtcgaagtgctgtccaccggatcgagtcatcgcacgtccagcacgttgccgctgatcgaacgcgggcagaccacggccaccatccgcgcgaacgtcgctgatgatgccggtcaaaccactacgtatgaagcgtcgattcatgcgcgtggtgccaaccgagcccgcatcaactcggggtcgtcgctgtatatgcgcgatatcattggcaagattcccagcgtttccttcactcccgaagatcagcgattggtgtccggcgatccgggagcacgccgcgtcatgatgaatcaggctgcggctctgctcgagcccggatacatgcagacgttgcaacagttcacgcgcatcgccaaacagcgtgccacattgttgaagcaattgaatgccaatgccaacaatggacagccgatggatgcggttctgagcggtttggaaatctggaccggccagttcatcgaagccggtgtggcgttgacccgtatgcgcgctcatgtgatcggtctgcttgccgagccatttgccgcgatttacgccgacttggccggtgccggcgagcaggtgacgctcacatatgcgccttcattcgacgaagtgctgatgttcgacgatccacatccgcagatcagcgagcattttcaacgcatctaccccggtgaaatggctcgcggcgtgaaccttatcggtccgcagcgcgatgacatgaaccttgagttggccggtattcccgcccgcgagttcgcttcgaacggcgagatgtggacgatggcgttggccttgaaaatggcattgtttgaaatcgtgcgtgaccggttgggattgcagccgattgtgattctcgatgatgtgttcgcccagcttgacgacagccggcgcacgcagattcttgatttcgccagaaaacaggatcaggtgctgattaccgtggccgctgaaggcgatgtgcccgactatgaatcggcccatcgtatcgacgtggccacactggccgaacccgcttccgtaatactgccaactctgggcaatttgtccgattcacgggaaaacgagagtttaggtaagtatgacggaaaaaccgcggtggacagcgcgtccgtagaacggaaagcgtcatgaacccgccgatcgcccgccaactcaacctggacgagaccaaactgccggccgaaatattcgagcggctctcccgtcgcggggcgaccttgaaggactacagacgccgccgtgaagaggccatcgaaaacttcggcaaaccggggcgcgatccggctgaactgggcagcgtgatgaccaccatcgccggcaatggcgtctgggcggcgaatatgaaacttgcgcaattgcgcaaccattgggaccaagtggtggggcaggccatcgccagccattcggcagtcgccgatttcacggacggcgtactgaccatccgtgccgaatccacggtctgggccacgcagctgacctaccttatcccccaacttaccgataccatccgtcgcaatctcaaaggattgaccatcgccgagattcgcgtgaccggaccggccgccggatacacgcgcaaatgggctcggcggcggtagccaagataccaaacaaattcgcaggagcctcgctatggcgctcgtcgggttagacgagtaaaatcacatgcagtatggtcaaatggccagaagagccctttacgggcctcgtaagccatatcgcctccgtgaatgaccttcatgacggaggttgaccctgtagtcacggaaggaagcctgttggcagacgaaaccagcaaagaggagcagctgaaggcggctgcggaacgcatcaacaatgcggaattgaccgaaggcgaacttgacgaatccatggcccccgagcattatgaggcctccgatctgagggtgctcgaaggactcgaggccgtgcgtatccgccccggtatgtacatcggttccaccggcccgcgcggtttgcaccacctggtctatgagatcgtcgataactcggtcgacgaggcgctggccggatacgccagccatatcgaggtcaccattctgccggacaacggcatccgcgtggtggacgatggtcgaggcatcccggtcgatgaggtgcccggcgagggcgtctccggtgtggagaccgtgatgaccaagctgcacgccggcggcaagttcggcggcggcggttatgcagtgtccggcggtctgcacggcgtgggtatctccgtggtcaacgcactctccacccgcgtggacatcgaagtgcgccgtcagggcttccactggacccagacgtacatcgaccagcaccccaccgcgcccttgaagcagggcgagccgatgaccgaaggcgagtccaccggtacgtccgtgactttctgggccgacccgaagatcttcgagaccaccatctacgacttcgagacgctgcgttcccgtttccagcagatggccttcctgaacaagggcctcaagatcagcctgaccgacgagcgtgagaatgaccaggccggcgacgaggtggccggcgacgccgcggacgagcccggcgcaaagcaccagaccgtcacctaccagtacctcaacggcatcaaggactatgtcgactacctggtcaaggtgcgcaaggccacgccggtggaagaggacgtcatcagcttcgaggccgaagacctgaagctcggcatctccgccgaactcgccatgcagtggaccaccgcctactccgaggccgtgcacaccttcgcgaacacgatttccaccaccgagggcggcacccacgaggagggcttccgcgccgcgctgacctcgctggtcaaccgttacgcgcgtgacaagggcatcctcaaggacaaggacgagaacctctccggcgacgacgtgcgtgaaggcctgaccgccgtgatctccgtcaagctcaccaacccgcagttcgaaggccagaccaagaccaagctcggcaactccgaggccaagaccttcgtgcagcgcgtgatgaccgacaagctcggcgactggttcgacgcccacccgaacgaggccaagaacatcatccagaaggccatcgaggcctcccgcgcccgtctggccgccaagaaagcccgcgagaacacccgccgcaagtccatcttcgagtccgccggcatgcccgacaagctcaaggactgccagtcctccaacccggaagagtgcgagctgttcatcgtggagggcgattccgcaggcggttccgccatccagggccgcaacccgatcacgcaggccatcctgccgctgcgaggcaagatcctcaacaccgaacgtgccagcttggaccgcatgatgaagtccgacaccatcgaatcgctgatcaccgcggtcggcggcggctatggcgaggacttcgacatctccaaggtccgctaccacaaggtcatcatcatggccgatgccgatgtggacggtgcgcatatcgccaccctgaacctgacgctgttcttccgctacatgcgcccgatgatcaccgccggctacgtgtacgtggccatgccgccgctgtaccgcctgaagtggaccaagggcccgcacgacttcgtgtacaccgacgccgagcgcgaccgcgtgctcgccgaaggcaaggccaacggacgccagctgcccaagggcgaaggcatccagcgctacaagggtttgggcgagatgagctaccaggagctgtgggagaccaccatggaccccgagcaccgcattctgaagcaggtgcacatcgaggacgccgccgcggctgacgagaccttctcgatgctgatgggcgatgaggtcgaaccccgccgcctcttcatccagcgcaacgccaagaacgtgcgttggatcgatgcgtaacggaatcctccaacctccctcgtcagagggaggtacacaacggacttagacaactaaaggaacaacagtggcagatgaaaacaacaccggcgacgagcagttcacgccggacggctcgatggagccgttgagcccgcaggaggcggacaccaccgactacggcctgatggacaccggcgaacgcatccagcgcaaggacctgcagcaggagatgcgcgagtcctatctggcgtatgccctctccgtgatcgtcgagcgtgccctgccggacgtgcgcgacggcatgaagcccgtgcatcgccgtgtgatctacgcgatgtacgacggcggctaccgccccgatcgtggctacaacaagtgctcccgcgtggtcggcgacgtgatgggtaagtaccacccgcacggcgatttcgccatctacgacaccttggtgcgtatggcccagtcctggtcgatgcgcaacatgctcgtcgacggccagggcaacttcggctcccccggcgatgacccggccgccgccatgcgttacaccgaatgccgcatggccccgctggccatggaaatggtgcgcgacatcgacaaggacaccgtcgacttcgtgcccaactacgacggcaagacccaggagccgaccgtgctgccggcccgcttcccgaacctgctcgtcaacggttccgccggcatcgccgtcggcatggccaccaacatcccgccgcataacatgcgcgaggtggcggacggcgtccactgggcgctcgaccacccggacgccagccgcgaggaactgctggaaaacctgatccgcatcatcaagggaccggacttccccaccggcgccaccatcctcggccacaagggcatcgaacaggcctaccgcaccggccgtggcctgatcaccatgcgtgccgtggtcaacactgaggagatcaacggccgtatgtgcctggtggtcaccgaactgccctaccaggtcaacccggaccgcctcgtcgtctccattcgtgaggccgtgcgcgacggcaagatccagggcattgccgacatgcgcgacgagacctccggccgcaccggccagcgcctcgtgctggtcttgaagcgcgacgccgtgccgaaggtggtcctgaacaacctgtacaagcactcccagctgcagcagaccttcggcgccaacatgctggcgctggtcgacggcgtgccgcgcacgctgagcctggacgccttcatccgccactgggtgaaccaccagctcgacgtaatcgcccgccgcaccgcgtacctgaagcgcgaggccgaagagcgcgaccacatcctgcagggctatctcaaggccctcgacatgctggacgaggtcatcgccctcatccgcgcctccgaagacaccgacaccgcccgtacgggccttatggggctgctggacatcgaccaggtgcaggcggacgccattctggccatgcagctgcgcacgctgacccgcatgaaccgcgacaagatcgtggccgagcatgaggaattgcagcgcaagatcgccgactacatcgacatcctcgccaagccggaacgccagcgcaagatcatcggcgatgagctcgacgagatcgtggccaagtacggcgacgaccgccgcaccaagatcctgccgttctccggcgagatgaacgtcgaggatctgatcgccgaagagaacgtggtggtcaccgtgacccactccggcttcatcaagcgcaccaaggccgacgaataccgcgcccagcaccgcggcggcaagggtatcaagggcaccaagctgcgcgaggacgacgtggtggatcacttcttcctgacctccacgcacaattggctgctgttcttcacgaacaagggccgcgtctaccgcatcaaggcctacgagctgcccgagggttcgcgcgactccaagggccagcacgtggccaacctgctgcagttcgcgcccgacgagaccatccagaccgtgctgtccatcccgaactacgaggtggccaagtacctggtgctcgccacccgttccggcaaggtcaagaagaccccgctggccgagtacgattccccgcgccagggcggcctgatcgccgtgcgcctcatggccgacgagaatggcgagaacgccgacgagctcatcggtgccgcgctgtgcaacgccgaggatgacatcatcctggtctccaagctcggcatgagcctcaagttccaggccgacgacgagcagctgcgtccgatgggccgccagaccgccggcgtgcagggcatgaagttccgtaacgacgacagcctgctggccatggatgtggtccctggcgactccgacaaggacctgttcgtggtgaccaacgagggcttcgccaagcgcaccgccatcagcgaataccgtctgcagggccgtaacggcttgggcatcaaggccgtgcaactggtcgagggccgtggtgccctggtcggcgcgctcgtggtgtccgaagacgatcaggtcatggccatcatgaagtccggcaaggtgattcgttccaacgtggacgaggtcaagcgcaccgggcgcaacacccagggtgttaccttcgccaagcctgacaagggcgacacgattctctccatcgcccgtaacgaggagaaggacgagcccgaggacagtggcgatgccgcggcgaacggcaccgccgagaccgcacaatccggcgagaatgtgaacaacgcggacgaggcgtgagcagcgtcctgaaaagctggtagcctcgcatacagcagaggctaccgccaagcctgttaaggagaaacgatgagcgagaatctcgaagacaacgagccccggatcataccgccggcagtcggcaatacgcagaacgatcatgtcgagccgctgatcggtactgagcacgctccccgcgtggcacgctccgtgtccagcgatccggaagaatccacgttgccttcttcaggtgccgccactcccgtgcgtccggcacctcgccgtagcgcccccagggctcgccgcatgagcttgtcgctgacccgcgtggatgcttggtccgtggccaaagtgacgttcatgctgtccatcgccgtggcgattattcaggtcgttgcctccgcgatcgtatgggtgctgcttgatgtggtcggtgtattcagccagattacgcagattgtgtcttccaccggtcttgatgcaggcggtttcgatctcaagaacgtgttgtcccttaccaccgtggtctccggcgtcaccatcttctcgatcgttgaagtggtgatcttcaccctgctggccaccattgcggcactgatctacaacgtggtcagctcgctggtcggcggcgtgcacgtcacgctcggcgacgactgatatagctatactggcagaactcccctcagtgaaccgcaccccggttgttggactgaagtaattcagattcgatgatcggaggtgcggtttcttatgtgtggggttcgtaggcgtcgttgctgggccgagacttgggactccggcgacgctgggggtggcaggcgtcggtgttgggacaggttttgtatctctgacgacgctgtggagggcttaccgtcgtcagcggtacagatcttggagttctgccgatgctgagggtgtgttctgtgtcgtttgcgtccaattcttggccctctgccgacgctgggcacagcaagcgtcgttgctgggccaagttttggactgccgccgacgcagagaatgcacacagcggtgttggtctgccagcgtgtggcagcttggcgccgttgaggaaggtctatgtggtgtggttccgccaaaggactggcaggttggcgctactgaggggactttatgggctcttccggttttggcgtgtaggggccgtgcggtttcattcactttttcaatcacacaccgaatcaaaccgcacggcccctacgcaccaaaatgcgaagagccggtttcgctaactagtgcctatatgcctgcaatcaggctgatttgtgctgtcaggctggctggcgtcagcggttgatctgccgatgttgctgctcgtcagtctggactgttgggctttcgttttgacagcggaaggaagatcctcctcgcggtagggcaacaattatcagtatcataattaaggtaatcgtgattacattaaccatgatactcttattattgggtggtaggcggatcggagggctgcaatgtttgtcgcacgagagcacgagttacaagtgctggaaaagctgtttatcagcgattcgttcgaaatggtggtgctgtacggtagacggcgtgtagggaaaacggcgttgatcgacgaatttgtcaaagataaacgcgtgctgtacttcacggccatacagcaaagcgccaagatgaatcttgaagatttctcaagagcggcattgtcgttctttggtatgccggattccaccccgtcgtttggcgggtggtctgatgcgttatcgtttgttgctgaacgtgctgcacagactgacgaacgtatggtgttcgtattcgatgagttcccttatgcagctgccgccgagccagcattaccctccatgttgcagatagcaattgaccatggattcctcgccacaaaagtgacgatgattctatccggtagtaacgagggattcatggaaaacgacgtattggggcgtaaaagcccgctatacgggcgtcgtacagcacagattcgactcctgccattcgactatgcggatgcggcaaaatttctaacgaacacatctccgcaagaactggtccaatactatgcgactttcggcggtacgccgtattatctggcccgtatacaggaagccgatggctttgaatccaatgtgctgcgcttgatgttcgacaacttgggcgtactgcgtgaggaacctatgatgctgttgcgtcaggagcttcgtgaaccggcatcgtattattcgatattgcaatctattgcgggtggtaattcctcgccaaagcttatcgctgaacatgcgggtgtcggatctgattcgattggagcatatctgaaaacgctggtcgatttgcgcttaattgagcgaaaagtgccgtttggtgaagatccgaataaatcgcgcaagggaatgtatgtggtgagcgatcccttctttgcatattggttccgctttgtggggcgcaacatgagcattttggatggtaatatcagcgaggaggttacgagcagactcgcttttggaccagcgtttgatacctatgttggtcaacaatttgagacgatttgcctgcaatggcttattcgaaacaacgctatgggcaacctcccctttgttgccactcagttcggcaaatggtggggcaatgatccgattgctcacgagcaaaccgatatcgatgtgattgctgcggattcgcttgataaaacgattctgttcggtgaatgcaaatggcgtaattcattcaacgaaacggaggctattgaaaagctccatcagcgtgctggcttagtccgcggctatcaggcaggtaatgcgtggcttatgctgttcaccaagaatccggtgagtgagtccacgcgaacccgctacatggatgatgaacgaatggtgttcgtttccgcggaagagttatacactgcgtgatgcattactgggtgattgtgacgcggtatctagagtcctgccgacagccacgtggcaattacgccgaatcacgcaccaccaaatcggtgttcaggtgcatcacgcgcggtgaagagactccgttgatggctttgatgaccacgtcggccatggtccagcgcgctgatccatgtgctgatcgacggtggtgagttccggggttatggaggtggaagctaagttgttatcgggcttacgtatttggggatagcacttgttgctcgttgtacatatagcaatgcccttgcctcctcacgggaagcaagggcattacgctactgcttagtactgctcagaggcaagcgtcacagcacgccctgggcaaccatggcgttggcgaccttgacgaagccggcggcgttggcgccgagcatcaggtcaccctcgtgaccgtattccttggcggcggccagggagttggcgacgatctcttccatgatggacttgagcttggcgtcgacctcttcgaaggtccaagacagacggtagctgttctggctcatctccaggccggagacggccacgccaccggcgttggcagccttggccgggccgtacagcacgccgttcttctggtagacctcgatggcctccggggtggacggcatgttcgcaccctcgacgaccacggtcacgccgttgtccacgagcttctgtgcggattcgccatcaacctcgttctgggtggcgcacggcagagcgatgtcgcccttgacggtccacacgcccttgctgccctcgtggtactcggagcccggaacgcgctcggcatattccttgatgcggccgcgctcgacttccttgatctgcttgacgacctcgacgttgatgccgttcgggtcgtagatgtagccgttggagtcggagacggtgacgaccttggcgcccagctgctcagccttctgagcggcgtaggtggccacgttgccggagccggagatcacgacggtcttgccctcgaaggagtcgttgcgcagcacgcgcagggcttcctgggtgtagtagcacacgccgtaaccggtggcctcggtgcgggccagggagccgccgaattccagacccttaccggtcaggacgccggagtactcgtcgcggatgcgcttgtactgaccgaacaggtagccgatctcacggccaccgacgttgatgtcgccggcgggaacgtcggtgaactggccgatgtggcggctcagctcggtcatgaaggcctggcagaagcgcatgacctcggcgtcggacttgcccttcgggttgaagtcggagccacccttgccgccgcccatcggcagcgtggtcagggagttcttgagaatctgctcgaagccaaggaacttgacgacggactcggtcacggtcgggtggaagcgcaggccgcccttgtacgggccaatggcggagttgaactggatgcggtagccgcggttcacctgaaccttgccctcgtcgtcaacccaggccacgcggaacttgatggcgcgctccggctcgacgatgcgctccagcacaccggccttctcgtactccgggtgcttctcgacaaccggctgcagggtctcgaagacctcgcgaacggcctgcaggaactccggctgatcgccgtcacgggcaacgacctggtcgtagacacgcttgatgtactcgtcagtgagcatgattctcctcgatttggtagggaattaagacggttttattctatgcgcgcaggcccttgctgcatagagtctcgctcggataacgggaaagctttcggcgtggttatggagtggctcaagtttccgtttgttagatttttcgggcgattgttggatgtctgtctatgcgtgaatcgggtcgaaatggaagccgcatcacaccggaggcacgttcatatagtggacataaaggcggacttgggtgatgtcagatgtgtctgttggggatcgtgcggtctgtggggtttgtggggtgtggctggaccgtggggtcgtatggtttttgtgacctgtggggtttgtggggtgtgtggccgcaggtcttcggcgcgcaggttaccgggttcgcggtcagtgtgcgaagtaggtctgcagaatcatcgtggtctcggtgcttaccggcaccgtgcggtggatgagattgagcagttcttcaagtgcggtaggggaagccacgcgcaccaccagcacgaaactgggggcgccggccaccgaatagcaggagacgatgccgtcgatattgttcagcttgtccggaatcgaggattcggctgagtagtcgagcggggtcacgttgacgaacgcgctgatgggcaagccgcgctgctcttggtcgatgatggccttgtatcccttgatgatgccgcgcttctccagcttctgcacgcgcgactgggcggcggagactgacagtccggtcgcctgggccagttgcgcgagcgtggcgcggccgtcggcctccagcatggtgaggatgcgctggtcggtctcgtcaatcgcggtcatgatgtcttctccgttcgttgtgctctgtgttcactgtacctgttgccggaatgcgatggctttccgattttgcctggtaatttcagtagttcttcctgtgttttctgttgtgtggtggaatgtttacgtttaaagtcctaattggatgtaataattccttttgaaataagagaacgatgaaataattccattgaggagggatgatatgcagaagttttccaacatgtctctgtccgaagttgcatctgctgctgcgcctgctactatgcctgctgccggtcgggttgctgtgccgaccgccgagcccgcgagcctgtccgccgaagccctgaatatcccgcgctccggcatccgagacgtattcgaccgtgtagagcgcgtgcctgacgcgatttcactgaccgtgggggagcccagcgccacggccgcgccgcatatcgtggcagccgcttgcgaggccgcacaggctggccgcactcggtacaccaacgtgcttggcatccccgaataccgcaaggccgtggccgattactccgcctgtgtgaagggacttacttatgatcccgaaaccgagattcaagccgttgacggtgccacgattggcctgtttctggcgctgaaagccgtggtgggcaccggcgatgaagtgattattccctcgccgttcttcacttcctatgacgccgaagtgatgctgtgcggcggccgcccggtcaccgtggcgctgcgtccggagcacggcatgcgcgtgaacgcggcggacatcgaagcggcgatcaccccgcgcacccgcgccgtaatcatcaactcaccgggcaatccgaccggcgcggtaacctctgccgccgaactggcgcgtattgccgaagtatgcaagcagcacaatatttgggccatctccgacgaggtttaccatccgttcgtgtttggggaaacgttcggggaaacgcttgggggagaggcagccgtggcaccatcgatcgccgcggtgccgggcatgaaagagcgcaccattgtggtggaaagcctgtcgaaaacctatgcgatgaccggctggcgcatcggctacctgctggcacccgaagcggtcatcgaacagaccggcaaaatcgccgaactcatgcactcctcggtgaactccttggcgcaatacgcaggcgtggcagcactggctggcccgcaagataacgtggccgccatgcgcgaggaataccgcgccaagcgccagatcgtgctggacggtctggccggatgcccggtattgcgtctgatcgaaccgcaaggcgcgttctacgcctttgtggacgtacgcctgactggccttgactccggtgaattcgcagaccgtctgctggacgaagagcgcgtggctgtggtccccggcgaggccttcggcgaggaggggcgcggcttcgtgcgcctctcctacgccggagatgccgacgagctgtgcgagggcgtcgcccgtctgcgcgcattcgccgaacgggtatggaaccccatcaccggccaccacaccgccacctatcaccccatggaggtgctggcctgaggcttaaagcgaggctagaccgccattcggcctcgtcggcgcgagcgatggcctgcttcttggctcgcagcaagatgtagccgagtaccagaacgttggccagagctcgatgttggcatcgtgtcaaaacaaccgcattaaggctgccgcgtctcgtatcgttacgcgtaggggctggctgaggcgtaatgctgaagagtaacattgaagcgatggcaatcaagccgatttgagggagagaggcacacgatggcgtactgcggccactgcggaaatagagttgatgggccggcacgattttgcccggcatgtggagcgtctgtagacagcgcaccagttgcgacggcaccagtaccggccgcatcgccagccgtaccgcctgcgtcgataccggcacctgctgtgccggcgtctgcggtaccaccatcgataccagccgcgccggtcgccccatcggtttacgccgcgtccgctgccccacagccggcaccaaccgttcccctgccggctttgccgattcccgctcctgccgcatatcaggcgactgatgcaaccgccgtcctggcaccgcagcgcaaatccagtaagaagctgatcgccgctttctgcgcattgcttgcgacgattctggtggcggccttggcgttcatcatccccaacttcaccgccgtcaaagcgatgctgggcttccggcccaccaatccgctggtcgtcaccttcgacgcgatcaactcgctgtccactctgcgcagcaccaaatacgaactcagaacccacagcagcactggcgattctcttgacgcgcggatgtctggcatgtattcgctgggcaaaaccaccaacgaatcctccgcgtccttcactagcaaaacagacgaatatgcaacgaccttcgcttggtacaaaggcgcattcgccgggaaatccgtttggcatgacgacgacccctactacatctactacccggccgaccaatatgaagatgacttaaggaacggcgttggtagtgatgtggcggacttgatattgaacgtcaaggatgcgttggtcaagaacggtgcttgggacatcaccggcgcggagcaaacgttctacgatcagctggacaagatgaacgacgatgggtactcgaacgacatcgaccgggtcaagggcacgaaaacgtctgccgaggtgaaggccgaggccagcaaattcatccaacaatatttcggcgtggagctggaagataagaatgtgcgcagccagctgttcccgaagacatcgtctgccaagtctgccggcaatacgcagctgtcgtaccaaatcgatatcaaagcgttgtctcagcatttcgtgaattactggatcagtcatgaagcgcagtatccgcatctgaaatcctgggtgattcagcaaatcgaggatgccggcgtggacgatgctgaagatgagtaccgtcaggcgctcgataatgtgcgcaactgggatttcggcacggatgaagagccggagatgccgactattaccgtggatctgaactacggcagaaagcgtctgatgaattcgattgccataagcgtgtccggcaaggacgaatacggcgactcctataatggctcgctatcgttgacgctcagtcagcagaacgcggtgtctgtggacgaccccgatttgactgatatggtgagcaaagccaaggacaacaacggactggatttgtcctgaatatggtgcgtgggatgttgcggcggcgctaatttcctcggtgggctatcacgcactcttcccgcttgcagcggtctgctcgctgattggcgcggtgctgatcgtcttcatcaagtcagtgaagtaaacatacttattcatccctcttccttccataacaaacgagcggaggggttgggccattgttttgcggtgtgtccagtctctccgctcgtttatttgcttgattctgtggaatggaaggggcatgctctatgtcaaataagataatgcggaagggctgttctgcgtgcatatatcttgctgaacgtatttgagggtactttctggttaaagacacgccctatggtgggcagaatgctgccgttgtgtctggcgtcggtcgcaggacatgtcgtatcatgagggcacaagcttaattcagccgtcctcaatctgattagtcgtcgggtcgggttggcgtgatcggcttgcagggaatcatccggctcttccggttttggtgtgtaggggggatgcttataggtgggcttgtatggtgtgtctgaagccgccggtgtggaggaggctgcgggtgacgtagttgtcgaggttgcggaagccgagggcgatgccgcgtagggtctcgggcctgccgttgatggcctcggtgggaccgttggcggtgccgtgggcgcggtcttcggatcgatcgtccccggtgccggcaccgtggtcggcgcatttgtcggaacggcgattggcactggagccggatggctgataagtagcggcttagacgcactttacgacaatcaggtgcacagaggcggtggagatgacccgggcagtcatttcaaggataatctcgggttttggaagtggaggtatctgttggcgttgttcactcggtatgtgttggtggggcgtcttgaggacggggcgcaggtgttctgggacacgctggagaagacgccggtcaagcgcaagctggatttcggcggcgattccggctgggcgcgggctggcgcggcggccggcggcgctgccgccgcggctgcgcccggcctgatggtcatgatccacggcatcgcccggctgctcaccccggacacgaagacgcaccacacgcataccgatgacgtgacgctgctggcttttctcagaccggtcactatatcccgcgacgcatggaacacgtacgtggcggtcgccgtgatgtggctggccggactcctcctgtactggggtttctgccggctcgtgttcggccggccgaacacctacgtccccgcctcgctggaggacttggcattcgcctcctccgtgcccgccacgaagctgcgctacatgttcggcggccccatcgtcggcacgctgttcctcatcgcgatatcgggcttccccatagcgatgacatggatgttctggtcgagcgcgcaatgggtcgacaccggcagatccacacctgactggattggatggttggctttcttctgggcgttcctcgccacatgctccccgattctgttggccttgcgtttcgtcggaccgtgggactggcggggacgtttcagcccgcgcgcgggcgccgaacgctggagccggctgaaatgagcacactgctgatgggggccgggatgggcctcatggtcgcaatctcgctcgcattcatcctcgcgttcaacatgtcccggctccgctggctcatggaccacgacatccacccgctgctcgaggagcacggactgcgcgaacccgacgacgggttcacgtcctccggcgccaaggagcgcatggccgcgttccactcggacgtcgcggaggcgctggcagcgccggaacgggaacgcgaagcgagggaacggcgacgattcactgtgttcgacccgacggtcgacaagttgccgctgccggcgggcccctacccgttcgaccgtccgacggcgtcctgggcacgcgacatctacgaggaaggcgattgggcgtacgccgacgcatgggtcagggggcggaggaagccacgcgtggtgcgcgagcaacgctacgactcgtggcgcaacgaagtcctcgcccgccacggcctgaccgacgcgccatccgccacgctcgaacacatcgaacacgccgctgcacgcatccgcgccctccaccacaccagcccagccgaagcctacaaacaagcctgcaaggaagccaccggcaacacggtcaacgacgaaaccaccggagaaggaaaagaaaacggctcttccggttttggcgtgacccgcagcctcctccacaccggcggcttcagacacaccatacaagcccacctataagcatccccctacacaccaaaaccggaagagccaattatctgccggtaccttccacccgagaggaaggtgtagtcctccgggtccgggcgatatcgccgcaaggcgaaggattttcgtgtaccgttccgtgaagacggagcgacaatgaccacgcggttggtctgaatcctcgaggggtggtccttaacaggaccacccctttttcgatggagagggccatggcggactgggagaatccctcgaacaagaacacaaaaaccctcagaatcggtattattccaagggttgtctgtggagctagccgggttcgaaccggcgaccctctgcttgcaaagcagatgcgctaccagctgcgctatagccccgtgagaaaaaaagagcggctcgcagccgcttcattttttctgtgggcccgggaggacttgaacctccgacctcatccttatcagggatgcgctctaaccagctgagctacgggcccgatccatacgcttcaaaagcgcacaagtaattacaataccattgaacggcggtatgtcaataacggcgtgtcgtgattgtcgcttgcgccatgattgccggctcgacggtcaatgtctagcaacgccacagccaatgcccagctatgtaaccttgcgttctcacaccgtaatgctgcggttacacctccctctctgcgcagaaatgtccaatacatatgaggcttctgctgttttcgtgggttgggctcttggttgtggtgggcgtatgtcgagtccgccgcggcggagcatgacgagggcgatgggattgttcgcgtggtggaagccgtaggccatgcggatggtgaccttgatcctgttgtcggacgcctcgagcctggcgtttgaacagcccaattcgattgtcccgaggatgtcgggcccatgacggcggatctttcgggcgagttcgacgatctcggggatgcggctgtgggacgcccggaaca

SEQ ID NO: 56 - DNA, 4188 bp, Unknown
  R206_24m  MAG No. k141_441
gatccggatgcgttcctgtgccgacaagtgggaatacactttcctcatgggcgcaacaccttctccagttagaacctgaacacttccaaccatagagcgggtgttgcgcttctatctagaacccgggttcagcccggggcaaaaccgaaaaacgtagaatgaaagggcaacgttccacctactgaaagaaggaacattatgacacttgcgtttgttgtgccgggccttgatgaagcggccagtgagaaggccatcgccatcctacagaaccgactgagccaggagcaggaggccgctctggtcctgaagcacgcacactggaacgtgaccggcccgaacttcatcgccgttcacgagatgcttgaccccgaggtcgaggccgtgctggctcaggccgacgagaccgccgagcgcatcgccactctgggcggcaccccggacggccgcgcggacgccatcgtgcgcaaccgcacgtggaagtcgttcgacgccgagggccgcgtgggcaccgaggagtatctcaaggcgctgatcgagtactatgacgccttcatcgccgacgaccgcaaggccatcgccgagctggacgagctggatgtgatcagctccaacatcatccaggaccacgtgcaggaactcgaaaagttccagtggttcatgcgctctcacctggcataagtaaaagcagtattccgtggctcccctcaaagaggggagccactttcgtctcacgtgaaatagagagtctccacatacataagttggaaaagtgtataaaactccccattttgaggttggaaaacgtagccaaaaccgcattcttatggttggaaaagtgtaaaatatgcgctataaacagttggaaaacgtgcccagcatagatgcaaggcctacaaatgactggagattctcatgctgcgaagaaaaatcgagacacagctggaagcttggagatccgcgccgaaacgcactgcactgctggtcaccggagcccgtcagattggcaaaacctatatcatcaggcactttgcccaacagcattacgaccatatcgccgagctcaatttcatcgagaaccctgacctcgttgcattattcgatcggccccgcgatgccagaaacctactgatgaggctggaactggccgtaaatacgccattagtacccggcaaaaccctgattttctttgacgaggtccagcgttgcaaggaaatggtcaccgcaattaagttccttgtagatgatggtcggttcgattacgcgctttccggctcgctacttggagtcgagctcgaagatatacgctcggtaccggtcgggtacctgaccgagctggatatgtatccactggatttccaagagttctgctggtcgcagcatatcggcaacgacgtattcgatatgcttgccgaatgctttgccaagcaccaggaagtggatgagttcattcatcaaaggctcatggagctatactccaaatatctggtcatcggcggcatgcctgccgcagtcgactcgttcgtggcaaacggcagcgttgcggacgtgcgcactatacaagagaacataaagcgtgaatatcgccgcgatatcagccaatacgcgcgcaaagaagaccggctgcatatccgcgctatctacgatttggtgcccagcgagttaaataacccaaacaagcgctttaccttcgccaaaatcgaaaagaacatgagattccaatcggttgcttccgatttcgattggctggtcaatgcggatgtagccgtcgccgcgtacaacgtggacgaaccgtgcacaccgttggagatgagcaaggaacgtaacctcttcaaactcttttacaacgacgtgggtctgcttaccggctcgtttctcaagaaaaccgcgctcgacgtactcgacggcaaccctgatatcaactacggttcaatctatgaaaatgcggtggcccaagagctacgcgctcacggatttgacctgtactactacaacagtaagaagcttggcgagctcgatttcctcatccaagaccgcaacgatcacgtgctgccgattgaggtgaagtccggcaaatcctacaaacgccatcgcgcaatggacaacgtgctcgcccaccctgaataccatctcaatacaggctatgtgcttggcccgtgcaacgtctcagtcgaagggaatgtaacctacctgcctgtatacatggccggcatgttccataacgaatgacgggccgcacacttagtcaacaagtacatgtcggtcagatggttcggactggtcagagggcccgctctgatcagttaggtcggtctgaacggactggctgggctggtcggcctgagtagcccgtttggaccgatccggttcgcccttgctggccttcacactgcttcagctccagctgaagttcgctgatgcgccgttcgagttcgtcgatgcgccgtacttgtggcgaagtgagactgaggggagcctacaaaatgctcacaggccgagggcaccggccacggccatggcctcgtgttcgggatcggcctggccgatgtgtacgttgacgtgaatttcgtcatcgcccggctcttcgagaatgtcggactgggattgcagcatgctcggcttcatgaagtggccttggcggtgggaaaggcgttccatcacctcgtcgaatgtgccctgcatgtagacgaacaccacgccttgacggcgcagcttgtcgcggtagatcttcttcaacgccgagcaggtgaccacggcgggctcgccggcactgaagcctgacctgtcatcgtcacagcaccacgcggcggttgaggtcgcggcgtagcgtcttccagccgggtaggtaggcggtcatgcggcgttggaatccggcgccgtggccgctttcccacagatgcgtcatctcatggaccaagacgtattccaggaattgcggttccatcactcccaattgaaggttcagacggatgcggccggttcgcggcgtacacgatccccagcgcgaggtcatgacccgtagcgtgatatgtgtgggctgccggccgatgaccggcccccacttagccagcagctgtggcaacgcggcgttgatcgcggccgccgcttgtcgtttgcgttcgtcggtccagatttgggagcggtcaaaatacggttggacattcgtaccggcttggcctggcccggcgtcaccaattcccggacgactgatatcaccggttttcggacggccggcaacgtctccatcatggccgctggcaccagctacgccacgacctccgttctcgaagcctgcaccctcgttcaatgccatgatggagcgccgtcgcgcctcagccatgcgctgctgctgggcgagaatccacgaatgtcgctctttgacgaaatccgcgatacgactctcgctcatccgcatcggtgcggagatttcgacgcggccgctcggcggtttgatgcgcaaatacaggtttttgatgggtttgcgcgtcaggtgcagatggatgccgtcaatgtccaacgactgcccggcggcagcggaccgaacggatttcggcgcaccggacttcggagcggtggattgacgacggcgataaggcatgcaagtcattcttgcacaacggcggacaacaagcggcacacaatgccgcccctcacgaatcggcaaccggcgctgctacattcaatccgcataccaactgcccacaccggagaaggtcgcgcaggagaaggcctcgctgctcgagatcgacgacagcttccagaagatcgtcctcgtacgcgacgtggtcaaacccgtccgcgacgaacacggcatcctcacgatgagcgtctacgatttcctcctcaacccggacagcctgacgatgtgacgccggatggccggcaaatgccccggaacgcagacccccccactcctcgaacaccgccttcgcggtggccgaggacaccatgacgagacagccgagcatgatggcacccagcagagggtgccgaagttcgcgatgacgtactgccacaggtccgacccgtccgtgtagccgtcgaagcgcagcgccgcgacggggacgagaaatccgtcaagcgcatgcgcggcgtcagatacaccgtcctgaagaaccccggcaagctgaccgacagacggtccgaggcgtccgggaacctgcgggacacggaccccaagggccggcccta

SEQ ID NO: 57 - DNA, 23084 bp, Unknown
  R206_24m  MAG No. k141_634
aggtcgagtcaacctgaccagcggcaagctcgacctcaaagccgtcaccacctacccctcagtgagagttttttgcaaaatggcccgtacccgcacctcgtcacagcttgtataatcacgattatactaatcgtgatacaataaatcgtgatgcgatagaaatacgccggcgtatggcataaaggaggcgggcagcatggcattcatcggacgagacgatgacctcaagcaactgcaggaatgtttcactgagcgtagggcacagcttgtgttcgtctacggccgcaggcgcgtgggaaaaacagagacgcttattcaactcgcaaaagacaaggaaaccttattcttcgcggcgcagaatgccactaaagatgaacagctggcatcgttctcccgtctcatgttcgaggcgggtgccccgggcaaggattatctgagtcaatatccttcttgggaaagggcgttaaccgagttaacccggctgccagagccgagcgatggcggccgcaggcttgtgatattcgatgagtttccttatctggtcaaatctgatccgtcattgccgtcagtgctacagaatctttgggaccacacgttgcgtcatgcaaatctgatgattgtgatttgcggcagtgccatgagcttcatcgaaaaggagctgttgggagaaaaatcgccgctatatggtcgtgcgaccggcatcctgaagatgctgccgatgccatattgggatgcagcgcaattcttccccaactatagtagcgaggataaggcgctggcctacgcaatactgggcggtatcccgcgttacctagaggaatttgacccagatgagaccatagacgcaaatgtcaagcggcatattctgagacgcattgctccgctatacagcgaggttgaatttttgttgcacgaagaactgcgggaaactgcgaaatataacagcgtgatacgggcgatcgcgctcggcgcaacttcgctgaatgagatcgcgacacacacgatgatggcaaacgcaacagtatcgtcgtatctcgccaatcttatggaactggggattgtggaacgtgagttcccagtcacggcaaagcctaaggagcgggcgaaaggttcgcgtgggctgtatcagctgagcgacaatttcttccgattctggtattcgtttgtctttccgtatcgttcggaattggagcggggcgatgtggaaggcgtatacgagcgtcatatcaagccggtattacatgattttgccggcaaaccgttcgagggtctgtgccgtgaatggatgtggcgtgagagtgctgctggacggttgcccttccgtgcgcgtgcggttggccgttggtgggatcgtcaggatgagatagacgtgatggccgttgacaatgcgtctgatgctgccattgtgggcgagtgcaaattccgcaatgcgccggtggaccgttccgtgctgaatctactgcgagaccgtgctgcgcgaaccggtatcggccagcgaacatacctgctgttttcgctcggcggtttcgatcaatcactggtcgacgatgctgcggcgtctcaatccgacgttcagctcgtcggcatcgatgagctgtttcatgaataaatcccatttgcgaatagctctcactgagtgctcatcagtgagagctattcgcaaatggagccttacttcttcgcctgagtgagctggtaggcggcgaagaggatggccagccagatcacgccggcgatgacggcgatgcggtagctggtggagaagcacatcagcaccacgaccagcgccaggaacgccagcaccacccacggggtcaccttggcaaacggcagtttgaagtgaatcgcgtccagtgcctcctggccgctcagaccggccagctcggaatcctcgggagcgccgcccgcggcgaccaccttacggaacttcatttcggtgagcatgatcatcgtccagttgatgatgccggcaatggtggcaatcgacatcaggtagttgaacgcgaactcaggccacacgaacaccacgaccacggcgatggcggtgatcgcggcggacgtcagcacgccggccactggcacgccgcgcgagttgagcttgcccaagtaagcgggcgcattgccctgcttggccagcgagtacaacatgcgggagttggcgtacaggccggagttgtagacgctcatcacagcggtcaggcacacgaagttcaaaataccggcagccgcgtgaatgcccacggaatcgaagatctgcacgaacgggctggacttgccatcgatggtgttccacggcactacggccatgatcacacccagagcgccgatgtagaacacgaggattcgccaaataatatcattggtggcgcgcggaatcgtggtcttcggatcctcggtttcgccggcggtgatgccgatgagctcggtgccgccgaagctgaacatcaccacaaccagtgccatcagcaggccggtccaggaaccgtcggaattctgccccatcaggccgttcgggaagaagccgttacccacggtgaaccagttcgcgaagcttgcgcgcacgccggatgcggtgggcaggacaaagatgatgacggccaggccgccgataatcatggcgatcacggccacaatcttgatgatggcgaaccagaactcgaactcaccgaatttggagacgcccagcaggttggcggcgcagatgatcaccaagaacacggccgccgacacccatgtcggaatcgccgggaaccagtagttcacaaacgaacccaccactgatagctccaccatcgagacgaggatgtagttgaaccagtagttccagccggaaataaagccggcgcgcttggaccagtagcgggtggcatagtagctgaacgcgcccgccttcggatcctcaacggacatttcagacagtgcacgcacaatcgcgaaaatcgcgaggccgccaaccaagtaggcgagcagaatcgagggtccggccagcgcgatggattcactggaaccatagaacaggccggttccgatggcgccgcccagcgcaatcagctggatgtggcggtttttcaatgacttgcgcagcgtggccggcaccggcacgtcgtcggtttcgcgcggcttcttaggcgcatcagtagtactcattgtgctcttctctcacatttcttgggtttggcgcacgcggggcttgccgtgatacgcaacgttcgttattctatgccgccgtatcgtctcagaaatggtcaatcgtctatttgtgcgctattgcaagcgcgggcgtgggcgcggccggtgagcaggcgaagctatagcgagcgatgcttatgaaaccgcacgcttcactgagttcactgaattcactgaattcactgtgctcactgcgtggcaggcatacacatggtgaagatggtgtgggacaccgattcgggagaggccgcgagatcggtggcgagccaatattgcaaaagcccaatgctgccggacacggcgaatcgcatacgcatctgcgcctcggctgggtaacccgccgaagattgcaactgttcgcctacaccgcgctggctgtaaatcaatcccagcagctgctgctggaaaccgatatccgctttcgggctcatcagcacttggagatgattgcgattgtcggcaatgtactggcagatgcgctcaataacatgctcgatgccggcaggatctggctgggcgagtagctgttcgagtgcggtggtgacccaggccatggtttcgtcttcaatgtcgtgcagcagttcctcgatgctcgcataatgcgcgtaaaacgtggaacgatttacatcggcccgctcgcacaacgctttaacggtgatggagccgagcggctgatcgcgcagcaactcgataagcgcgtcctgcatggcacgtctcgtgtagcgggtgcggcggctttccgtcaattctttggccatggccttctccccaagttccgacaacccacaatccaactgttggttgcagaaccgacacagtgttgttttacttgagtatagcaggaagttctggcggggcctatggggctaggtggctgccacgagcgcgttggaggtgtgcgatggcgtatatcgaattcgaccatgtggtcaaggaatatccttctggcagcagtgtgattcgcgcgctcgacgaggccagcttcaccgccgaacaaggcgaattaagcgtgattctggggcagtccggtgccggcaaaaccacggcattgaacattctgggcggcatggataccgccacaaccggccgcgtagtggtcggcggacgcgatattacgggtctgcggaaaaaggaactggtgacctaccggcgcaacgatatcggcttcgtcttccagttctacaatctggtgcctaaccttaccgcgctcgaaaacgtggagctcgcctcgcaaatctgccctgaccatttcgatccagaggaaacgctgcgcaaagtcggactgggggagaggatggacaacttccccgcgcaactgtccggcggcgaacaacagcgtgtatccatcgcccgcgcgattgccaaaaagccgaagctgttgttgtgcgatgagccgaccggtgcgctcgattacgagaccggcaaggaagtgctgcagttgctgcaggatatttgccaaacacaaggcatgaccgtaatgatcatcacgcataattccgcgcttgcaccgatggctcacaaagtgattcgcttccgctccggcaaggtgaccagcgaggaggtcaacgcaacgccgcggcccatcgccgatatcgaatggtaggtgattggcgatgctcactgcaagacactctgtgaaacgccccgtgaaacaagcgaggcgattcgtgaaacaacctgtgaaacattctgtgaaacggcggaacctcgacgatagcggcggtcgaggagcgggcgtttctgcggtatttgccaaagatacgttgcgttgctggctgcgcagctggaagaggttcgtctcgatcgccgtcatcacgctgcttggcgtggccgtgctgaccggcatctacgccggatgccgcgatgcttttctggcggccggtcgtttttacgatcagcagggactgcatgacctgcaggtgctatccacatacggcctgaccgatgatgatgcaacggcactgcgccgaatcgacggtgtgcaaaccgtgcagcccgaacgttctcagacggtgaccacgttggtggacggcaccaagaaaaccgtgaccatgcaggaaatcggtaccgaagggcttgatcagccgtacatacggcagggcaaactgccgaacaaggccggcgaagtggcggttacgcagcaattcctgaacgatagcggactcaagattggcggcaccattactgtgacgccacaagacacctcttcatccgtcatatcggtagcggccacggagactgacgattccaataatgccgatacggtaggtgtcgccgccaatgcctcggcatccgatgcgaagtccgacgccaatacggacgccgacgccgagcaatccccgcagttccccacgaaactcaccatcaccggcgtcgtactcgacccgcgcgacctcaacaatccagacggctattcgggcatgacctccttccggtccacctcatccgaggactatgcgttctttgcacccagcgacggcgtgaccggcaatatatacactgcgatatcggttgccgtcactggtgcgtccgattttgacacgttttccgatgcctacgatgaagccatcaaaaccgtggccgaccgtatcgaacatcagatacaggccacacgccagaaagcccgtcgtcaacagatcgtctccagcgcgcagcgcaaactggatgatgccaaagacgaggccaacgagcagctggacgaagcccagaagcagatcgacgacaactgggccgagctggaagccaacaaaacgacattgcaagatagccgtaccgaattggagaacaacaggacaaccattaccgatggcgaacggcagctcgccgatggacgtgcgcagattgcatcggcccgtcaacagatcgcgcaaggtcgccagcagatagccgaagcgcgcacccagctcgaatcgggcaaagcgcagctcacctcggctcgcaaacagctcgatgcggcgcaaacggaactgactgccaatcgcacgaaaatcgaacagggcattacccaaatcgaccaaggcgtggcacaaattgatcagatgctgtccatgattcaacaggccgacaatctactggcgcaacttgacccgaatatcgacttcaactcacccacatggcaggccatcaagcaactgctcgcgcgccttggcattaccctgcctgaagtgccgtcaatcagtgagctgcggcaacagctggccgccaagcaaacggaactgcaaacgcagcgggacagtctgacccagcagaaagccgatttgcagcgcacattaaacgaaaccattgcccccgcacaatccaccttggaccagcagaacgcgcaactgaccgccaaggaacaggaagcggctgcaggagaggcacagctcaataccaaatccgcggaactcgaagcgaatgccgcaaccctcgaaacccagtcggcgcaacttgaagcgcaggccgcccaactggccagcggcaagcagcagctcgaagaaggcgagcggcagctggaagaaggcgaacaacagctcgcggacggcaaggcgaaactggatgatgcgcagtctgaactcgatgcgaagcgaagcgaagcggaaagcgaattcgccaagcagcaacggcgcatcgacgatgtggccaacgcacgttggtatgtgcagacgcgcgcttcgatcgacggattcagctcgctcaaatcagacgtcagttccatcgaatccatcggccgcgcattcccgattgtgttcctgctggtcgccgtgctcatgagcctgaccaccatgacccgcatggtcgaggaagaccgcggacttatcggcacctaccttggactcggctatggcggactcgccgtgtccagccggtatctgctgttcgcgttgctcgcctgcctggtcggcggcggcatcggtctgctggtcggattccttggcatcccggcattcctgctggtggtgattgagggactgtatatattgcccggtgtgcgactcgaatacgactggctgtacggttcggccggcatcgtgctgttcgtggtcggcgtgggcgtggccaccgcgctcgcctgtcgcgaggagatacggcacacgcccgccgcgctgatgcggccgaaggcgccgaaagcgggcgctcgcatattgctggagcggattcgcccggtatggagccggctgaacttcctcggcaaagtcaccgcgcgcaatatcttccgattcaagtcgcgcttgattatgaccgtgggcggcgtggccggttgcacagcgttgattatctgcggatttgcgattaatgacaccgtcgacacgattggcgtcaaacaatacgagcagatctaccagtacgacctgatggtcgtggccaatgacgatgacgccaccgcgatgcgcaagcaggtggcacaagatggccaaaccaccgaaacgctgaatctgcgcgtggatagtggcgagatgagcaatgcggcgcaggaaagcgaaaccgtgcagctgatgaccgtgcccaacgattcgctgaatatcttgaacgatatggtcacgctggaacaagccggcgatgatggatggtttgggctgcccaatatcttcggcaaagcgggtggcggcactgtagcgctggacgatagtggcgtgattgtgtcgcagtccgccgccaactcgctgaatattcatgccggcgacaccgtcacgctgggcaatggcggcagcagccgggccaaggtgcaggtcgcggccgtgacgcgcaatcttattggctctgatgtgtacatcagtgagcgactgtacgaccagaagtttgcggccggcggtgtgacgtcttcggcttcgggagatggcactgcctcgaccttgacgtggaacgcgatgctcgccaagctgaaaggttccgagaccgaacaggccgaatatgcggatcggttgggcgaggaatcgtcggtgctcaaggccgtgagctgtgcgcatctggccgccacgtttaagttcgatttgatgggtgccgtggtggcgctgattgtggggctcgccggcggcctggcgctggtggtgctgtttacgttggccaatacgaacgtgtccgaacgcatccgcgagatggccacactgaaggtgctgggcttctatgaccgcgaggtgcacaactacgtgaaccgcgagatgatgatattgaccggtatgggtgtggtggttggtctgccgcttggcaggtggataggcggattactgactgctgcgttgaatatgccgtcgctgtatttcgaagtggaagtgcactggtacagctatgcgattgccgtggtggcgacgctggcgttcgcgctgctggtgcagctgttcaccaacccagtgctcgatcgcgtagacccggtcagctcgctcaagtccgtggaataagtctcattgttgttgattatgtctggggtgaggcaggcgtaataaaagtctctgttaaaccagaattgacataggagagtcgaagtattgtccagcccgttaggccaaggcgttggggggtttatcttgtgggtctgtaagtaaagtgtgcatttcgttccaagcgtgcgaagacccgattttcaactggaatcaacgatcgggctttcgtgctcaacgattactattcacggctgcggagtatagctgggtagcgtctcggctatgtccgtagtgtccgggcctgcccgccaacgtcgtggccggcgtgccgcgcatcgagaaggacccgcgcggagggggcgtcgtcatcgtcccggtgcgcccgtacgcgaaggacatgggccggtgccgccagatgcggggagcatggccggccgtacgaccgtctgggcgtgtgccgctggcggcatctcgacatcggctgcgccaggctcctgttggagcacgcgcccaggagcgccgtgccggcgctgatggattggctgcaatgtattagacagtccgatgggggacgattgacatgaggttggaggccgacgatggccggcccgaagcatccccgccactacgaggagtcgttcaagcggcagatcgtgcagctttacgagaacggcaagccggcgcgcgagatcaaggacgagtacgacatcccgcattccacgctgcaccgttgggtccagggcatccgcaaccgcggctccacgaaagccgccgacaaccgcacacccgagcagaacgagccggtcgggccggggaggcgcgaccggcggttggagatggaggtggacgtttcagaacaagcggcgccggtattcgcgcgaaggcaggcgtgatacgggccaacgcctcccgttatccggtatcggcgcgatgcgggatgccgggcgtcccacgctccacctgctactggatgatcgaacatcccgaagccgggcgggtggacccgatcgccggcgacgtgcgcgcggtctggcgcgacggccatgagcgctgcggcgccgggaaggtcaaggccgccccggaaaggaggggcgtcaccgcgtccaggaggcgcgtcggcggcatcatgcgcgaacacgaacaggccgccgaagaaggagctcgcgtaccggaaccactgcaccacgatcgagcagctgaggtgcgacctcaacgactacgtgtggcggtccggcaaccagcggctccactccacccccggataccggagcccgaagggattcaccgaacaaggactcgtcctctaagaaaccgtccaacacaccgttgccaatccacatcgaggagttctcgaaactcggcgagaagatcgaccgccgccgcttcgacatcctgcgcaccatccgatccggcctatccaacgccaggctcgaggccgtcaacaacaagatcaagaccaccatcaagatgggctgcggctacaggaacctcggcaacctcatcgccccggtcatgctcaaatgcggcggcctcaacctccaactccccggacgccaataacccgtaagccagaccagtgacccacacccacacaaacacccgaagagccaaaatttatacgtcaacattcatttccttgacattattaaatcaatatgatttaataaatttgtcgatggagacacggatccaataggagacgcaaccgagcgaaggagcaaggatatgattacaggaaaactcttcaaagcggcggctgtagccgttgcggccatggtcgcattatccggctgtggaatgagtagtgcctctgccgatgccaataccatcaaagtgatgtattacaagacggattcgtttgtccgttttgatgctctgatgaagacggtgaaggcgaaaatcgaaaaagagaatcctggtacgacggttgagctacaacctgtaaccgcgaacgataacgattacaaaacaaaacttgcattagcgcaacgttctgcggaaacagccccagatgtgttctatgaagattcatcacaaattcgtgctgatgctgatgcaggttatctgttgaatcttgattcttatttggccaagtgggatgactggcagaatgatttttccgatgctgctaagaaagttggcaaaggtaaagatggtacctatgcggtgcctctgagcaccgatacacgtgtgatttggtacaacaagcgtgtgttccaaaaagctggtattgttgttccttggcagcctaaaagttggcaagatatccttgacacggcggctacaatcaagaaaaaactacccgatgtcactccaatgagcatgcttgccggtactccttccggtgaaggtacagtcatgcagagtttctacgaattgttgttcgggacgtccgctggtgatgacgcccttcaggatcaaaaaagtgagaaatgggtcattggctcacaaggtatgaaagattccctggaattcatgaaaacgatttatgacaagggatatacgccgagtgcatctgaagtacttgatgcaaactatggagctaaagtcggcagcgattatcttcccaaggataaaatgggatttgctgtcgatggaagttggatgccgtccacttggacgatcggaggctcctacgaatggccagactataccgatgttattggggcggcactcttcccgactcagaagggcgaaaagcctggatatgtgtctatgtctggtggctggacgatggctgttggtgccaagactaagaatgctcaattggcttttgattttgttaaggaagctactaataaggacaactctctgacctatgcgaaagatatggtgcttactgctgttcgcaccgatgtcgctgaagatcctagctaccttgaggcaagcccttatcaggagatcaccactgaagccgtgaattacacgcacttccgtcctagcgttactgaatacaccaaaatttcctctgaggttcagaaagccactgagaatgtcatcactgggcagatgagtgttgatgaggccgcaaaggcatatgacgatgcggttatcaacattgtcggcaaagacaatgtcgtaactaagtgatgatgcggtaggcgtgcgacgcggcggcagattgagccgatgattctgatgccgccgcggtccatgtttacggtgcttttataggcaaaggaacgaaaatgaaattcgccaaacggtattggacagtattgccctcaatgattctgttgtgtgttttcatggtagggccaatattatgggctttttatgggtcgctgaccaatacgtcacttacgggggttaatgcagtcaatgcgcaattcgtcggtatgaagaattacacgcatatgttcactgatagagacttcccgaattctgtatggctgaccattatttttgtgcttgtcagtgctattatcgctcagaatttattgggtatggtggttgccgttcttatgtcgcgcgccaacaaagttgtgagccaatttgtcagtattagtgtcatagcggcttgggtcctgccagagatggtggccggttttgcgtgctatgccttcttttctcgtgaaggtactcttaaccaaattcttggtgtgattggacttgggcagcgcgattggttgtatgccttcccaatgtttgcggttattcttgcgaatatttggcgagggacggcgttctcaatgatgaattatcaagcagccattggcgaagttgataagtctttgattgaggcatctgtggtggatggagctaatgcgtggcagacatttattcatgtgacggttcccgttattaagcaaaccattatgaccaacttgatgctgatcacccttcagactatgtctgcattcactttaatcttcgtgatgactgccggtggcccgggcgtgaagagcagtacgttgcccatttacgcgtataaagctgcttttaagttcggcgatatcggatatggcagtgccattgccgttgtcatgctggttattggcgcaatcttcggtgtgatttatatccgcgctctgaaggatgagaagggagtcaccaatgagtaatgcaatcgctatatcgaagacctccgaacataggccacggctgcaaacgcccaattcaccaaggcgtggtgtctctgcatttttcgcctactttgctatgggcattgtatttgttttattcttattgccattactgtggctattgtttgcggcatttgatactagtgcaacatttgagacgaaactgccaactcactggactggggcgaatttctcggccattatgacgaaggatctgactttccttcctctgtggaatagttttgttttatcggcttccactacaatcatcgtgttgttctgtgcggtattgactgcatatccgatatctcgttatcagtctaggttcaataagccattcctgtattcagtactgtttggcacttgccttccgatttcatgccttatggtgccggtgtatgcactgtttgtttctatgaacatgttggattccactatcggtacgatactattcatgtcggcgtcatctttgcctatggctatctggatgactaagaactttatggactctgtccccattgagctcgaggaagccgcatgggtggatggtgccagcttgcttaaatcgattagtagtgtcgttgtgccgctcatgcgaccaggactcgcagtagtcagtatttatgtgtttactggagcttggggcaatttcttcgttccctatatgttgctgatgtcttcgagtaagcaacctgccgcagtcaccatttactcgttctttggattgtatggcactgtcgcttatggccaattagctgcattttcccttatctactccatccctgttgtcgttatgtacatcatctctaacagattcttgggaacatactctctggctggtggtgttaagggataaggcattccaggatttcgcattatttgtatagcgactatattctcgaaaggaaaatcatggcaaagatgacatatgatgaaaaagtgacgatgcgcatagagcgcgcaattagtcagcaccttactgatgctatgtacttgcatagtgttcccgtatccataacctgctggaaagttgggggtgagccggtgccgttcgcaattgccagaacggctgagtaccggaactttaatgtgggcgagtcttggggtgcggcttgggacacttggtggttccacgttacaggtaatgtacctgagtcttgggcggggattgaaggtactaggcccgaactagttgtagatcttggccgtattggtttgggcccaggtttccaagcggaagctttagtacgtacctcggacggacaagtagtcaaggctttggaaccgtataatgcatgggttccgctcccggagcctggtgaaaattttgacttctatattgaagcggccgccaacccgcaaattactccaggtttcccgtatttgccaactgatttgggcgatgaaggtgtcaaagatggtccggaactttaccggatgcaacgtcttgatgcgtcattattggaccttggggtgtggcatctcacccaagaactacgaattctgtctgggttggctaaagaggtggatccaaaacgcactaggcatgcggatattatgcatgctcttgagcaagctgcagatcttattgatccgaacgacgtacatggaagtgcgcctaaggttcggcatgctcttgttaaggtgctttctgccacagctccagaaaaagggcacactgcatttgccgtgggacacgcacatattgacactgcttggttatggccgttgcgtgaaacaaaaaggaaggtggctcgtacattcagcaacgttgtggaattgtccgatgaagataaggatttggtgttcgccgcatcttccgcgcagcagtacaagtggctcaaggagaattatcccgaggtatttgtcgaggtgaagaggaaggttgccgagggcaagttcattcccgtaggtggtatgtgggttgaatgcgatgccaatatgccatctggcgaatcgctgacccgccagtttttgcaaggtgttcgattcttcgaggagaaccttggtggatgttcaccagtagtatggctacctgacagctttggctactcgggtgcgttcccgcagattgcgcgtcttgcaggtttcaagtacttccttacgcaaaagatttcttggaatgacaccaatacattcccacatcatacattcttatggcaaggcatcgatgggactgaaattttcacgcatttccctccatcggatacctacaattccaacatgtctgctgcggatgtggcgaaaacggagattcaatattctgaaaaagggaaaggatcgtcgagcctgatgctgtttgggtggggagacggtggtggcggtcctacccgtgagatgcttgaggcggcgcgtctgcaaaagaatctagagggatctccgaaggtgcgaattgccacgccgatggaattcttcgagcaggcagagcgcgaattaagagatccggcccgttggcatggagagctatatcttgaattgcatcgaggaactctcacatctcagtctcataccaagtacggtaatcgtcgttgcgaatctttgctgcgcgaggcagagctatgggcgaccgccgcaactgtgctgaagaggaaggcgtacccatatgaagagatatcggaaatatggcagaaagttcttctttaccaattccatgatattcttcctggatcggcaattgcttgggtatatagcgaagttgaacgcaactaccgtgagctggagcatcgactcgaatcggttatcagtgagtccattcatgcaattagcggtgacggtgacaaattgatgtttgctaatgctgcccctcttatacaatgtggtgtgcctgcaggcggcatcgatgttgccgttgaacctatcgcgtcaaaggtttgcatgttggatgatggcagtattcgcatggcgaatgaacgtgtctcgttcgttcttgatggcaagggccatataatctctgcggtcgatctcaaaactggacgagagacgattgatccgatgcaacctggcaatgagttgcaattgttcgtggactctccggccgagtgggacgcctgggacattgagaagaattacgagcgttgtcttcttgacgagaccgtggtgtccaaggttgatcttggagcagatggaacgatggtggtcaatggtgtcattggttcttccccatacagccagaccattgctctcgatgatgatgtggatgctttgactattcgtacccatattgaatggaaggagagcgataggctccttaagcaggcgttccctgttaaggtatatgcgactgaagccaagtctgagattcagtatggtcatattacgcgacctattcatcgcaacactacttgggacgaggcaaggttcgagaccttggctcatcggtgggtgtatgttagcgaaggaggattcggtgttggcatcgctaatatgactaattacggcaacgatatccgacaaatcattatgagtgatggacgtcccggaactagaatccgcctatcgttgttgcgtgcgccgcacttcccggcccctcgagctgatgtgggaagtcatgattttgcagtgtctttcaccataggaagcagcgttgatcgtgcgatttcccaagggtaccgtcttaatgtccctgcgcgcgcagtccatggagagcatgcgctagcgccatttgtgtcggtggaaggagatggcgtgcttgtcgaagcagtaaagatggctgaggaccgctccggtgatgtaattgtccgactgtatgaggcgtatggttctcaaagcagggttgtgctgcataccggatttggttggaagagcgtgacggagactggattgttggagcgtgcatgcgacgcagttcgtcccgcagtagtggatgaaagcagggttcaatccaatgtagaactggagctacatccgttccaaattgtaactcttcggtttgccctaaattgatttctgctttacctgagattagtgatgcgccgttctatctgtgatgggcggcgcatctttggtgcgaggttggggatgcggacgaaaagttggacgcgtgagtgtccggattggagtccgctgtgttcggcgaggcgcaaaggcggaaagccgtcgacgtgtgcttccggggatgcgtgacgctgaagaaggtgatcgccgagctggggtacccgtccgaggggtgcctgacgaactggatggcccgggatccgcggcatggtcgccgttcccccccccgtatacgcttgacgtcagggccagggccgccggacgcgtcatcgccggggagtgttgcgtcgacgtcgccaaggacgttggccgctcggcgacgagcgtgcggaagcgggccggtgcgtacggacgggaaggaatcggcggactcatgaacatgggcgacggcatacgggttccggcggtggacgacggtgtctttagtcaagtcggcgtttcttttttagtcaggtattttttttcgggtttgggcgcggggcgtgccggccggtggttggttattggttttgtggtttgccgaacatgagggcctggctgatgcggtggctctgtccggtgaattctatgagccgtccgtggtggacgatgcggtcgatgatcgcggcggcgagtttgtcgtcggcgaagaccgtgccccatttgccgaactcgatgttcgtggtgaagatgatgctcctcctttcgtacgagttggtgatgatccggtagagcagcctggccccgtcgacgtcgaagggcacgtagccgaactcgtcgaggatgagcaggtcggctttgtcgatgtcgcggagcatggcgtcgaggctgccgtcgcgtttggccttgccgagctggagcacgagctcggcggtgggcaggaacctgacgctcatgtcccgttcgatggccttcatgcccagggcggtggccagatgggtcttgccgcgcccggtcctgccgtggaacacgaggtcctgggccttggggacgaagtccaatgagaggagttcctcgcgcgtgtacccgtcgggcagtttcacgttcgcgaagtcgtagccctccaggcttttgggcacggggaaccgggcgcgcctcaggagcctggcgcgtttggcgtcctcgcggttggcgagttccgtggcgagcaggcggtcggcggcgtcgatctgccggggcgttgcccaggagaggaagtcgtccatggtggcgttggatatgaacaggccgcgcgcgtgggcgcgcaggacggcgggatcggttcttctggcttgtttcgcgtcgtccgtcatcacgactccttcccggtgtcggcgaacgcccggtcgtattcgctcaggtcgaccggctcgtcgtacgagacgccggcgccgccgtcggcgatcctggccgcggcgagctggacgctggccctgtcgacgccgccggtggcctcgagcacctggagcatcgccccgacggcgttggcccacccgttgtccctgtcggttttcttgagggtctgcaggccctcgcgccgcaccgtttcctcctgcaggtccagccatccgcgaagcgggtcgggcagcgcttcgcgcacgcggctgttgggccacgcgttgggcctgttgcaaagcagctccaattggcgcgacgggtcggagctgtcagtcggcatatcgccgtaggcgcgcggatgcgaggcaaggcgccggcccgatgaatcgaggatctcgatctccagggcgcgtatgccgatgatgacctcgcggcccgcgctgccggggtcggcggaatagcggtggcacccctcgagcgtgacgcaaccgtatttgtcggccttcatccgctcccagcgcaccacgtcgaacggcttcgccggcaggggcagaagcgccccgcgatcccgctcgaacaggtcggcctcgcgttcgcccttcctccaatgcgccttgtcgccaagccccaggcacctgtcgggcagtttctcgttgaatccctccaggttccatacgctgggcctgggaacgaacagcttgcgcctcaccctgccgacgttcgcctcgaccgcgcccttctcatggccggaatgcgggttgcagaacgcgaaggagaatccgtagtgcgcctggaacgcctggaacaggcgggccggacgcaccttctcgaaccgttgcttgcggcccacgccggcagcgttgtcgaacacgatgcgctccggcaccccgccgagccattcgaacaggttctccaacgcctggcacgtgcactccgcgttctccccgggcatcagctgcgagggcgcgacgttcgaatgcgggaaatccagcacgaagtggtgcatgcgcgccagcgcgccccgccattgaacgtcgacctcgccgaaatcggcctgcgcctcgcccggatgccacacgaggtccatgaaccccgaggagcgttcctccgcgccatgctcgtcgcgcagcctggccaccgtcctggtcaccgtcgacagggagacctccgcgccatgctcgtcgcgcagacgctcccatatccgagtggccgtgtgacgctgcttgcgccacgaccccggtcctcggcgagccactgctcgatcaggggaacccactcgtcgatcaccgacgggcggcgcctcctcaccggcgtccttggcgacaggtcctccattttcaggtacttgcggaccgtgggctcgctcaccccgaccttcctggcgatcgaggcgatggaatccccgttccttcgcaactgacgaatagactgaacttcgggcatgctgatcatttgcctttccggccctccttgatacatgactaagcaccatcaagataaggcacgcgggtggtcggcatgctccacgcctaaacccgaaaaaacttcgtgactaaaacctcaaaatcctattgaatcaatacacgacgggcgcgacgatccgatggggctggaacggcagatcgccgcgctgcctctggagaacgcggtgacgggggcggtcgcggttgtaaaagccggcggcccgagcctcgacccgtgcgggccggcgaaccgggagaagacgcgggtcgtggaacggatcgggggcgggttcggcctcgaggccgtgctcgatgccgtgacgctcggtcgcggcacctgctactaccagtgcgcggccatgcgggccggggacgagcacgccgttctgcgcgaacggatacgcggtctgttcgagcaaggcggccgcgtgcggggccatgcgtaccatccaccggctgctgcgcatggatgacgccgagccgttggccgtttcggagaaggtcgtgcgccgtatcatgggcgaggaggggcttcgtcccgtgcacctgcggaaacccaaggcggtggagctcctacgggggcgagccgtccgaggcgccggccagcgctcgtggagcgcggcttccacgccgagcggccgaacacgccgtggctcacggacgtcgcccggttcaccatggacggctgcaagtgccggccgtcaccggtggtcgactgcttcgacggcatggtcgtggcctggcggctgtcgcgaagccccgacgcggccatgagcgagggcatgccgctcgacgcggccgccgcgcttcgcgacggggagcgtcccacggtccgttccggccgcgggtgccgctgccggtggcccgggtggatccgcatctgcgaggagcacggtctgacccggtccatgggcgccaagggctgcagtccggacaacgcggccgccgagggattcttcggacgattgaagaacgagttcttccgctgccgcgactggaggggcgtggggtaccgggaattccgcgaacggctcgccgcctacctggcccgctacgatgagacgcgcatcaagagatcactgggctggcaaagccccgtgcaataccgcaaaagccttggactggtcgcatgaccatccaagaaaacgtccgcatccccaacaaaccaagatttcgcgctcaaacattacgacaaacgtcgggtgctgtgactattggtaatgtggccgtataatcaatgaactgcagtgttgcaagaatttttacaaggaaggtggtcctcctcatgcatagtgtgcgtccgtcgttccgtaaaggaacaaatatgccggctgtcgcaggctacaacagccgtgttgtgcttgagacagtgcgcaagcatgaagggctgagccgtagtgatattgcaaaacacactggtctaactgcgcagactgtttcgaatattgttcgacgattattggaagagcagcttatatcggagaccggtactgcagccgggcagcggggaaagcctcgtactttactttgtctgaatgaaaatggtcgctatgccataggaattcatattgatccgattatcacgactatcgtattggtcaatcttgcgggtgaggtcattgctcgttcgtatcctgttgtatctgcaaatgctactgatgcgctatgtgatcttgcgcattcttgcgaacagttaattgacctcagcaaggtggatcgcgatcttatcgtcggtataggcattgctatgcccggaccgttggatttgcggactaatatggtacttgatcctccgaatttaaatggctggcataaggttcctgtcactaatgaactggcaaaacttactggtatgccagtaatgctagaaaaggatgttactgctgcatgtcatggagaatcatgggtcggaggaggtgccgccgatcgtagttttttattcttttatctgggatttggcatagcgttcggtgtgtctgggcaaggaaatgtataccgcggatataccggtaatgagggtgaaattgggcacattgtcgtggacacaggtgggcgggagtgttggtgcggacaacgcggatgcgtgtcaaattcctgcgatccaacggccatcgtgctagatgccatgcagcgtggcgtctatgatgacgcagatggcttcgacctgaccgacatgttcgttattaatgaccgttttaacgatatttgcttaaaagctcagtgtggggattccgtgtgcagagatgtgctccgtgagactagtcgaaaaattggtcgtgcggctgttattctctctgatttattcgatatagaccatatagtcctcggcgggccgaattggaaacaactcgaagagccgttgctcgccgaaattccgcctatgttagagactaagacagtgatgcggcgggtccatgagtttaaggtatctcccactgctgtaggtgatgatgttgcagcgcttggagctgcagtttctgtacttgatcggcagcttagcccgaaggcggctccgttgcgattcgcttaaaagttgcaggagatggtcagtggtgtggggtcgcaaagatgaagcatcagagtgctttcgcctccggtatctgggcaataattagtctctccctccgtcacgcttcgcgtgccgcctccctcatcagagggaggtaattcgcacgaagttcaatttggtgttggtaaattgaactttttggcggaatatttacagcatcatcgcatgtattcttgagctgagcggttttcgcgacatatttcggtgatacagtctgaacttgttttgaacgagtatcgcgtccggtacgtaacaatcgggcggcggagaagagaaatgaaatcagtatggccgatacgaatgtgaatggtggtacacggcaggctacgggcaaactcaagtctgtcgaaagcctggaccggaccaacgagatggagcgcggcctgaacaaccgccacgtgcagttcatcgccatcggcggcaccatcggcaccggcttgttcctggggtccggcaagtcgctggcgctgaccggtccctcgatcgtcttcgtgtatatcctggtcggcgtcatcatgttcttcctgatgcgcgccatcggcgagatgatgtaccgcgaccccagccagcacaccttcatcaatttcatcacccgctacctgggcaacggatgggggcatttcgccggctggacgtattgggccgcgctcgtgctgttgggcatgaccgagatcacggccgtctccacgtacttcatcaccttcttcgacacgttcggcatcgacctgacccattggaaatggctgatcgaactgtgcttcctggtgtcgctggtgtccgtcaacctgatcgccgtcaaggtgttcggcgaggtggaattctggttctcgatgatcaagatcacgctgatcggcgcgatgatcgtcaccgccgtggtcatgatcgtgatcggctaccattacccggccgcgcggattcatggcgtggatcatgtgagcccggcgggccacgccggactcgacaacctgttctccggcttctcgttcgccccgaacggctggatggccttcctcatgagcttccagatggtgttcttcgcctatgagctgctcgagttcgtgggcgtcaccgtctccgagaccaagaatcctcgtgaggtgctgcccaaagccgtcaacgagatcatcgtgcg

SEQ ID NO: 58 - DNA, 10281 bp, Unknown
  R206_24m  MAG No. k141_687
cgctggtctcgtactcgccaccatcggcatgattgccgccgccttcaacctcattccagtgatcgtcggcgctttcctccaagaggccatcgacgtggtcagcatcctctgggccctcactgccctcatcgaccgcgactaggcggggtatctcctcgactgagtcgcggttttgccccgctgacggtctgtaagcggggcgattctgtgggctaataggggttttgctccactcgtggtctgcgagtggggtgattttacggtctaatagtggttttgctgcgctggtgggtgttcagcggggtgccttggcgggttagtcgcagtttcgctccgctgatgggctgtaagcggagcaatttttcgggttactcgcgattttgctccgctggcggtctgtgagtggggcaatttcttgatcgactcgtggttttgccccgctggcgtgaggctggcagagggtattaggcacaggattcccaccactcacccctgttgcaacggaaggctttgcgataacctgtaacgcgtgactgaatctgtgaatactgaactccgcattgctgtaatcggcgctggtccggccggcgtctactcatccgatatcttcctgcgccagctcaagaaactgggcgaagaactcggcctcggcaccaaggcccgcatcgacctgttcgagaagctgccggtaccgttcggtctggtgcgttacggcgtggccccggaccacccgtccatcaagttcatcgcctccgcgcttgagaagacgctcgacaacccgaacatccacctctattgcgacgtggaattcggcaaggacgtgactcttgacgacctgctggcccgttacgacgccgtgctgttcgccaccggcgcggtcaaggacaagccgctgaacctgcccggcgccgacctcgacggcgtgtatggcgccgccaagttcgtcgaatggtacgacgggtatcccaccggtgcccgcgaatggccgcttacggccgagaacgtcgccgtgatcggcggcggcaacgtggccatggacgtggcccgcgaactcatgcgcgacgccgacgacctcaaggccaagaccgacattccggacaacgtgtacgagggcatcggccagaacaaggccaaggtgctccacctgttcatccgtcgtggcgtggcccaggccaagttcagcgtgcaggaactgcgcgagatggagaagctgcccggcgtgcagctcatcatcaatgaggacgacttcgatttggacgacgagaccatcgaggtggccggcaaggacaagctcacccgccagatggtcgaggaactgttcgccatccgcgagatggccgaggacatggaagatgacggcgacgtcgacttcgaaggcaatccggccgaccgcaagtactacgtgcacttcaactccgcacccacggaaatcctcggcgaggacggcaaggtcaaggccatccgcgtggagcgcaccgaaaccggtgccgacggcaagatgagccgcaccggcgagttcaccgactacccggtcgaggccgtctaccacgccatcggctacaagccggccgaggctcccggcattacttacgacgagcacggcgcccacctggccaacgccaacggcgacggccgcatcaccaccgaggccgacggcggcgaagtgcgcgaccgcctgtacgccactggctgggccaagcgcggcccggtgggcctgatcggctccaccaagtccgacgcacttgccatcgtgaccaacatgcttgaggatctggccaaggccgccgaaggtggtcgcgtggccgaggatcgcgaccccgaatccatcgaccgactgctggaaagccgcggcgtcaagccgattgacttcgctggctggaagaaggtcgacgccttcgagcgcgccgaaggcgccaaggagggccgcgagcacaagaaggtcatcgagcccgaccagatgcgtgagctcgctctggcctgattgactatcagctcatcgcaccggcaactgcaccagcagcaatcggcgcgattgatacatcgataaataagaacgccggttatacgccagcgttcttatttatataaaagccagtgtcatgccagtcgagcaggccgatgggccaaacgatccaagcagccaaagcaggccaaacaagcaaagcgtcccgatcagaccaatcggtaaagcggtaaagcggtaaaacaggccaagcaaccgcactgtcaagcatcgtcaatcccatgtaaacaggctattccgatccccgccaaccgcaccgtcaggcaccgccaacccccatccgattcacccctcggcgcacatccagccaatattcaggcagtgattttagtgtgagcctcatggatgccaaagtacgggtgcacggccatttcaacggcctgaagactacgctgctgttcgccttgatgtgggccatcatcatgctgatatggtgggccacgggcggcaggcagcagacgctgggcatctacgtcattatcgggttggccaccacgttcggctcatactggttctccgacaaactcgccatcgcatccatgggagccagggaggtcagcgagcaggaagcccccgaaatctaccagatcgtgcgcgagctgagtgccaaggccggcaagccgatgcctcgcatctacatcgcgcccaccatgagtccgaacgccttcgccaccggccgcaacgaacgtcacgctgccgtatgctgcacgcagggcatcctgcagattctgaacgcccgcgagttgcgcggcgtgctgggtcatgaactgatgcacgtgtacaaccgcgacattctgacctccgccatcgcctctgccatggccaccgtcatcacgtacctcggttattctctgatgtatttcggcggcggcaactcgcgcgacgaccgcgataattcaggcggtctcggcttgatcggcgtgctcctcagcgtgattctcgcgccgattgccgcatcactgattcagatggccatctcccgtactcgcgaatacgacgccgacgaagacggcagtctgctgaccggcgaccccgaggccctggcctccgcgctcaacaagatctcctatggtgcccagaccacgcccatgcgcaaaacggccggcacccagtccgtctccgcgatgatgattgccaatccgttctccgcggtcggtttctccaaactgttctccacgcatccgccgactgatcagcgcatcgcacgcctgatgcaaatggccaatgaaatgaacggcactccggtggccgcatccacgtattccacgcgcgcaattcactagtccagcacagaactcaaaccggcacatggcgcaaggtgccgcataggtgatacacttgcctctcgtgcgtggaagcgcacatgcggacgtagttcatcggtagaatgaaagcttcccaagctttagaggcgggttcgactcccgtcgtccgctccatcgattttccttgaaatttcaacggttttccctcttttgagagcttattttcctgccgtatgaccgctatatgagaacaattcacgtcgtccgcgtatcgtgatgggcgatgtgtgaacccaagaccgctgcaaccaatggccaaccaacgccaaccctcgaacgcaccccgcacgacatcttcgtcggtgccggactggcgctcgccggaggcgtcttctggggcgtcaacgccaccgtctccaaactcctgatgaacgactatcacgccgatccgctgtggatcgcctgcgtgcgcgagctattggccggtgtcatctttctggtttgcgcaggaatcttcacgcctgacaagttcatcaactcgcttaaggactaccgttcctacccgagactcctgctgtgcgcgttcttctgcgtgctcatggtgcaggtctcctacttgaaggccattgactggaccaattccggcacggccacagtgctgcagacgctcaatctgctggttgtactcgtattcgtatgtattatgggcaaacggctgcccggcaaacgcgaaagcatcggtgtggtactcgcttttgtgggcacggtgctcatcgccacaggcggcgatctcagccagctcagtctgccgctgcccggtctgctgtggggcctgaccgatgccgtatgcacgtcactgcttgcgattctgcccatcgcattaatggccaaatggggcaacttcatggccagcggcgtcatgttcatcgtttccggcctaatgctgctgccgctcgtgcgcccgtggaccaccgcccccgcgttggactggttcggcattggtctgatggtattcaccgtggtgttcggcacattcggtgcctattggctattcctcggcggcacccagcgctgcggtgcaatgcgcgccaccatgctcggcaccagtgaacccgtaaccgccactatcaccggtgtcctattcgccggcgcggtctttaccccgaccgatttggtcggcttcgccatgattatcatcatggtgttcctcgtgagatagttcacagctcgcctggctccagaacctagtctggcgggcacaccccgagcgataatgaagccatgacaatcgcaacaccggaacgttatgccgaaatgctagacgccgcacgacgcggcggctacgcttaccctgccatcaacgtgaccagctcgcagacgctgaacgccgcgctgaaggggttcgcggatgccgaatccgacggcatcatccaggtgtccgtcggcgcagccgcatacctttccggcatcggcgtcaacgaccgtgtcaccggatcgctggccttggccgcttttgcacacgaggtcgccgcgaagtacccgaacatcaccatcgccctgcacaccgatcactgcgccaagcagtatctggacgaatgggtgcgaccgctgctcgcacatgaggccgatcaggtggcgcatggtcaggagcccacattccagtcgcatatgtgggacggctccaccgtgtcgctcaaggaaaatctggacatcgccgaggagctgctcgataagtcgcaggccgcgcacacggtgctggagatcgagatcggcgcggtcggcggcgaggaagacggctattccgccaaaatcgacgaacgcctctattccacgccggccgatggccttgaagtggcccgtcgccttggtttgggcgagcgtggccgatacatggccgccttcacgttcggtaatgtgcacggctcctacaagcccggcgtggtcaagctgcgtcccgccctgctcggtgatattcagtcccgtgtggcgcgcgcggtggtcgagggtgagctgcccagcgccgccggcatagtcgactttcccaacggcaagccgttcgaattggtgttccacggcggttcgggctcccgtccggaagagattgcagaagccgtgagccatggcgtgatcaagatgaacatcgacaccgacacgcaatactcgttcacgcgcccgattgccgaccatgtgttcgagaactatgacaaggtcctcaagatcgacggtgaagtgggcgaaaagaagttctacgatccgcgttcctggggccgcaaggccgaggaatccatgtccgcccgcgtggctgaggcatgcaagcaactcggctcggccggcaaagcactcagataacacccaaataaactgtcattcgccgtggcggcgcatcggtgtcggcccgcctcgcgcaacgcgcggcaaagacaccagaagcccgattgcgtgagatggccgcgccccgagtagagggtgtaaggtagtctgtttccggcggaatcgtgcgaatgcggaggtgtgttatgcctggaattgttcttatcggtgctcagtggggcgacgagggtaaaggcaaggctaccgatctgatcggcaccaaggtcgattacgtcgcgcgcttcaacggcggcaacaacgcgggccatagcgtggtggtcggtgacgagtcgtacgccctgcacctgctgccctccggcatcatcaacccgaacctgaccccggtgatcggcaacggcgtggtcgtggacccggaagtgctcttcgaggagatcgacggcttggaatcccgcggcatcgattgctcccacctcaaggtgagcgaggccgcacacatcatcgcgccctaccaccgcacactcgacaaggtgactgaacgcttccttggcaagcacaagatcggcaccaccggccgtggcatcggcccagcctacgcggacaagatcaaccgtgtcggcatccgcgtgcatgacctgttcaacgccgaccatctgcacgacaaggtggaggccagcctgcaccagaagaaccagatgctggtcaagctctacaaccgtcgtccgatcgacgtggaccagaccaccgaggagctgctgaagctcggcgaacgcctcaagccgtacgtggccaacaccggcctgattctcaacaaggcgcttgacgaaggcaagaccgtgctgttcgaaggcgctcaggccaccatgcttgacgtggatcacggcacctacccgttcgtcacctcttccaacccgaccgccggcggcgcctgcaccggcaccggcgtgggccccaccaagatcacccgcgtaatcggcgtctccaaggcctacgtcacccgcgtgggcgaaggcccattccccaccgaactgctggacgagtccggcgaatggctgcgtcagcagggccacgagttcggcgtgaccaccggccgcccgcgtcgttgcggctggttcgatgcggtcgtcaaccgttacgcctcccaggtcaacggcctgaccgacatcgtgctcaccaagctcgacgtgctcaccggcctgaaggagattccgatctgcgtggcttacgacgtggacggcgaacgtcacgacgatatgccgaccgatcaggccgctttcgccgccgccaagccgatttacgagaccatgcccggctgggatgaggacatctccgactgccactccttcgacgagctgcccgccacctgccaggcctacgtcaagcgtttggaagagctgagcggttgccgtatctccgcgatcggcaccggtccgcagcgcgaccatgtcatccagatcaattcgctggtcgactgaccgtctgcaacgaatttcccggcttgactggtaacgacgcggcacatgatatccgccggctgattccgcgattcgaccacttgaagtggaagatggcggcggccggcatagtcattggtctggtttcaggattgctggttgtcgtataccgtctcggcatcgaatacggcacggatgcgtcccgttggatatatgcgcggattcgcgagaccccgtggctgattgcgccgtgggcggttgccgcggtggcggccgcgctggcgatcgcgtggatggtcggcaaggagccgatggctggtggcagcggcatcccgcagaccaacggcgtggtgatatgcggcttgaagatgcgttggcagacgattctgccagtccgtttcgtcggtggactgttgggtgcgttgtttggtctgtcgctcggccgtgaggggccgtccattcagattggtgcgtcgggcgcgcagtgtgtatcccaccgtttgcgcggccgccgccgtgaggacatgcaggagcattatctggtcaccgccggtgccgcggccggcttgtccgccgcgttcagcgcgccgctgtccggcatgatgttcgctttggaaggggtgcatcggagtttttcccctgcgattctgatgggcgccaccgccgcatcgctgaccgccgatttcgtctcaaaatactgtttcggtctgcgtccggttttggatttcggtgatatcggtcagctgtcgttggaagagtatgtgtggctgattccgttgggattggtggccggtttggttggttcgctgatgaaccgctcgttgcttggcttccagacgctgtacggcaaactgccggcatggagccgcccgatgattgcgattgcgatcgcgttgcctgtcggcatctggttgcccgatgtgctcggcggcggctcgaatctgattgataccgccgaacatgcgcgcgtcggcttgggaatgctgtgtctgctgttcgtggcgaagatgctgttcacatctacgagtttcggctcaggcgcgcctggcggtattttcatgccgattcttgcggtcggttcgttggccggcggcatctgcggtgaagtgttgcatcgattcggtgatctgccatccgacgcagtggcggtgtttgcggtgtgcgtgatgacgggcacgctcgccgcgtccgtgaaaacgccgatcacgtcgattctgttggctgtggagatgtctggaacgttgacgcacatgctgccggtcgcggccgtcgctttcatcgcgctgttggtgtccgatttgctgcgcaccaaaccgatttatggggagttgctggagcggtacgtgcgcgcgcaaggcatgcagatggcgatcgcaagccatgtgggcagcggcattatggaactgccattggaaatgggagcgattgcggacggcaagcgggtgcgtgacgtgcgttggccgtctgggtgcctgatcatcggcctgcgtcgcggcgaaagcgagatcgtgccgcgcggcgatacacggctgcgtgccggcgactatctggtggtgctgttcagtggcgaggaggagcgcgaggtgcgacctgcgatgcggcggctgtgtgatgcccggcttgactgagcctggctgaattcggctggactctggatgtacgaatttgcggaatcggacatccagggtgcatacgttggcgctccgtgtaaactcatatgcgttaggaaggtggcaaccgcggcccagctcgttgttgcacggcctatgggcggaacaacgctgtccgcggaaggccagtacagggggagcgcaatggaatcgcaagaacaatcgccgggagacgtggtgactgcgggtgaggattcacatcccatcacgcaggcaatcgacactgttgaggtgacgcatgctggtgcaaccgcgcccgccgctaacaccatggatccgcctacgattcccctggcgccgatgaaacgtatgcaggcgcggttcaatccgctcgccgacggactgatgtatgttgtggtgttcgtcggtggatttgttggagtcggctgtcggcatgcgttggatatgctcctgccgtcggtcagcgggacgccattcgttgtgggcacgtttgtgtcgaatatggtcgcctgcttcctgttcgcgatgctgaccgaattcatggcgaccgcttcgtggctgcgtcgccgggtgcggcaggttgtcagccgtggcgttgggctcggcttgctcggcgggctttcgacgatgtccggcgtgatgctggaaacggtggaaggtctgcacgagcggcatatcgccagtgcgcttggctatcttgcgggaaattttgcaggcggtttgctcactgccgccgccggcgtggttctgatgcaggcactgctgtcacggagtactcgaaagcgggttcggggtgcgttttcagctgtttccgtgtccgatcctgccgaatcggacacgcagggcgtacgccatgtgaaagtggccgacgtggcgcgttctgccgcgcaggccgcaatggaagccgcgcagacggcccagcagattgcacagacgggacaggttccgcgagtcgaaacaccaaccgtgccgccgaccgccagccagcctatgcagacagtccgcgttccgcagattcctccgctggccgttcctcagctgacgcagccggcgcatccgttgctgcgcgagccggatactccagacttggggcagctgcccgagattcagcagtcgcagccaatccagcagccggccaacccgcttccacccagcttcgagcccaaaccgatcactgcggagatttcgcttgtcgccgacccgactaccggggaggtgcgctgatgatgtggatgatctgtctgttcggcggtctgggagccatggcccgttacgtgctcgacgtgtcaattcaacaaggctggaaccgcgagaatcggagaacgaaccgcaacttcccgctatccacgctcgtcatcaacggcgtcgcctcgctatgcgcgggcatcgccatgatgtcctactattcgcaatcggtggatatggacacggtcatgatgttcgttgtcggatttctcggtggtttctcaacattctccacggcgctcaacgaagtggtttcattgattcgccagcgtcgttttacgctggctctgggctatggaatagcaaccgtcgcggtgcctctcatttgcgtggcc

SEQ ID NO: 59 - DNA, 34769 bp, Unknown
  R206_24m  MAG No. k141_876
cttggtctggatctggtacagggtgacgggcaggtctttgtaagaggagtacatgtccttgaccagaagggtgaacatctcctcgtgggtgggggccagcaggtaatcggcctcgtggcgatccttcaaacggaagatgttgtcgccgtactcctcccagcgatgggtggcctcgtagggttcgcgcggcagcagggccgggaagtgcacttcctgggcgccgatgccgttgatctcctcgcggatgatggcctcgatcttgttcagcacgcgcagaccgagcggcagccaggtccagataccgggtgcggccttgcggatatagccggcgcgctgcagcagcttggccgaatcgacatcggcatcagcggggtcctcgcgcagggtgcgcaggaacatggttgacatacgaagggtattggaagtcatgtgttccaagatattcgcgtgaaccgacaagcccgcctgctattcgcactattccggccttcatcttggcattcggactcattcgtacaacaatgatggctagaagggtaggagggcacgatgacgcagccgaccgagcaacaggggaatcagccggaacccgcggagcaaccggtgtatcaaccggcccagcatgggccccgcaattttctgctgcaaccccgcaattcccaacggcagttccgcgacaaccggtatcgcaacagccaatggccatgccaccatttgcgcaatcgcctatgtcggtcccggaacaatcggcctgtccggagcggccgcgctgattgtgggtgtgcgtttgctgcaagcaccgttgatctacggcacggtgattcttatcgtcagcacggtgactgtgctgtggccatggcgggccgaattctcccgccactaccggtgggtgtggcttgctttgggcggcatcattctgattgtggcagccgcgcgctatgaggcgagcctcaaatcgatgaggacgatcgccgcgcgtattggcgatctgcgctaaatcgcgcggacgacctgaggcagattaccaacgtccggcgatagcagtcctgcatacggggcagtgcccattgccactgtatccggcagataaacggttggcaatgattcgataccaatcgcgttccacgagcttggccctgcattcagggtttgggcaatatgtggtatcgccttcacgatcatgcacgttgccggtgtacacataattgagtccctcttcgagggcgatgcctcgggcgcgggtcagagtctcgtgcggggtgggcgttacgtccatcatgcggtaactggagtggaatgcggaaaagtgcagcggcacgtccgggcccaagtgctcgcgtatccatgtacattcagcatgcagctgggcgtcgtcatcgttgagtccagggatgagtagcgtggtgagctccacccacacgtgttcgccttctggtgtgcgtgcctcgttgaccgcatagtcgatggtttcgagcacatcggccagatgcgtgccggtcactttccaataaaattcttcggtgaagcctttgagatcgatgttggcggcgtccatggcggcgtagaagtcgggccaggcttcggcgctcatgtatccggcagtcacggcgatgggatgaatgccgagcgctcggcaggcttcggccgtgtcgatggcatattcggcgaacacgatcggatcgttataggtgaacgccaccgaatcgatgccccggtcggccgcgacctgcgcgattttctccggactggcttccacgccgagccggtcgaaactgcgggctttggcaatatcccaattctggcagaatcggcaaccggaattgcagccagccgtgccaaaactcagcacgctggaaccggggtggaagtggttgagcggcttcttttccactgggtccacggcgaagccggagctgcggccgtaggtgtcggagacgatgagtccgtcgtggtttgagcggacgaagcaaaagccgcgttggccgggcttgaggacgcagcggcgcgggcatagttcgcagcgagcgcggttggtaccgtcgtggaattgcgtttgccagcgggctatggcggggttacgaacatctgtgactgacgccgtatgaccgcacgattcccggtgaccaccctctgattctcggtgaccaccctccgtcgcttcgcgccacctcccgccagcgggaggggacatggttgctgcgttagtgctcggcataggcggtcacctcgtagcgttgacagtcaatttcgccatcgttccagtcgtaggacgggcggataccggccttggcgagcaggtgagcgacgaaatcgtgcggattgggcagctcatcccacacttgtggcaggaatgtggcgctgcagccacgacggtcggcgagaatcagaccgtctttgccggggcgtaatacttcctcaagttcagtgcgcgaacgtaccgggcgttcgacgttgctgccgtcccgtttgacggcgtcggtctgaggtccggattgcagcgatgccagagtcgcggtcttcgagccggtatcgcgcgaatcggcgtcacaggagttcacggtaatcggctcgggctcgcctaagacggatatctccacattgagtaacgggtattccgcggcggtgaccgggttgaaacgtgggtcacgggtggcggcgtccaccgcatgtgcagctatgtccttgccgagcgagcggtgggcggccagcgaaccgatgcacccgcgtagccggccaccctcggtcagggtaacgaaacaggcaccggactcgttcagccatgggtttgcggcaagaatggacgcggtcgaatcggcggcggtcggatgctcgatatgcaaccgttcccggatagcggcacgggcgagtttcagcagcacatcaccatgggctgttcccgattcgcctaagtcatctgcaccggctggagcatctgcttctggtttggattcccacgcggcaaacgagacatatcccactaccggctcgtcggcgtctcgcattgtggggcgaggttggccggcaagcgccaccacgccgtcgtcgccggaagtggaacagccgagctcgaagagcttcatgtccttgcggccttttaacacatccagaaggccgttgatcgggtatgcgccacaggcccggcgagggtgaatcggcagatgcaaagccgcaatgtccgcaatggtctggtcatccaacgcgcgggcgacttcgtgcggatgatagtgcgagagatccgaactaatcacgatgacggtttccgggccaccccacaaagcacgcaacacatcacccgcctcttgtggcgtggcatcgccggcgttcaacggcacaatagtgaggtctgggccgagcacggtttgcaggaacggaatctgcacttctaccgcatgttcttgtgcgtgggttgggccattgacgatcattgcgggagccgacgcgcccggacgggcatgtgtaccggagcgcaatggctcattgacagacaggcccagagccttacgctcggctgcaatgtctaccggcacagtgcccagcggcgtttcaaacgccgctgccgtggaacaggcgacgcctcgcacggccacacggtgagtcggtcccacgattaccgcgcgagtcacactcccccgccctcgttcgagcaaagcataggcaagcgcggccgccgtgccggaatacacataaccggcatgcggcacgattacagcctttggcactcccgctggaagcgtgggctccaactgttgcagaacctctcgactgtaatccaattgatggttaatgagttgcttgagcgttgtgcggtcagcggggtagaacgaaccagccaccgctggcggacgtattgcgccagtgattttgccgctgccgtctgccgcgcttgctgcatctgacgcactagccacactaaccgtatcgatttgcacaccggcccgggcggcctcgcgaacctcattgtttccacgaaatatctcggatagcaccataactaccacctcttattccatggtagccgttcagttcctcaatgaagacaaattcgcagtgtcttcttcggcttcaaggggccgattccgcctcttggagacatctacttgcgtttcgaggggctggtcatccgctcaatcgcacatagaaacggcttcataccaacgtcattccgccgtttttaagcgttgtctacttggacatcagccccttgaaacggaagtagatgtcccgaaaactcaaaatccgcccctcgaagtgcagaaacactcaaattagcggtcgttcgatatatcgaccgtcagaataacgcgtcctgggcgaagtcatcatcgggattaacaccgaattcatccggctcggcgggtttgaacgcgcttgcaccttcatcggccaactggtcggaagccgaggccgaggcttcgcgcaggtcgccgtcgagcaccacggcatcgggcgagacgaggaacatgcgttcgttgacgccagccaaatacagtccgcccagcgattcgacgcgggacaacgccacatatcccatgcccggcgcgaaggtgcgcttcagatccatgaccgcacggtcaagcgtcatgccttgcgacttgtggatggtgatgccccacgcgcaacgcaacggcacctgcgagacggaggcgagcacggtgtcgccgtccatcatttcccatgtggcctgtttcatggtgacgatgttgccgttttcgaattccacgatcggccagccgcccttgttctcctgcgcgaagccgcgcacggtgccgagcgagccgttgacgtactggcgatcggtgtcgttgcgcagggccatgacagccgcgccttccttgagtatcaatcgctcgggggccagcatgttcttcttgagccggtcgaccagattggcgggccccgcggtttcggcgtggaactcgtgcggctcaagcatgatctggttcaggcgcatgtcgttgagattgtcggcctgccggttcaccgggaataggtggacggcgacctggccgggctcgggcagtttgcccagacgggtgacgagcacgtcacggtcggactgggtcacgtcgccttcgcgaatgtcggtgagcacggtcagcagttcgccggtgtcctgacggtgctgttcggtcagatagcagatcaccgggttgagttcgggccataccagcgattcggtgatgaagccttcggggttcaagccggcacgggcataccgttcgcgactggcgatgaattcgggggtgggggcgatgaggtcgcggttgcgcccggacaccgaaaccggcggcagttggaagaagtcgccggacagcacgacctggatgcctccgaacgggcgtgggtcgcgacgcacttcgcggcagacttggtcgaccatgtcgaacagccatgcgtgcagcatggaaacctcgtcgatgacgaggatgtccgtagcctgaatcttgcgtttgcgccgggatttgatgagtttgagcagactcgggctcagggcggtggccacgccgacgccactccacgaatggatggtttggccgttgatatgcgtggaggcgatgcctgtggacgcggtgactgccacgctggcgccgtcggcccgagcctggcggatgaactcgttcaagacataggtcttaccggcaccgggcgcaccggtcaggaacacgttcgcgccggcgttcagaatggctagggcttcggtttggcgcatatcaacctctctagactcccctcagggaggggagccaagtacggcggactacttattgagaatgctggtggccacgatgtcggcggcgatggccttggaggcggcatcatccgggccggggacgggggccatgaaggccttacggtagtagcgcaactcgtccaaggactcgatgatgtcggcgagggcacggtggccgccgttcttcggcggacggttctcgtagacggccgggtaccagcggcgggcgagctccttcaaggtgctcacgtccacgctgcggtaatgcaggtggctcatgaggcccggcatgtagtggtcgaggaacttcttgtcggagccgatggtgttgccggccagcagcgggcgcacgccttccggcgtgaagcgcagcacgtattcggtgaccttctgctcggcctcggccaggctcaggccattctcccactcgttgatcaggccggaacgggtgtgcatctggcgcacgaaatcgttcatgtggttcacagccttctcggacggcttgatgacgtaatccacgccctcgtccagcacattcaggtcaaagtcggtgggaaccacagacacctcgacgagttcgtcgccgccgaagatgtcaagtccggtcatctcgcaatcgatccaaatcaggcgcgagtccttcgcgctgtacgtttccgcgtcatggctgtcgaccatggtgtgcctcttttcttcgctggtcatcgcttatgcagaacagttcagactataccccagcgcatacaagctatctcgagccacatacgcgaaaagggcctgcataagcagacccttttcacaaggaatcaacccctaactagcgcaagctagcgggcatcaaccgatcagttgttgtggaagccggagtagttcggggcttcggcggtcatcacgatatcgtgcgggtgcgattcgcgcagaccggcgtcggtgatgcggatgaacttgccacgctccggcatctcggcgatgttgtgggcgccgatgtagaacatggactggtgcaggccaccgagcatctggtagagcacggcgttcagcgggccgcggtacggcacttcaccttccacgccttccggcacgaccttgtcgctggaggtcacgtcggcctggaagtagcggtccttggagtaggacttcttgccgcgcggggccatggcgccgagggagcccatgccacggtacagcttgtactgcttgccgtgcaggagcaccttctcgcccggggcttcctcacagccggcgagcgtgccgccgagcatcacggaggaggcaccggccacgagggccttggcgatgtcaccggagtagtggatgccaccgtcggcgatgcagggcacgccagcggcacggcaggcctgggcggcctcgtacacggcggtgagctgcgggacaccgacaccggcaacgatacgggtggtgcagatggagccggggccaataccgaccttgacggcgtccgcgccagcctcaatcatggcctgagcaccggagcgggtgccgacgttgccgccgatgatctgcacgccgtcgaaggcggagtcgtgcttcaggcgggaaatcatgtcgagtgccagacgagcctcaccgttggcggtgtcgaccacgagcacgtccacgccagcctccatcagagcggaggcacgctgccaggcgtcgccgaggaagccgacgccggcggccacgcgcagacgaccctgctcatccttggtggcgtccgggtactgctcggtcttgacgaagtccttgacggtgatcaggccggtcaggtggccttcctcgtcaacgagcggcagcttctcaaccttgtgctgagcgagtagacggtgagcgtcgtccttggagatgttggacgggccagtgaccaggttctccttggtcatgacatccttaaccttcagggtgtcgtaatcctcggaggcgatgaagcgcatatcacggttggtgatgatgccgacgagcttgttgtccttgtccacaaccggcagaccggagatgtggaacttgccgcacagcttgtcgaggtcggccagcgtgacctcggggttgacggtcagcgggtcggtgatcataccggactcggaacgcttgaccacatcgacctgagcggcctggtcgtcgatggacagattgcggtgcaacacaccgatgccaccgttacgagccatggcgatggccatctcggactcggtcacggtatccatggcagcggagaggaccggggccttcatcacgatcttgcgagtcagatgagtgctggtgtccacttcggagggaatgacatccgtctcgttcggcaacagcaacacatcgtcataggcaaggccgagcttggcgaaaatcgggggaaggggagcatacgccgactgggcgtttaattcatcaaggtttgtagccatgtaaacactatatgaaaatgcgctgaccttcacgacacacgcttgtgagcgctcacttatccgctgccgggtcctgcacctcacccacctgcgagtcccgcgaatttgcaggcgaatcagtcatcgaatccgctgcctgagagccaatcgaatcccggctctcccctactgcagactgcgatttaggcactgtatgctgcgcgtttttacgtgcggattcgaacgtcaggttctcggcttggatctcgggaatacgatgccgcagataggggtacatcgtggctatggtcagcaccaccacagcgatggccatgcccacggccacgtgctgcgctttgaagaacagaatcgtcagcgaaccgaatgcgatcaacgcggcccatccccacagaatcagcacggcgccacgcaccgaatgcccgatcttcagcatgcgatggtgcaggtgcatacggtccggatgcatgggcgactggcctttggccaaacgccgcacaatcgccagacacatgtcgagcacaggcaggaacaacaccagaaccggcagcagaatcggcatgaacaccggcagatagatgctggcatgaatcgaggccgggtcaagacgtccggtcatcacaatcgaagcgcaggtgatgagatagccaagcagcatcgaaccggaatcacccatgaacagtttggcgggatgccaattatgcagcaggaagcccacgcagatacccaccatcatcacgtcgatcagcgtggccaacgaagcataactcggggaagaccgggcgatgatatacgaataggcggcgaacgctatgccaccaatcgccacgataccggccgccagaccatcgaggccatcaacgaaattgaccgcgttgatcgaggtgacgatcaggaatgcggtgatcgccatggacagactcggcgaggcggtaatcagcgaaccacccaaaggcagtgagatgatctgcaatccgtcccaagccacgaatacggaaatcagcagctggccggcgagtttcagcatccaatcgagatcccacaggtcgtcggccatgcccagcagactgatcatgatgccgccggcaagaatcacccacatctggtaattgccgttgaacaatcccgagagaaaaggcagccgactggcgaatacggtagccacggcaaaaccgatcagcatgccaaggccgcccatgcgcggcgtgggaatggtgtgcacgtctcgggcacgcacctcgccaaccgcaccgatttcgatggcgacgtggcgaatcagcggagtcaccagccaggtgacgccaccggcgatggcggcaatcagtaggtagattctcatgcgccgagtcccccgccgttgaggtggagggccttgcgaatcacgttttgggcgatgacgccttcacgcaggatctcgatgccgtcgcgcgcgtacggatcggctttgacgacggtgctggagacatggccttgggtgggaccgccgtccagatacaggtcgacttcgttgccgaacgcgtcaaccgcctcctggacggtctgtgcgctttcgtcgccggaacggttggcgctggacgcggccagcggaccagtggccttgagaatcgcgaggcacagcgccgaattggggatgcggatgccctgcgtgccggggcgaccatcggcggtgtcggccaaagtctccaacgtgcagtcgggccgggctacggcaatcggcgagaacgcgccgggcaggaacgccgccgacaaacgattcagtggagacggcaggtcgagaccgagttcatcaagctggtcggtggatgcgagcagtacctgcaacgccttatagcgcgggcgacgcttgagccggtagatacggtcgatggcggccttattacgcggatcgcacgccactccatataccgtatccgttggaatgacgaccaatccaccatcccggatgacacgcgccgcttgtgccagcgattcatccgtgactttcagcgttgttccgccctccacgctcacgacacctccgttcgcctgtgtattcacaatctaccattgcaccattgcgccccgacttgcatagttcatcatcgctcgtttgccgtactgctgttttccgattcgccccatacgcacagaccgtagatacaatgagttcatccatgctctttcgcgaaattacaggagtgttcaatgagcggaatcaatgctgaatccaccaccatgcctcccgtcgaactgcgtatgccgcgcgccagcgagcgcgtgttcgccaacttcaacttcactgtgctggattgttgcccggtgacgattggcgagggttgcgtgatcggtgccggctcggtggtgacgcgcgatattccgccgcacaccgtggccgtgggcaatccggcccgtccgattcgcgaaatcacggacgcggacgcctccgccctgcagtattacgcgcagtagcagcggcggccccgcgcctgtggctacttctcggcgaagagatagcggcctcggccggtccaatctttgccggtggaggcggtggcgaaacctgtggccttggcataggccactaatcgctcgccttgggtgagatcatgctccataaccaatacgccgccgggcttgagcaggcgccaggcgcgctcaataatgcgttcagggatgagcgtgccgtctgccgaaccgccgtatagcgccagttccgggtcccagtcgcgtacttctggttgttcggggatgtcggtttgtggcacgtagggcgggttggtgatgacgatgtcgatggtgccgtcgagttgcgccagcgtggccagtgacgtggcgtcggcgacttccagttggtaattggaggcgatggaggggtatcgtttcgcggttaccgccagattgcgccgggtccattcggcggtacgcggggataattcgacggcccatacttggctgccgggcacttcgctgactatcgacaggccgatggcaccggaaccggcgcacaggtcgaccatgcgcgggtggatcatgctgtgccgggtcagccagtcaagaccggcctggactacggtttcggtttccgggcgcgggataaagacgccggggcccacctgcaggtcgaggtagcggaaaggcgtgtggccggtgatgtattggagcggctcgcgtttggcgcgtcgggaaagcatggcgtggaaggcggcaaggatattggtgacggggtcggcctgaccacccccagtcgctgcgcgacagcccccgccggcgggggccagcgaatcgaggccctcccccatcagcatggccttgtcgatatcgcgtagttcggcgtccacggcctcggccagcaacagtttggcatcatgttcgggcgtctcgatgccggcttcgcgcaactgcgcggcggcttgacgaatcaggtcggctatcactgctggttggccagacggtcggcttcgtcggcttggatgtcggaatcgatgacggcctgcaggtcgccgtcgagcacggcgtcaaggttgtaggccttgtaattcgtgcgatgatcgacgatacggttttccgggaagttgtacgtgcgaatacgttcggagcggtcaagcgaacgcacctgcgagtgacgcatgtcggcggcttcggcggcctcttgctcatgtttcatggccagcaggcgagacttcagcacacgcagcgcggcggcgcggttctggatctgcgacttctcatcctgcatgttcactgtgatgccggtgggcaggtgggtcatgcgcacggcggaatacgtggtgttcacggactggccgccggggccggagctcatgaagatgtcgattttcaggtctttcggatcgatctcgatctcgtcgtcatcctcgtcggcttcggggaacacaatgacgccggcggcggaagtctggatacggccctgcgattcggtgacggggatgcgctgcacacggtgtacgccgccctcgtacttcatcgaagcccacacgccgtcttcgggagcgggcgtgcccttggcgcggatggcaatctgtacgtccttgacgccgccgagctcggtggtgttctcggactgtacgttcacgctccagccacgcttctcggcgtaacgggtgtacatgcgcagcaggtcgccggcgaacagtgcggcttcttcgccgccggtgccagccttgatttccatgatggtgtcgcgtgcatcatccgggtcacgcgggatcagcgcggtacgcaacttctcctcggcgtcgggcagttcggcttcaagacgcttggcttcctcggcgaagtcggcgtcctcgccggccatctcctgagcggctgccagatcgtccttcacctgcaaccaggttttgtaggcgcccacgatggcacccagttcggcgtgacgacggcccagcttgcgcagcttgtccgggttggacacgacttcggggctcgccatctgttcttcgatggactggtactcctcaagcgcggttgccgccgccgggaactgttcgtctgccataacacactttcttctgtatggtgctgttctgttcgattattcaattgcgcaggtcaatgctgcaacaaaacttgtcaaagaatacaaaaacgccagtcctcgatcgggtatgccggagcatgccgaatcgaatcggactggcgtgaagtatgctacttgctcttcttgccgtagcgcttctcgaagcgagcaacgcggccaccggtgtcaagaatcttctgcttgccggtgtagaacgggtggcactgagagcacacgtcaacgaacatgtgatcttccttgccagcggtgcgggtcacgaaggtgttgccgcacgagcacgtcacctcaacggggtggtaatcaggatggataccctgctgcattttacgtctcctatggattcgggggacccgggtcgtcatgcccctatggcaggacgtgaaccggaacctaagggattgtacgcgcctatctggacgtgaagacgcgctgtgccgccgcaggaggcgacgcaaaagagtggggccgcaggggcttgaaccctggaccgggcgattatgagtcgcatgctctaaccgactgagctacggccccacgttcgctgcgtaaaacagccaacttgcaaagtgtagcatgaacccaccaacgccggcacacgcgccatgcacccatgccatgcacccgccagcacaacaagcggcatctcccggcgctacttctcccccatgtaccccaacgggttctcgatgaaccgtcgcaagcccatttcggccgcgccatatagcgagggatgcagcgccaccggcggcacgaacacgcggatcttcacattcgggtatcccagaatttccgaacgcagccggccttcaagcacggtggccagctcgtcgccgaagtgcgtccacagtccgcccaacagcaccgtatcgacatccaccagattcacggcggaagcgatggcggaaaccagcgcatcagcggcctgatcgaccactttggccacgtctggatcccccgcacgccaacgctggaggaatgtatcgatggcctcgctgctggtggcatccccatcctcggcaatgccggcagcctcgaccaaggcgcgacggcccgcaaacgcctcaaggcacccgtggcgcccgcagctgcacaacggcccatccatcgccacggacagatggccgatctcgccggcgaatccgtgcgagcccatcaccacttcgccgtcacgcaccaccgcgccgccgatgccgatatcggtagacaggtaaataaaggaatccgtgcgatccaccacattcaggaaggacgcacgttcggtggcataccccggaatctgagcgatggcggccatcttcgcttcgttaccggccaccacatccagccggcgtgccacgttgaaccgggtgaggttgacgttttcccaacccagattgcgggccaccaacagccacatgtcgtcggtgacgatgcccggcagcgcaagcccggctcccaccactttgcagccacgtcgtttgagtcggctttccaacgggaaggtcatcgcatcgagcttggcgaagatctcgtacgggtcagtgccggtcatatcctcactcacccactcctgaccgagagtgtcgccgttcagatcgagtgccaggcaaccgtagccatcggtgttgatctgcaggccgatgccggcgatggacccgccatgaatctccagcggcgtgctgggccgcccatatgtggtggagacgaccggctcgccttcctgcaccacgccactatcgatcagcatcgaggccaacagcgaaagcgtggccttggtcaggcccgtttccttggccaagtcggccctgctcatgggtttctccgcgcgcaacaaagtgtcgagaaccaccgacaaattatggttgcgcagatcctcctgattgatcctgcgtagacttgccataggctcctacctccttgcacccctagtctcgaacgccgcacaggcgctcacatccgtctatcgcacaatgatattgtgcgtcaaacgattgaaccagatacgcaccctcgcgtgtttccgtttgcaatcatacactgcaatacagtatagtttaatcgtctaacttattggttgtggcgcgccgaaacttgcaagcgcgaccctcatcgaggaggaatgcatgacgagagtactggttgccggcgtagatacgtcaactcaatcaacaaaggtccgcattacggacgccgccaccggcgaacaggttcggttcgggcaggccaagcacccggatggcacctcggtcaacccggaattctggtgggaggccttcaccaaggccgccgagcaggccggcgggcttgacgatgtcgcggccctcgcggttggcggccagcagcatggcatggtcattctcgacaagcagggcaacgtgattcgcgatgcgatgctctggaatgacaccagttccgccccgcaggccgccgccctgatcgacaagctcggtgcaactccggccgagggcgacgaaccggacgacgtgaccgcccgcggcaagcagcgctgggtcaaggccgtcggatcctcccccgtcgcttcctacacactgaccaaggtggcgtgggtggccgagaacgagcctgagaacgccaagaagattgccgccgtctgcctgccgcacgattggctgagctggcgtatcgccggctatggcccggtggccgagggcgaggacgctcatctcgaagccctgttcaccgaccgttccgacgcttccggcaccatttactacgatgccgcgcatgacgagtaccgccgcgatctcatcgccatggtgctgacccccgccgagggcgaggaagccgccaaggcccacgccgacgccattgtgctgcccaccgtgctgggcccgcgtgaggcagccgccgtcaaggccgaccccgccattgccggcaaggacgttgaaggcggctgcatcatcggccccggcggcggagacaatgccatggcctcgctgggcctcggcatggccgtgggcgatgtgtccgtatcgctcggcacctccggcgtggccgcggccatcgctgaaaacccggtgtacgacctgaccggagcgatttctggctttgccgactgcaccggtcattatctgccgcttgcctgcaccatcaacggttcgcgcattctggacgccggtcgcgccgcccttggcgtggactacgacgagctggccgaactggcctttaaggccgagccgggtgccggcggcatcaccctggtgccgtacttcgacggcgagcgtacgccgaaccgtccggacgccaccgcctcgctgactggcctgaccctgcacaacaccaccaaggagaatctggctcgtgcgttcgtcgaaggcctgctgtgttcccagcgcgactgcctcgagctgattcgttcgctgggtgccgagatcaaccgcatcctgctcattggcggtggcgcgaagtccgtggccatccgcacgctggccccctcaatcttcggcatggacgtgacccgtccggccaccgacgaatatgtggccatcggcgccgcccgtcaggccgcctgggtgctgtccggcgaggccgaaccgctgacctggcaactcaccatcgagggcgtggagaccggcgagcccaccgaagccgtgtacgaggcatacgccaaggcgcgcggatgatacgctgccagcacaatccatgagataacaactgaataacgattcctgatgaatgccgccatggcaagcatcgcgaagagccgctgttataccgcgctcctcgctgaagcacacatggcggcatttttcgtttcccacgcaatccacaaatacggctataatcaagtcgtttgaacaagtctggagattcttctatgaacgaccgctcccgtatgatgctgtacgccctgaccgccgtcgcatgcgtgatttggatatggcaatccgccaaagaagcaatggccgatggcacgatgatcagcacctcaaacatcatctttttggtatgcatcggcattgccgccgtctactgcgccgccaacgcattgatattgtggtggcgtcaacccagcaaggaggatgcggagaacgatgacgccgcggatacgcctgacggtaccgataccgacaccgcagatgccgagggatccgaggacgacaccgatgacgatgtcgaaaccgacgtcgcaaccacggatgccgatgcatcaccaaccactaatcgccagtaaccatcgttatcgttcgcccgaatcaagcgaatcatcccacttcagcaaaggaacattatggaagtaacaaccgtgtcaaccgtgatcagcgtggtgctgggcgtcatatgcgcgccttgcggcctgtttctggggctcgttcccatgaaggccggcctggtgaccgccaagcagtcaaaggcctcgcagatggtgagcttcatcgttgccatagtgttcatcggcttgctggtcgcaggccatgatctggagacctgggccatggtaatcggtctggtcatcggcttcgccgttgccaagattcccgcgctgcatgcctgggctttgcacaagtggccgttcttcgagcccaagaaagcggctcccgctcccaagcgcgtcaagaaagtcaagaagaagtaagctctggccttacctattcgctgaaagcgggatatcgacatcgatatcccgcttttcattggccgtacatatccgctgaggcacatcgccgaatcatattgtctacaccccaagtcagggctgatttcgcgaagaacgtacaccgggatccatccatcgcgacaaacggaaaagggacgctgcgtgcaacagcgtccctttcggaggaggaatggaactcaggtccatccccgtggccaccgggcgggcccggaggccaggtttagctcagcctttctttttcttggagagcaggtcgtaggcgacggcggcgatgacgacgaggcccttgatgatcttgacccaggcggcgtccacgcccatgatggacaggccctggttgagcacgcccatgatcagggcgccgaccatggcgccggggatggtgccgatgccgccggtgacggccgtgccgccgatgaagcaggccgcgatggcgtccatctcgaactccatgccagcggaaggagagaaaggagaaagaaggaatggaaaggtgccatgcgggcataacacaacaccgcacatggcgaaactatcgaatcagcccatcgggcgcactggcatcataattgatgtgtacacgcccgatggagcgaattcaatcggtcagaccgatggtcactcgacctcagccagggcatcaatgatgtagttgttgatggtggccttgacggactcgaggtgatcggacttggtggtggcgatgagctcggactgcggcttgtcgaggctgtaggcttcgaggtcggccaaggtgacgttgccctcgtcgatgtccttgccgatgccggagtcgtaggagctgtagcgctcggcctgaagattctggatgaagccgtcctggttcatcttgtcggcaaccagcaggccggcggcgtaggcatccatgccggcgatgtgggagcggaacaggtcctcctcgtagaaggaggtacggcgcggcttggcgtcgaagttcagaccaccgtgaggtccgatggagccggcctgcaggacttcccacatgacggcgacggtctcgtacagatcggtcgggaactcgtccatatcccagccgatgagcttgtcgccctggttggcgtcgagggaaccgaggaagccggactcgcgggccacgcggatctcgtgctggtaggtgtggccggccaggttggcgtggttgccttccaagttcagcttgaagacgtcggtcaggtcgtggttgcgcaggaactcgatggcggtggcggcatcgaagtcgtactggtgcagcgtcggctccttcggcttcggctcgatcaggaactgggcctcaaagccgatttccttggcgtaatctgcgcacatgtggaagaacttggcgatgtggtcggtctcgcgcttcatctcggtgttccacaggttctcgtagccttcgcggccaccccagaacacgtagttctcggcgcccaggcgcttgccgatctccaagctcttcttgagctggccaccggcgtaggcgtagatgtcggcgaacggagaagtggcggcgccggacacgaagcgcgggttggtgaacagggaggaggtgttccacagcatcttgacaccggtggacttcatattctcgtcgatcttgtcaacgaccttgtcgaggttggcgttggtctcgcgcagggtgtcgccttcgggggcgatgtcacgatcgtggaagcagaagtactcgacgcccagcttctggaacagctcgaaggcgtagtcgaccttggccagagcctggtccatcggatcggtgtacttgtagtacgggcggtgcgcggtgccggtgccgaacggatcaaccagttcctggttgaaggtgtgccaccaagcaacgccgaagcgcagccaatccttcatcttcttgccggcaacgaccttgtcggcatcgtagtaatggaaggcgaagtcttccttcggtcctttggcgcggccgacgtactcgatcttgtcaacatcccacagacccatttgggcgctcctttgcagtaggcgatattacggattgcaggaccaataataaaacgaacgaactaagtttgtcaaatgattgaattaatacgccgcgtctcagcgtgttgctagtcattgcaatggttttcgaatgcagtcaaggcacagatagtatgggcaagccaagaaagacaactcagccaagaaaacgagacttgataattgacgtcacgcaattcctcgccggccaccgctgaggccggctccaccaccccgccaactccaacagcaccacccccgccaacaccaccgccatggtcatcaccctgatgatcggctcgtttgtggccatcctcaaccaaacgctgatgatctccgccctgcccacgttgatgcacgagttcgacgtgcccagcagcaccgtgcaatggccgaccaccggattcatgcttaccaacggcatcatgatcccgatcaccgcgttcctcatcgagaccttcaccacccgccagctgttcctgtacgcgatgggcatatttgcagaatgatcttggcgttaatgcactggtgtccggcctggtgatgatgccgagcggcatcgccatgggcatcctgaacccggtggcaggcaagatgtatgaccgtatcggcggccggccgctcgccttactgggcttcgcgatcatgacgtctgcggctgtgctgctggtcaccatcatgaacacgcacaccgcggcggccatgcgcaccggagtgccggaagcggcggcatcggccattggcgtgcgggcttcgttccgcacggtcgccattgtgtgcgcggtctgtttggttacgtcactcttcattcgtgatcgcggccgccgacttggacagcagcgttaggcgaatccttcaccgattgccggccttcttgatcagcgcgtccaaagtaccggcttggcgcgcggcttccacatcttcccagtcgagaccggtgtctttggccctcccgtagaaaaaccgcaccagaccggcaaagtccggtttatatccggtttcccggaatgaacgggccagcgaatcaccgatttgcgggtcatcaggccttcgtgcctcatagatcgggatggaacaggatcgccacacgcctctcacatgtgcgatgcgattgacgatcatgccgccgtgcgcaccatcgtattgcgaggcggcatgtacgtccgccacctcgtagacaccaccatgaatgatgtcctcaactgtcagacgacctttgaccgcgctggcatcgcgaatccagaacatcgaagcgaaattggtgtcatcaagttcgcgaaaatcacgtatctcgcgtgtgccgatacgttcgtccttgtcatacatgaattcggccaaggctaggaatggcgagatacctgcgcccggaccgtactgcaattcgatacgtaaatcttcggattcattgccggtcagtccaataccgctgacggcgcagtcataggcaaaccaatcccagaaccaccattcgatcctttgcagcacctgcttcggatactttttgcatgggttcagattcacttcgcgataatatatgcgtctcgcttcggcatagacggcgagattgcagcgtttgaacatctcggctacgtctttggtgtccagcattgctggcaaaccggcattttcggcagtagtagtggttgcggtgctcatggtgtttccccttcatgtgatgtggacggcgggctacgttgcccgccgtgaggcacactgtatgacgttcgtgcggtggcccgcaagcccacatggcgagatggtggataagtggaaaacccaatgattccaaggggtatggaatgtgcataacagtggctaccgtcggtggataaccgcactttcttgcaggttatccactgatcgcgcagctgttatccaccgtctctgggttatccacatcgtctctggcgtgtcgtccactgtcagcagtcgatttctgcttcgtttggcgtgtataagtgcacggtgaagtgtataactccgcgcattagacatatttgctactgagaaaggtcccgaaatcgccttcgaacgcatagctacactcagcagatgtattcagcatggcaatagacccatttaggcaccggcgaatgattttccctcgcttatagagtcggcaaaggcccaacacctgtcccaacgccgacgctactgcactggcagcgtcggcagaggaccacaacttggcacagcaacgacgctaaaaccgcccagcatcgttacacgtccaagttttggccgctaacgacgcttaatgaacgcttagcgtcggcagcaggtcacgcactggttctccaccgacggtaacgctccttagcgaagccagcccgccactctttggcacatcaccgacgctgagagaacctccagcgaagccaaccagccaaccgctggcaacatgacaccacccacacccctcagcgaagccaaccggccagcgcatggcaccccaacaccgctgagaacacccaccccaccagtgcacataaaaaaaaaactggtcatagcggttgcgatgtaattgcatcgtaatcgcgatgaccagcctcggggggggtgggccgcaacgagcaccgaatgaatcagatgatgatgccgttgcagtgatcgacttcgtgttggatgatctgcgcggtccagccggtgaaggtggcgtggcgggcgcggaaccgacggtcctcgtagttgacctcgatacggcggcagcgcagtgtgcggcgttcaccggtcagcgacaaacagccttcctgggtgtcgaaggcaccatccgaagcggtgatcacggggttgagcatcaccgtgatacggccaccgagatcttcgtccacgaagacgatgatgcgcttgctcacgccgatcatgttggcggccatgcccacgcaccgtgaacggttggcctccaacgtatccacgaggtcctgaatagttgcctcgtcgccgggcccagccgcttcagacggcgtgcgcaaaaacgaccgcgaagtcataatagggcgttgcatgttggaatcacgcttcttcgtgccagtgggggttctggccgaaggtgtggccttcggggttgtccatcgcggcgatatcggccatgtcctgatcatcgagctcaaaagcggtcaggtcaaggttctggcgctggcgttccgggttcagggacttcgagatggccacgtcgccgtattggaggtgccagcgcaaaatggcctggaccacggaaataccgtgcttggcggcgatgcgcttcagatccggatcgcgcagcatctggttggcccggcccagcgggctccatgcctcggtgatgatgccgtgcgcattgtcgtaggccagctgttcgcgctgctggaagtacgggtgcagctcgacctggttgacggccggcgtcacacctgtatcgcgaatgagcaggtcgatgtggccgggcaggaagttgctgacgccaatgtgcttgaccaagccgcgttcgcgagcttcgaccagcgcttcccatgcctcgacgaactggccttggcttgggttcggccagtgaatcagatagagatcgatgtagtcgaggcccatacggcacacgctctcctcaatggtgagcagagcctcgtcgtgagcatggtggcggccgggcagcttggacgtgacgatgatgtcttcgcgcggcacgccggattcgcggatggcgcgacccaccacaccttcgttctcatagttgaacgcggagtcgatgaggcggtaaccctgatggatggcggacttgatggcgtccacaccggctaggccgttgaccttgtaggtaccgaagccggtggcgggcagttcgaggccgtcaccggccttgcggatcggagtgactggtggttcatcaagcatgatagttcccctgcttctcctgtgatggaatatcggttccatcataaagccaaccaatccgctgcgggcgtactatttgacttctctcaattccggcggtcggcgagtggagaatcggaacatgagcgcggcgagaatcacgccaagcacggccatgccggtgaacaccatcatgctgcgcgggaacgcggccgtatacgaaccggccgcgtccgccccatcgttcgcggcgatggccaccacccacacattgccggacagcgcaacaaacgccacatccataatcatggtgccggcgaagccgctaaggatgaacttgggcgggaagtggttcttcagcatgccgccgaataccgggccgatggccggtgcggcacaggtgaccaggccgactatgccgagcatcgcgccacgctgttcaagtggcgccttctccagaatgatgttggtgataagcggcagggagatgccggtaccgagcgacatgaccagtcgggcggcgagcagcatcgggaagttgaccgcgagcgcgcccagtaatgtgccggcggtgaaaatcacgatggccatgatgaacagtgttttggtggcgaatttgcgcaccatgaacggcgagctcggaatcgacaccgacagcaagagcagataaccggtgacaagccactgcaccaccgaggcgccgatggagaactcctccatcggcgtggagtaggcgatgttcgggttataggccaaaatgtgtgtccggcggtctagtcgttcgactgccattcgacccgtgtgtggaactcgttccagtcgatgccggtgccgtatcttgcggggatgccgaacgtctcgtactggccttgcgggctcctttcccatgcctgccggtagaggcgctcgagtcgttcgtcggtcatcgcgttggccgcgagccacgcgtcggtctcgggacgttccgtgtgctggtggcaccaccagcagatcgccttcagccgtctgaccagccgcagtccgcggtggcggcgcggcatgtcgcgcaggcgcgcgttccgtgattcgacgaggttgttggtggacggtatcgggccgacggacgcgagcccctcgtcgaggaacgtgaacaggtggccctcgcggatgcgtctgcggatcatgcgccgtgccttgacgagcctttggtgcatgtcgttcacgccgccgtcggcgtattcgctcttctcgtcgaggaacgaggcgaagtcctgctcccactggttgtaggagaccagccattcggccgcgccgcccgcgtccccgacgcggggcagggacagggccacccggcgcagccgtccgcccgcctcgagtctgggccgcctgccggtcagctcgaggatgttggcctgcacgtggaacaggcaccgctggatcctcgtatccggccacgtggccttcgcggccttgaggacgccgcccccgccgtcgcatacgagcacgtcgggcggcgcgatgcgcgccatcaggcactgccatgccgccgctttctcgcttttggcgacgtgccagccgatcacgtgcccgccggccaccgcgatcaggaccaccgcgtcgcggtgcaggtggatgccgtccacatgcaccacatgatgcacctcgtccaccaggggcacgggcggccacaggccccacatgagctcgcaccggcggcgcagcgtgcgtgccggcagccggtgctcggcctgcgattgtttcgagaacagccaatccagaccgcaccgcagatcacgggcgctgttgtcgcgcgactgggtgcgtgagctcccgcagccggcgttccggcaccgccacctgatccgtcccgagctcgtccttccgttccgcttcatcggctcgccgcacacggcgcaacaaggtgtgttcatccacccaatctgccacgccaactcgaaagtcactcaacctttgtgccgcaaggcctgaccggccattccggacacacattctggccgacctcgagttccccgcccatacaactcgaacaggaggaacgcccaccgccacaaaggaacacaagccaaaacggacacacattttggcctataaccccgatgttcagtgacgtttccgataggatgccgaggaaggtcaggatcgcgagcgagacgaccgcgatgacgagtttgttggagaccggttgcttgccgccgttaggcagctgtgttgcggaatgagtcacgatcttgttctctcctccattcattcagatattctgactacgacgttggaagtcttcctgcatgagtcgcagagcctcggtcaaggtgcgtaccgtggtttcgcactggtccgaggtcaatccgcccagcagttggctcaaatgcgcgtgatattcctccacatagatgcggcggatatccaagccgcgttcggtgagcgtgagcgtcaccgcacgccgatcggcggcatcggcgtgtttgacgacgagtccgaggtcggccatttcgccgacgagcttggtgatgctcggcgtagtgacgccgaggaatgcgctgacgtcgcccacgcgcgcggtgccggtatcttgcccattcggttcgttgatatgccagacggcgtcgatcacgtggacatagcgcggtttcatacctttcggcaatgccggcatcagttcggtgatggtcttggccttccagcagacatccaggaggctccgcacctcattcaccggaagcaagccggtcttggtatcggttcgggaatcgcacatcgctggcccaacctccaattagttactaatagtcattaccataagtaactatatgcaggctctagacaaacccaacgacctgcgcgcccgtgtcgagttccgtttcggcataaaaaaagccaggggatccctggcttgtaatgcacatatcgctgcaggtttgccgggacctatatgttcccggcaacaacagccgtatatacgttaccgatcagtgctgccctcatcatccttggcacccgccgtggcggcctcagtctccttggcgttccacccggtgacggcattccaaccactccatccgatgaccactagcaagcacagcgagaagacaatagtggcccaattgaacagcgagccatcgttattggcctcgaccagtgactgccagagccagataacgcaggccaagcaggtcaatgcatacatacgggaggtggagcgcgcggtgagtttcatggcggaaaaagtcctttgattacaagaatgacggcagataacagtgtgggatccgcaccagcggcaccggcacgaatcccacatcgaggaggagaaaggggaaggtcagctcttcttgcgcttggatatgatgtccacggcgacggccagcaggagcacgaggcccttgatggtcttcaccacggcggtgtcaacacccataatcgacagaccctggttgataacacccatcacgaatgcaccaatcacagcgcccgggatggtaccaataccaccggtgacggccgtgccaccgatgaagcaggcagcgatggcgtccatctcgaactccataccggcctgagcagttgcggaagccagacgggaaagcatgcagacagcggccactgcggacaggaagcccatgtggacgaacagcaggaagtccacgcggcgggtgttgataccggagaggatggcggccttgcggttgccaccaacggcgtacacgtggcgaccgaacacggtcttggtcaggatgaagttgtagatgaagaccagcacaccgacgatcaccagcatgatcggggtaccaccctgatcagcgttaccggaggaagccagcaggtaggtgacgaaggcgatgacgaccgcgacaagcacaatcttgaggacggtcaggctcatcggctcgggcaccaggccgaccttggccacacgggcgcgcttgcgcagctggctccaggcaaagccgacaatgcacaggatgccgagcacaatggtcagaccgtcgaacggaccccaccagccaaggatgttgggcaggtagttacgggcaatgccacggaattcgagggaggtaatcggcacggattcgccgacgatcacggtggcgagaccacggaagatcaacatgccggccagagtggtaatgaagcccgggatgccgatgacggcgacccagaagccctgccagacgccgacgatcaggccgacgaccagagcgatgacgatggcgagcatccagttgactccggcgcgttccatcagcagtgcacacacaccaccgatgaaggctaccaaggaaccaaccgaaaggtcgatgtgggtggcgatgatgaccatcaccataccaatggccaggatgatcacgtaggcgttctgctggatcagggacacgaaggagttcggcttcagcagcacacctccggtcaggatctcgaaggccacgacgatgatcagcagtgcgccgacaataccgtattgacgggcattgttggcgaccgtggccagcaggccggtcttttcttctttctttgcaggtgttgcagttgcggcgctcatcaggctgccacctccctttccttggtcatacccttcatcaggtattcctgggtaaatccattcttctcgacattgtcggtgacgacaccgtaggacaccgtgtaaatgcggtcgcagataccgatgagctcaggcagctcggaggaaatcacgatgacggccttgcctgcatcggcaagcttatcgatgatttcgtagatctcatacttggcgccgacgtcgatgcctcgggtcggctcatcgaggatgaggatgtccggctgcgagataacccacttggcgagcagcactttctgctggttaccaccggagagggtggagacattcacatcgatgtcatgacacttgatgttgaagtccttgcggtactgttcgacttccttgcgctcaaggttgtcgtccacaaccccgcccttgctgatcttggtcagggaggccagggatgcgttctctcggatgttctgcagcaggttcagaccgttgcccttacgatcctcggtggcgtaggcgagacctgcgtcaatcgcggactgcacgttgggcatcttgacttccttgcccttgacgaacaccttgccggagatgttggaaccgtaagagtggccgaagatggacatggccatttcggtacgacccgcacccatcagacccgccagaccgacgatctcgccggcgtgcacgttgatgttcgcatggtctacgatcacgcgctccgcgtcgagcggatgatgcacggtccaatcctcgacgcgcaggtattcctcgcccggggtattggaggggtggttcgggtacaggttgtgcagcggacgacccaccatcttgcggatgagttcttcctggtcgagcggcgtctccggcgtcacgtacatcacaccgacggtcgaaccgtctcgaatgatggtgacattgtcggcaatggcggcgacctcgttgagtttatgagtgatgatgatgctggtcacgccctgctcgtcacgtagctgacgaaccaggtcaagcaggtgggcggaatcctcatcgttcagtgcagcggtcggctcatcgaggatgagcagcttcacgtccttggacaatgccttggcgatttcgacgagctgctgcttgccgacgccgatgtccataaccctggtatccgggtcttcgggaagtcccacacgatcgagcagcttcttcgcctcggcgcgggtcttgtcccagtcgatcacgccacccttggcctgctcgttgccgatgaagatgttctccgcaatggacaggaacgggctcaacgccagttcctgatgaatgattacgatgccgtcggcctcggaatcattaatagtatggtatttgcattccttgccatcaaaggtgattttgccggaatagctaccgtatgggtacacacccgaaagcacgttcatcagggtcgatttgcctgcaccgttctcgccgcagatggcgtggatctcgccgcgatcgacggaaagattcacatcggtgagggctttgaccggaccgaacgtcttcgtgatgttttccatcgtcaagatggtgtcatttgatgacatgtcatcactcctcgtcacagttctgtgttcatggacatgcggcgcatatcggctatgcgccgcatgtcattgtgtttgtttacggattgcctgatgaggactacttagtcagctcgtcgaagcgatcctgggtgatgtagttggccgtgaccagatcctggaggttgtccttggtgatgttctgggggtcaagcagcttggacgggacgtcgatgttgttgttgttgaacttgccgttcaggccggagacttccttgccttcggcgatctcgacgaccatgtcgtacacggcgtcagccagcttgttcacgtccttgaacacggtctcgccctgcttatccttggcgatgttggcaactgcgatctccatggcgtcctgaccggtgatgtacggccaggagtcggtgcccggcttcatgtcgggacgcttggattcgatggcgttgatcacaccctgggcgatgccgtcgtacggagtgaggaccgcgtcgagcttctcgccgtgggcgtaggtggagtcaaggatggattccatgtccttctgcgcctgctcggtcttccagctcatcacggagatcttctgccaatcctcaacggtgaagtccttggtcacgccaccctgaccgtgctgggacggggagacgagcacgcccttctcgaagtacggctgcagcagatcccaagcgcccttgaagaagtacttggcgttgttgtcatccggggaaccggtgaacagctcgatattgaacgggccggtggcgccatccttaagcttgagctggtcaatgagccacgtggcctcgagcacgccgacctgctccagctggaaggtggcgtagtagtcgacggcgtcggtgttcatgatcagtcgatcgtaggcgatgaccttggcacctgcatcgcgggccttctcaacggcggggcccactgcggtgccgtccttggaagcgaccacgacgatcttggcgtcgttgttgaccatgttctcgatgtcagcgttctgctgggccggcttatcgtcggcgaaggacaggatgaccttgtatccggccttctccagcttggccttcaggttgttgccgtccttgttccaacgctcttcggacttggtcggcatcgaaatgccgatagtggcgcccttttcgatcttggcatcaccgccagttgcctggccgctacggctgccaccgcaggccgcgaggcccgcgcacatggcaacgcctgccaccacggcgacgatcttcttagtgaacttcatttgttctccttcatcttcgaggggatggcgaaccctccttggtcgcccgaacctgagaataacctcaggttcatctcatagaataccgtattgagttaagttgtcaaactcaagaaagcgaatttcctgtcgtttatgttcaaccaatgaacgcaatgtcgatttttcgcgcatcaccaggcgacacgccgaaaaatccacgctctgcgcctcgctgtgcctcatgccggtaacgactacactgaactcttatggcaacaaggcttttcggttcgcagacctcgcttcgcgaggcaaaccgcgccaacttgctggccagtatccacaagttcggcgccatgacacaggtcgaactggcagaggtgacaggactgtccactgcgaccgtgtccacgctcgtccatcagcttgtcgacgaagaccagctggagaccaaaaacaccgttcgcaacggtcgcagagccactctggtgacccttgcacggcatcagggcctcggcgtcgggctttggatcgcgcgacgtcatcttacgctttctatcgttgacttctcgaagtcaatcatcgctgagcacacgctccccctgccgttgggccacaaggcggacacaacgctggaacgcgccatgctgctcatcaatgagaccctgagcagcatcgacgccgaagccagcgagctggtcggcatcggcgtggccgtggccgcaccggtggccaccagcgaccacaccatagcgattcccggcattctgcccggatgggacggcgtcgatatcacggccccgttgcgcacggcgttcaacgttcccgtatacgtcgataatgacgcgaatttcgcggcatacggcgaatcccgtatgggcgtggcggcaggcaaacgcaatttcgtatatatctcagccaacgacggggttggcgcaggcatcgtcatcaacggcgaaatcatgcatggcgtgaccggcctggccggtgaaatcggccatatccaggtcgacccgctgggtgccatctgttcgtgcggtaaccgcggctgccttgacaccgtcgtggcggaaaacaggctggtgcagttgctcagcgtcacacacggcaatatgacgctggatgatctggtgtcctttgccaacgaaggcgaccccggttgccgtcgcatcatcgccgacacggccgtgcgtatcggtcaggtggcggctgatctgtgcatcagcgtggatccggaggtcattgtgctcggcggcaagctggccatgaccggcgacgtattcatccaaccgttcaatgaagcgttgcagcgcatgctgttccctgatgccgtggcacccatcgatgtacttgtgtcatcccacccgaacgacaactgcgcgctaggcggcgcattatgcgccatcgagttctcggttcgcaatgacgtcagccagtgaccggcaccaggagaagagtgagaagaaggaacacaccatgaggaattcgagcacacctcctctgctgcggctggaggacatctgtgtgaagttcggcttcgtcgaggcgttgaaatcggtgaatctgtccatccaacgccaggaggtcgtcgccatcgtgggcgataacggcgcaggaaagtccactctgatcaaggtcatcgcgggatttctgcagccgggattcggccatatctatctcaacggcgaacaggtgaccattccctcgatcagggaggcggaccgcatgggcatcgcatcggtgttccaggggcaggagttctgcgacaacctggacgtggcctcgaacctgttcctcggcaaggagatcaatcagattggcatacgcgatgacgattcgatgaactcgcgtgcccgttccgtgctgaagaccctgagctcggcgattcgggtcggctcccctatcgcatccttatccgtcggccagcgccagaccgtggccatagcacgcacgctgctcaatgacccgcagcttattctgctggacgaaccgaccaccgcactgtcggtgatgcagtcggcggaagtgctcacatatatcaagagactgcgctccgaaggccggtccgtggtgatggtctgccacgatctgccggatgtgttcgcggtatccgaccgcattgtcgtgatacgtcaggggcacgtcaccggcgtgcatcgaaccgtcgaaacgtcctatgaggagattatcgccgaaatcgccggcgtgaccaccgaacacgagtacgaggaaatcgctgagaacccggaattcgattccatggtcaggcagcggaaactcatcgaccgcactatcagcgcggcagtgagccatggcaccggccatgactcaccattagactaacgtcccgttgccggagcgacatcgtcagcgcagagccaggttggccgcgccgatcagaccggcatcctggcccgcagtggccgcgacgatcttggcatggccgcggtaggcgctgccttctaggaaacgctggtagttgtagcgggccggctccagcaggatgtcgcccacggccaccacgccgccgccgatcacgaacaggtccgggtcaagcacggcggaaacggcggccatggtgcggcccagccattcgccgatcttgccgaacgcatacaggccaagtacgtcaccttcctgagccgcttgggacaccatcggcccctccagtttggtgatgtcgccgccgcacagttccagaagacgcttggcgtcctgaggacgacggcgcacggcggacttggcgaagttctccagcgaggttcccgaagtgtaacgttcggcgcagccgcgcaggccgcagccgcagtggtcgccgtccgggaccatcggcaggtggccgagctcggcggccatgccgaaggagccgcggtagagctggccgttgatcacgatggcaccgccgaggccggtgcccacggtcagcgcgaccatgttggagctaccctggccggcgccgtgcacgaattcgccccatccggcgcagttggcgtcgttttcgacgatgaccggcacggcatggtcgatcagcgcgccgacgtgctcggacagatcgtagttgatccatgccggaatgttggcggagaaggtgagcgtcttgcgatccgcgctcacattgccggcggcggagatgccgacggcctcgatatcggtgtgcccggcggccacagcctcgcggtacacctcggcgatgtgctggttgatggcgtcggcgtccatcggcgtggggacgcgccagcgctggatgatgctgtcattttcatcgcagacggcggcggcgatcttggttcctccgatatcaatggcgagcgtggtcatggcttactccttgaagactttcgtaacatgcgagatagcgaaaatagtagcgagccgccatgacctcccaccgcggtttttccgtggttcgtcatgcgtcgcgaacattccaccgatgcgcttcctcatgcatttcacccgttgcaaacgggcgccccttaacgccggcatcggtgcggacggcgtgtcgaatcggatgcaatcactttcaccgtccttgcggatggcatcgaagaacggcaggaaacaaaaaaactcccgacatgcatcgggagtttggtggcgaccccggccggacttgaaccggtgacctccgccgtgacagggcggcgctctaaccaactgagctacggggccgtgcgcgcctcgctgaggcacaagaggatatgttacagcatcatcggattacgacacgccgtctgatacatcgttccttccaccggcgaaccgaccgcaggcgcggtggacggtatgcggaccatatcgttcgaccgcgcacggccgcactccccataagaccgtagccgtcatgcgtcaacgcacgttgtgcgacgacgcggcacgacgcacggccaccgaggccagcaaaccgatgaacagcatgatgccggcgaccagaagcgtccactgaccgccttcgacgaaccctgaagtcatcgcatcggcaatcttcggcgcctcgtcgccgaatcgggccgccggtccatcaccgctgcggaacacgccgatcactccacccgccgaaccactgaccgcttgggccagaccgtcgccgaccttggcgggcagcccgagggattcgagccgcgccggcaatgttccgttgacggccatggccaacgacgctccggagatggccgaaccgacggcggtgccgagctgtcgaaccgtggactgggtggccgacccttcgccggactgcatgatcggcacttcggagagcaccacgctggtcagctgcgcggaggcgaagcccagacccagaccgtatgcggccatgggaa

SEQ ID NO: 60 - DNA, 53361 bp, Unknown
  R206_24m  MAG No. k141_938
agatttgcggcggccatggcccaggagagacgcccggtcccattccgaacccggaagctaaggcctggcacggcgatggtactgcacccgacagggtgtgggagagtagcacgccgccgcaccacacgtacaggaagccccgatacccctcaaaggtaccggggcttcccgcatatcaggacacttgcgcgtgggggggggtgtatctcgcgtccttgggccccggcaggagtatcccgtcggggcccagtgcgttttgggcggcaacccgctgaatacccggtaagatgtctgaggtatcaacaaacaggtcaggaggtgatgcgcatggtggcgccaagccgtgatgaccgtagcgtagatgcattggtgaaatccaaggcagtacttgatgtattggcggaactgggaccaagcaccgcaaaaaccataagcgaacgtactggtgaacccgtaagctcaacgtatcgtttgctggataatctcgtcgcagtcggttgggtggaacggggcatcaatcgtggcgagtatcggcttggcatcgattgcgtacgtatcggcggccaaatcgaaagcagactggacattcagcagatcgctcgccgtaccttccgcgcccatcacggccagttcggcatctggggtctgttcgttcggaggcgattgcgcacggtgtgcatcgagacacgcacccgtgagacattgcaaagctatgcacagctggtgggcaatagcttgcctctgagcatgagcgctccctctcatgtactgacggcctggcttcccccggctcgctacgagcagctgttggaacactatgcctataccaacgagctcggcggcacattctccacgatgcgtgccacagcaatgggacaggctcgtcatatacgcgaatgcggcttcacctatgacgtcggccagaccatggccggctccgtgactatcagcgtaccggtattcaatcacgccggagagattcaagcggcaatcgccctgagtggcctttcccgctccttggaacctgagctggcctgtctggtagatgggcaaccggcaacggcatcggctcaagacatggtgcgattggtgcggactgccggccgtgaggtgtcgcgaggccttggatacagtggtgatcatcttggcctgaacagttgaatatgatgagtcagggataagtcaggggaaggaacgtcgacgatggcggaagacaaacgtgaaccgacccgcgctttagacaaggcgagtcgtgtgatggacgcattggcggcggagaatggcctgtcgccggcagatatcgtcgacgcctgtgatatcccgcgatcctccgtataccgcgtgctggatggactggtcgatgtggggtgggtcgtaacggatacggatggtaactactcattatcactggactggctgcgattggctgatgccgctcgcacgtctcgtaccgaatggcagcctgcgattgcggtcatgcatgccatcaccgcgcaaaccggcatgacctcattcctcagtgtggtctccggcactgaattggtatgcgtggaatgtgcgcaaggtcatgccatcgattcgctgatcctgcgcccgggccgcgtgctgcctctgcatgctggcgcggccggccgcgtggccttggcgtatttcgaggatgccgatgtcgaacgctatcttgcaggagcgccgttcccggcatatagcgagaacacgctggtcagtgtggaacagttgcgcgaggatattcgtttgactcgcgaacgtggatatgcactgtcggatgaggatgtgacgttgggtgtcggtgccgtcggtgtaccgattgtggacaacgagtccggtcgcgtgatcgccagcctgtccgccggtggattcgtggacgaagtgttagccactcaagaatccttggccgcgttactgcgcgatggcgtacgcgaaattcaggcagcctgattcggcccgctaggctgtcgggctggacggttatgtccggtcagctatggcctttgccggctacggttctgctggttatgcttctgcccgactacgctgcggtccgttacgcttcggccacacgacccaacgcgatggcggtgatcagcacgtacgcctcgcgcgggtcggtggcatcccagccggtggattcggcggcgcgcttcaaacggtagcggatcgtattgggatgtacgttgagctccttggccgtggtctcgagcgaaccgccgaacttcaggaatgtggagacggtgagcagcgtcggatcatccgggcctgctgctgtcaggcttccgtagaccacgcggatcagttcgtcacgggcgtccgcgtcgccgatcaacgcacgttcgggcagagcgtcgtcggtgcgtaacgggcgcggcaatggctgcacggtggcggccagggccggcgcggcctgaagacagtagagcgtggcctgaatcgaacgcatcgcgccatcggcaccggtgcgctgtggacccaaggcgattggccgatcggcggcgaacgacggggcgatggtattgcagatgatttccggcgtggccgcaccgaccggacgaatcaacgccactacggcggtgctgttgccgatcgggcgcttggcggtcagacacacaccgccgaaatcggccacgattttctcgatttccttggccgtacgtgcggcggaccgggcagggtatccggcgatggtgtaacaatcgaagtcatgctcgaaaccgaggatggtgaacagggactccactcgttcgtcggccagatgattgaacaggcactcgaacagcacggtgcgtacgcggttggtcgcggtgatgccgggtgcggccgaatcggatgaatcgggcgcacccggcataccggatgcaccggacgaatcggcaacgtcggcagcaagaagttcgagaaaatctgacatagtcactagtgtagcgtcgctgattggcgttgcctttcagccaaagactctcgccaatacgtcagcaccacgaatccgaatacaaacgcaaccggcaacatgtgccgctcgaaattattggccggcgcggtaatcatcacgcccatcagcagtagcagcggaatatgggtcatgagggtgagccaacgtcggcgaatcacctcggccgcgccgatcagcaatgtcatcaccacgtagaaattgccgtgcgtaggccagccgagcacgggaatactgccccatacgcgagtgaagccggcgatgtgctcacgccagtcatggttgtaatccttgatccatgtggagtttttctgcacgtaatcgctggccacgtaataatccatcgatacgtacggctgatcgttcacattgaagtatccgaagcatttggccagcaacgcatccagcgcgatgatcggattgtccttgacgatttcgaaccatgccttgttgaaattggtcatatcctcgggcgtcaccgtgcgccacttgtagctgaccttcttggcctgaataccggaggatttcaccgggtcggcatcctgctgggagtaagcgtcggccatctgatcgagattgaagacgggcgcgaggttctttttggcttcgtctgaaataccgtccggattgcgctgagccacgcgggcgatcatttgcagctgtacgccgcggctttcgattggatcgccgccgatgatcgcaccagaggagatggcgaaggagatgccgccgtgaatcagtacggtggggatgagcagcgccacgacgtaagtcgcccagcgtttgcggtcggcgatcagagccagcacgatttgcagagcgatgatgtaccacgcatatttcgcggaaatcagcatcaccgacgtggccaggatgaaggcgatgaagctgtggcacggcaagtggacgggcgtggcgatggcaggggtctgaggatgtttgcgggtgccggcggggtgccaggtctggacgagttcataccagacgctgaaccaccagacgaacgagaacgcgaacagcggcgatttggtgatggagatagtggaaaacacggccagcgggcagaccatgaagaacagcagaatcaggaatctggccaatcctccggcctgtgggggaacggcggaatccgttgccgtttttcctatccaaggccggttcaggaatcgattggcggcggcagcgcagcagaacacggcgaacagcgtctgcagggcagccaacgtcacgatgccggcatcgtttgagccggtcagatgcctcgcaaacgtgactatcgcgccatagaacacagtgagtaccacattgtgctggtcggtcagatacgtgggatcggacggccacatgtagtgcgcggtggggtagatgtccatcggcacgaaggagaagaagccgatatagggctgtttcaggccggtccactggttccaggcccagctgaattcgcggatctgtgagcggaggtccgcgccgaatgcggccagcagagtggtcggcacccagagccagccgacaaaaaacaccagcataagcttccagaaccggttcgtgccgcgtgtgatccagcggtccagaacagtgacggtggacgtgacgatagcgcgaacggtacgacgggtcttggctggttggctggcctgctgatcggcggcgggccgtgatgtttcgctattctgctgatggtggcgtaggcgctcgccgatggtcttcggcagtatgcgctggcctgctgcgaatcgtgccatcagcgtgatgattccgagatatatcaggaacgacacgacgaatattgcggtattggcccagttccaatgggcgagggtgccgttctcctcgtcccggtacagcgggccgaccgccgagcacagtgcaagccacaggcaggccagcacggccagtgtccagcgcgcggcagcgcccacgcgcgcaagatgcgggtgggactggcggctggatacggcggcaagcttcgcggtggctggtgacgtcatgacaatatatggtagccgcacaggtcaacggttgatattcgatgtctgccgggcatcgccattgttcgcaagccaatacgacggccgggtgcatgcgtgggctcggcgaatgcggaatttccgaagttgtgaacgctaacacgggctgtccggcccaaaatggttgattttgtgcgcttttccgtggaatatcgcgggcaaaaaacggcgcaaccgaggtaacgtagtgtccatgatgattgcattgaaagctgcaacgccgcagctacccagaactacagccgtcgcggatcatgtggtcgccgtggacgaaaccgattcgaccaacgcgctggccgcgcagatgatcggcgacgggtcgttgacgctgcccgaccaccaggatggcgaactggcggtggccgtggtggccgccgaccggcagatcgccggccgtggccgcaatggtcacaagtggatcagtcagcccggccgttgctcgacgatgtcctatgccgtgcgcattccgcgcgcgatcgccaccgacgaatccgtcaatggctggctgcagatgatcgccggactggtcacgctggacgccctgaacggcatgatcgaggaatacggtgccgcgccgaaccagccggactgcttgctggaactcaaatggccgaacgacgtgttctgccacgggctcaagctgggcgggctgctctcggaactggtgattccgccgtcgtccggtactgatgctgatgccgatgacgacgtcgtcatcgtgttcggcgtaggcctgaatctggcgctgggtgcctgttggctgcccacgccgcagtcgacttcgctgcagctgcatgtcacgggcttgccgttgtttggcgagatgcgcgatgcggtggccgaacgtcaggtcgagggcttccgtgaacgactggcgaagttcatcgccgacccgaagggccaggccgagtcgttgcgcgaggaaatgaaggcggtgtgctgggcgcgcggccgtcaggtcgaggcgcatttcacggacggcaccacgctgaccggcgaagccatcggcctcaacgaagacgcctcactgatcctgagaacacaagacggcacggaccatacggtccgcaccgccgatgtgggagtgctgtaatagccggccagtagctagctagtagctcaggtcagcgaccggctcaggtcagcgaccgagcttggacaggccggcggcggccagagaggccaccacggccttgatggcgtcgccgacgacgaagcccatggaggccagggccacggcggcgagcggcgcaccggtcaacgcggactggatgatgaagccgaaggcgtacaccaccacgacgccgccgaccagcgcggccagcaggtagcggcccgcggtgcgcgcggcggccgcgaaggacgaagtgtcggacttgccgcgcagcagggcgatgaccaccacacccggcaggaagccgaagaggaagccggcgctcgggccgaccagggccagcgtggaggtgccgccggcgaacaccggcaggccgaccgcaccggccgccagataggtggcgacggcggcaccggcctgacgccacggcagcatgagaccggcgagcatcaccacgaacgtctgcagcgtgatcggcaccggcgtgcccggaatcggaatctcgccggcggccgcggacagccacatcagcacggcgaacagcaccggcttccaggatgcggcgacgatacgacgggcgagcggcgtggtggccgctgcggatgcggtggtgtgtgaagtctgcatatcaataacccctatgttgtgtgatatcgccgtgaacggcgggcggtatgcgatggatgaggggaggttccggcgggccgtgcggtatccccgacagcccgaaccgtccatatggtggacggtcccaaatgaatccggccctgtgcgggcgaatcgtgcggcgatggaccgatgccggtccggtcgccttccgttcgcccgcagatgagccttcccccgaacttacggttgccatcgtagaggtgttcgatttcgtgcggtttcgtaccaacttacaaaattgtcgatttcgatttgtcataagttgacgaacgcaaccgtaacgtcaacttcttgaaccggcgcgcaaggatgtgcaatcggcggatttgcaacgtttttgatagccggcgccaacggttacgttgccggaacctacgcgcgcgtttgttcgtagcctacaaaagggcgtgaaagcttttgtgcgaacgcggcttgccctctcctctatatggagggcacaatttgacactatggctcatactgtcaaaaaactgctgattgcgaaccgaggtgagatcgctctgcgcgtggtgcgcacggccaaggagatgggtatctccaccgtggccgtctactccgaacaagatcgcaatagccgctatgtggacatggccgacgaggcatacctgctctccggcgacacctacaaggacacgtacctcaacgaggatctgctgatcgacatcctgcacaaaaccggtgcggacgccgtgcaccccggctacggattcctttccgaagtgccgagcttcgcgcagaaggtcgaggatgccggtgccatctgggtgggtccgcaccacaccgcgctggtggatttgggcgacaagatcaccgcccgccgagtggccttgcgcgccaaagtgccgccggtgcctggcctgtccgaaccggtgaccgacgtgcgaacgctgctcgacttcgcacacacccacggctacccgatcatgatgaagcgcactgatggcggtggcggccacggcatcaccgtggtgcatgacgacgaggagctgcgccgcttctacatgaaccacgacgcgctgcaaggcggcgatctgaaggaatacttcatcgagaagttcgtggacaaggcacgccacgtcgagacccagtccgggcgcgactcgcacggcaacttcaccgtgtactccacccgtgactgctcgctgcagcgccgcaaccagaaactcgtggaagaggcgcccgcgcccttcctgtccgaggaaatcgtcagcacgctggaggaatactcccgccgcctgttcaccacggtcggctacgtgggcctgggcacctgcgaattcatggtgaccccgaacggcaaagtgtacttcctggaagtcaacccgcgtctgcaggtggagcacaccgtctccgaagaggtcagcggcctcgacctggtgcgcgaacagctcaatatcgccgccggtggcgagctcacccgcgcccccgaaccgcgcggccacagcttcgaactgcgcatcaccagcgaagacccggccaccaacctgacccccggctccggcaccttggagaagatccagtggccggccggccccggcgtgcgcatcgataccggtgtggaacagggcgacaccatctccccgaagttcgattcgatgatgggcaaggtcatcgtcactgcccagaaccgtctcgatgccgtggcccgtgtgcgccgcgtgctcgacgagctcgtgatcgaaggcgtgcccacgccgattccgctgttcaaggagatcttccgcaacgacgacttcaccgccgagcatggccatccgttcgccgtgtccaccaagtggctggagcgcacgtacctgaaccgcacaccggcttccgccgcctccggccagccggcctccttggccaccgccccgggtgccgctgccccggccgcgcccgacaagtccaagtcggagacgttcgtcatcgagatgaacaaccgccgcgtcaagctcaccgtgccactcgacatcgtggagaacatcaccggctcggcccgcgcccgcggtgccaagcgccccacccagccgttgcgcggcgcaggcttgcacaacgtggcctccggtgccgccacggccaatgacggtgccaaatccggcgtcatcgcctccccgatgcaggccgtggtcacgcgcatcaacgtgtccgaaggccagcaagtggccaagggcgaccttctggtggtgctcgaatccatgaagatggagaactacgtgtacgcgccggccgccggcgaagtgaagaagattttcgttggcccggccgatggcgtggaggccggcgacacgctggtcacgctggacgtgaacgccggcaaggccaaggccgccgacgccaagaaggagggcggcaatgactgacatcatggattcgccggccgtgaaggccgcggctgcggcctcggccgccaacgccgcccagccctcggcccaccagccgctgcgcaccgccgtggtcaaggccgccgaactggcccgcgccgccgaagagcgcgcccgcgacaagcagcacgctaaaggcaagaaaaccgcgcgcgaacgcctcgacctgctcttcgacaccggcacgttcgaggagatcggccgcttccagggcggcaacatcgccggcggcaacgccggtgcagctgtcatcaccggcttcggccaggtctacggccgcaaagtggccgtctacgcccaggacttctccgtcaagggcggcaccctcggcaccgccgaaggcgagaagatctgccgactgatggacatggccatcgacctcaaagtgccgatcgtggccatcgtggactccggcggcgcccgcatacaggagggcgtggccgctctgacccagtacggccgcatcttccgcaagacttgcgaggccagcggcttcgtgccccagctgagcctgattctcggcccctgcgccggcggtgccgtctactgcccggctctgacggacctcatcatcatgacccgtgagaactcgaacatgttcgtcactgggccggacgtggtcaaggcctcgaccggcgagaccatctccatggccgaccttggcggcggcgaagtgcacaaccgggtgtccggcgtggcccactacctcggcgaggacgaatccgacgccatcgactatgcgcgcaccgtgctcgcctacctgccgtccaacagcgaaagcaagccgccggtctacgcctacgccgtcacccgcgccgaacgcgagaccgccaagcgactcgccaccatcgtgcccgccaacgaacgtcagccctacgacatgctcgaagtgattcgttgcatcgtcgattacggcgaattcgtgcaggtgcaggaactgttcggcgcctccgcgctcgtcggcttcgcctgcatcgacggcaagccggtcggcatcgtggcgaaccagccgaacgtgctcgccggcatcctggacgtcgactcgtccgagaaggtcgcccgattcgtacgcctgtgcgacgcgttcaacctgcccgtggtcaccctcgtggatgtgcccggctacaagcccggctccgaccaggaacacgccggcatcatccgccgcggcgccaaggtgatctacgcctacgccaacgcgcaagtgccgatggtgaccgtggtgttgcgcaaggcgttcggcggcgcgtacatcgtgatgggctccaaagccatcggcgcggacctgaacttcgcgtggccctcctcccagatcgcggtgctcggcgcggccggcgcggtgaacatcatccaccgccacgacctggccaaggccaaagcctccgggcaggacgtcgatgcgctgcgggccaagtacatcaaggagtacgagaccagcaccgtcaacgcgaacctgtcgctggaaattgggcagatcgacggcatgatcgaccccgaacagacccgtgaggtgatcgtcgaatcgctggccacgctcgccaccaagcggcgcgtcaagcgcaccaccaaacaccacggcaaccagcccctctgatttctgaagacatcaaccaaacacaagtaaggaaagcaatgaccaccttcttcctcaatcgcctggccaccgagccccatgcgctcgccttcgccggccagtccaccccgtggccggtagccctggcagaccagaccaccgatcccagccttgacgaggccctgcgcggccacatcgccgcagccaaccgactgctcaccccggtcgccgccgacctgctggccaccaccggccgtccggtcgacctgttcggcttcactccgaacccggcccgcctcggcgccgcagccgacgccaccgcgtccgtggaaggcgtggcactgacccagctcggcgccctgctcgacctcgaacacctcggctacagcgtggcccaggccaagccgctcgccgtgctcggccactcccagggcgtgctcgccgtgcacatggcccgcgccatcgaggccgccggctccatcgaggccgccggcaagaccctcgacgagattctggccgtcgccgccctgatcggcgccgccggaacccgccgtgtgcgcgaactgggcctgaaccccaagtatggcgaagccagtccgatgctctccgtcaagggcgccacccgcgaacaggttgaggctctggtcaagcgcgtgaacaacgcccgaggcccgatctccatcgccgtcaccaactccgacaaccaccacgtgctttccggctacccggaagacctggcagcactcgccctcgaagccgagcgcgagcacaagcaccaggccaagctgcgtgaacagaagctccgcggcggcaccgtgttcaacccgaccctcgaatacctcgaagtcaccctgcccttccactctccgctcatggccgaagctgttgagcggaccgtgtcttgggccggcgcctgcggctttgaccaggatcgcacccgcgcgctcgctgaggaagtgctgctcaaccatgtggactggaacgcccgcgtcaaggcgctgttcaacgccgccgacccggccaagctgtggattgtggaccttggtcccggcaacacgcttggcaagctgatcggcaacgtggtgcagggcaccggcatcggcgtggtcgaagccaccacgctgtccgaacgttccgctctctccaccttggaaagcgagcccgagcgcacccagaactggaaggcactcgcgccgcgcgtcatcgaaaccccggccggcgccaagctggtcaccaagttctccaagctcaccggcaagccgccggtactgctgcccggcatgacccccaccaccgtggaaccggaaatcgtggccgccgcggccaacgccggttactgggccgagctcgccggcggcggccaggtgaccgccgaagtgttcgaccgccacatcgccgccctcgaagacgagctggaggaaggccgcacggtcgaattcaacgcgatgttcatggaccgttacctgtggaacctgcagttcggctcctcccgcatcgtgcccaagaagcgcgcatccggcgcgccgatcgacggcgtggtcgtctccgccggcatccccgagctggacgaagccgtggccctgatcgagtcgctgcaggcggacggtctgccgtacgtgagtttcaagcccggcaccgtggaccagattcgtcaggtcgtgcgcatcgccaaggccgtgtcccccaccaccatcatggttcaggtcgagggcggtgaagccggcggccaccacagctgggaagcgctggatgacctgcttgccgccacctacgccgaagtgcgcgcctgcgacaacctcgtgctggtcgccggcggcggcatcggcacccccgaacgcgcggccgactacatttccggccagtgggcccacgcctacggcctgcccgacatgccggtcgacggcgtgcttatcggtaccgccgcgatgaccgccaaggaggctcacaccagccccgaagtcaagcagctgctcgtcaagacgcccggtattccggccgacgccaagtccgacgacgtgttcgccccgcaggccgcccactgggtgccgtccggcaagtccgtcggtggcatgtcctccggcctgagccacctgcacgccgacatttacgagctcgagaacgactccgccgaatgcggccgtctgctcgtgcgcgtcatgaagcaccccgaagagctcgactcccgccgcaaggaaatcatcgaagccctgaacaagaccgccaagccttacttcggcgacctggcctccatgacctaccttgagtgggcgcagcgcttcgccgaactcgccttcccgtgggtcgacccgacttacgccgaccgcttccagcacctgctgcagcgcatcgaagcccgtgtgaacgacacggactccggcgaattcacctccaagttgttcgccgctgatggcgtttctgctgaagaggcagctgccgctggcctgctgacccacgacgacattctcgccgacccggcccccgcgctcgaaaagctcgcactggcctacccgcagaccgccgaactcaaggtggtcccgaccgacgtggcttggttcccggtgctcgtgcgcgaataccccaagcccatgccgttcgtacccgtcatcgacaacgacctgctgcgttggtggggtcaggaccagctctggcagtccgaagaccagcgctactccgccgattccgtgcgtgccatccccggcccgatctccgttgccggcatcaccaccatcgacgagccgatcgccgacatcctcggccgcttcgaaaccgccgccatcaagcgcgtgcaggacgaacagcaagccgccgatgccgctgagaacgacgatttcgccgcacttggcgaggccaccagcgccgaagacttcatccgcaagtccccgaacatctcctgggtcggccacatcaccgacaacccggcctacggcaccgccctgggcgaccagtactacgaaatccgcgcgtttgacgccgcggccggcaagtacgatctggacatccacctcgacacctactgggacaacgacccggacggcggcacctccaagcacgccgtgcgcgatatcgtcatcccgctcatcgtggaaggcaccgagcccggccgtgtgccggtcgtggaccgcgaacgcctgattccggacgtctacgcgatgctcgccgccaccgcaggcatcggcaacaccgccatcaccggcgacaagctcaccgagatgccgaagcttgacgacaagacctctgacgagcgtccgttcggtaccgcaaccgcaacctacaccctatccgccaacctcggcttcgaccacgaagcggccactggcgccgctctgccgaccaccctgcagcccagccgcatcgcccccgatgcgctggtcggccctgcctggccggcaatctacacggcgctcggctccgtgtacgtcaagggctacccggtgattgaaggtctgctcaacgccgtccacctcgaccacctcatcgaacttgaggtgaacgaggaggacctgctcaagcacaccggcgaaaccatcaccctgaagtcttgggccgaggattacttcgagtccgcctccggccgcgtggtcaccatccacgtgacccacaccgccgccgacggcacgccgcttgcccgcgaaaccgagcgtttcgcgatccgcggccgcgtctactccgatgctttgcctgcagacgcccccgagtatggtggtgccctcctgaataaggaagcggatggctccgtcgccggacagtccactggactgtccgcctcctcgcgcggcctgcaagtagtgcaggccactccgcgccgtctgctgcgccgcgtgaaggtcgtcgccccacacgacatgaccgccttcgcccgcacttccggcgacttcaacccgatccacacctccactcgtggcgctcgcatctccggcctggccgccccgctcgtgcacggcatgtggctgtccgccaccgcccagcacgccgtgcaggcgaccgacgagaagggtgcccactatgagattgccggctggacctacaacatgtacggcatggtccagcttgacgacaccgtcgaaatctccgtcgagcgcgtcggcaaagtgcgccacggcggcatgaccctcgaagtcacctgccgtatcgacggccagctcgtctcccgcggcaccgcactggtccgtgcgccgcgcgccgccttcgtctaccccggccagggcatccagaagcagggcatggttctgaacgagcgcgccaagtccgccgccgcccgcgacgtgtgggagcgcgccgacaagctcacccgctccaagctcggcttctcgatcctgggcctcgtgcgtgacaacccgaaggaactcaccgccaacggcgtgacctaccgtcaccccgaaggcctgctcaacctgacgcagttcacgcaggtggcgctcgcgacggttgcttttgcccagaccgcccgtctgcgcgaagccggcgccgacatctggcccgcctacttcgccggccactcgctcggcgaatacaacgcgttgtccgcgttcgccgacgtgattccgctggaaaccgtgctggagctcgtgttccaccgtggttccaccatgcaccacctcatcgagcgtgacgcacagggtcgctccaactaccgcatgggtgcccttcgtccgaaccagttcggtgtggacgacgcgcacgtcaaggaatatgtggaatccgtggccaaggcgtccggcgaattcctggagattgtgaactacaacctcgccggccagcagtacgccatcgccggtacgatcgccggactcaaggccctgaaggccgattccgcccgccgcgtggccgcattcggtggcaagcccgcgttcatgctggtgcccggcatcgatgtgccgttccactccacgctactgcgcaagggcgtgccggaatttcgcgacaagctcgacgcgctgcttcctgcttacatcgactaccgtggccgtctggtggaccgctacatcccgaacctggtggccaccccgttcgagatgaccaaggaattcgccgccaagatccttgaagccgtgccgtccgaacgcatcaaggccgtgctcgacgacccggccgtgtgggattcctacgccgccgacgaccagaagctcggccgtctgctcttgaccgaactgctctcctggcagttcgcctccccggtgcgttggattgaaacccaggcgctgctcttcggtcagcgcgaacagggcggcctcggcgtggaagaatacgtcgaagtcggcctcggcaacgccccgaccctggccaacctcggtaccaagaccctgcgtctgcccgagttcgccggcgacgatacggtcgtctacaacgtcggtcgcgatgaaggccgcgtctacatgaccgacaccgattcgctggttcccgacgacgagccggaagaggctgcggcctcggccccggtcgaaaccgctcctgccggtggttccgccgtcgccaagcttggctcgggtgctgctccggcaaatgccgcgactgaggctgctcagacaacggatggctccgtcgccggacagtccactggactgtccgactcctcgcgcggcctgcaatcagggcaggccgctgctggcgcaccgtctggttccgccgtcgccgacctgcccttcaaggcttccgatgccatcggcgtactcatggcctactccgccaaggtgcgcctcgaccagatcggcagcaacgacaccaccgacaccctgaccaacggtgtctcttctcgccgcaaccagctgctcatggacatcagctccgagctgggagtcgccagcgtggacggtgctgctgaagcgacgctcgacaagctcgcccaaatcgtcaacaaggccgccccgaactacaagccgttcggtgccgtgctctccgaggcgctgcgcgaccgcctgcgctcgctgttcggtgccgccggcgtcaaacagcagtacatccgcgaccgcgtgaccaacgtatggcagctcggcgaaggctgggtggccagcgtgctcgccgcactgctgctcgacactcgcgagggtgccagctcccgtggcggcgacctggccaagctgcccaccgccgccgtgcagaacaagccggaagccgacaagctgatcgatgcggccgttgaggtcgtcgcccagctcaagggtgttgccgtggccctgccgtccgccggtggtgccgctggtggcgctgtggtcgattccgccgcgctcgacgccttcgccgagaaggtcaccggttccaacggcgtgctcgccgccaccgcccgcttcgtgctgaacgagctcggcgtggccgctccggctccggaagaatccgaggacgagaacgccgccgtcgtggccgcggtcgaagccgaacttggctccgactggcccaagcaggtcgctccgcgcttcgacgccaacaaggccatcctcttcgatgaccggtgggcctccgcccgtgaagacctcgcccgcgcctactacggcaacgaccccgccgccttgaacggcagcttcatcggccttggcaagaccatcgccgccgaagcccagtggttcgccgacaagtcgaacaacgatgagctcaaggccgccttccagaaggccggctccgaggccctcgaacaggtcgcttccaacaagaacgcctcccgttacgcgaatgatatcgccatcgtcaccggcgtgagcccgaactcgattgccgctcaggtggtcgaaggcctgctcgcaggcggtgccactgtggtggccacctcgcacagcttcaagccgtccatcaaggcttgggccaagcaggcctaccgcgagcacgccactggcaacgccaagctgtggctggttccggccaacctctccagctaccgcgacgtcgacgctctggtcgactgggtgggccacgagcagaagaagacctccggtgccaccaccacgattctgaagcccgcgtgggagccgaccctgttcttcccgttcgccgctccgccggtccacggcacgctcgccgactccggcgacctgttcgaatcacaggcgcgactgatgctgtggggcgtggaacgcgccatcgccggcttcagccacatcggtgccgacaccaacgtgcagcacaagctgcatgtggtgctgcccggttccccgaaccgcggcgtgttcggcggcgacggtgcctacggcgaggtcaagagcgccttcgacgccatcgtcaaccgcgcccgcgccgaaaaggtgtggtcgagccgcgtcaccttcgctcacccgaagatcggctgggtgcgtggcaccggcctgatgggcggtaacgacccgctggtcgccgtcgttgagcgtcacggcatccacacctactccaccgcgcagattgcggccaagctgctcgacctgtgcactgccgaatcgcgcgagcaggccctcaaggccccgctcgatgtggacctgaccggtggcctcggctccgagcccatcgacatcaaggcgttgcgcgcggaggccatggccgatgtcgagaaggaagctgctgcggcctcgtctcaggaaacggatggctccgtcgtcggacagtccactggactgtccgactcctcgcgtgggcagcaaatcaaggcgctgcccaccccgatcgtcaccaagcaggcttcggtcgaccttgccgactggaccaacgtcaccgccaagccggaagacgaaatcgtcatcgtttccgtcggtgagctgggcccgtggggctccggtcgtacgcgcacccaggccgagctcggcatccactcggacggcactgtcgacctgagcgccggcgcagtgctcgaacttgcgtggaacatgggtctgctgacttgggccgacagcccgaagcccggctggtacgacaccgacggcaacctcgtgcccgaagaggacatcgccgagcgctaccacgacgaggtcgtggcccgctccggcatccgcccgttcgaggaaggcatgggcaacgactacaaggacggtgccgacgaagaagaagccgaggtcttccttgaccacgacgtcaccttctccgtgcccacccgcgaagtcgccgccgaatacgtcaagctggacgaggctcacaccaccatcgccccggatgaggaatccggcgaatggaacgtgacccgccacgccggctcgatgatccgcgtgccgcgccgcgccaccatgacccgcacggtcggcggccagttcccgaagggcttcgacccgacccgctggggcatccccgcctcgatggtcggcgatgtcgacaagatcgccctgtggaacatcgtcaccactgtggacgcctacctgggcgccggattcaccccggccgaaatcctcgagtccatccacccctcgctggtggcttcgacccagggcaccggcttcggcggcatgatgtcgatgcgcaagctgtacctcgaccgcttcctcaaccacgagatcccgaccgacatcctgcaggaagccctgccgaacgtggtcgcggctcacgtgatgcagtcctacatcggcggttacggcaacatgatccagcccgtctccgcctgcgccaccgcggccgtctcccttgaagagggcgtcgacaagatcgccctcggcaaggccgatttcgtggtcaccggcgcgatcgacgacatcggcgtggaatccgtgatcggcttcggcaacatgaacgccaccgccaactcggaggaaatgtacggcaagggcatcgacgcgcgcttcttcagccgcgcgaacgatcgtcgccgtggcggcttcctggaatcccagggcggcggcacgatccttgtgacccgcggtgacatcgccgaaaagctcggcctgccggttgcggccgtggtcggcttcatccactcctacgcggatggtgcccacacctcgatcccggctccgggcctcggtgccctggctgccggcctcggtggcaaggactccaagctcgtgcacgacctggctaagctcggcgtctcagccgacgacatcgccgtggtctccaagcacgacacgtccaccaacgccaacgacccgaacgaatccgagctgcacaacacgctggcccacgccatcggccgcaccgacggcaacccgctgttcgtgatctcgcagaagacgcttaccggccacgccaagggtggtgcctgcatcttccaggtcaacggtctgacgcagctgttcaagtccggcgtgattccggcgaacgcggcgctcgattgcgtggatccgaagctccagcgcgacgatcacatggtctgggttaggaagcccctgcgcatcggcggtggcgaggacgagttcggtcgcgagaccgctggtcgcccggtcaaggccggtctggccacctcgctcggcttcggacatgtttccggcttcgtggccctggttcatccgggtgccttcgaagcggccgtggccaaggccgatggcgaggccgcgctggaagcctggcgtgagcgtgccaacgcccgcctggccgccggccagcgtcacctcgaggaaggcatgatgggtcgcgccgcgctctacgagccgatcgacaaccgtcgcttccgcgaggatcaccgtggctacgaccaccacgaggtcgaaaaggcgatgctcctcaacccggacgcccgcctcggtgccgacggctactacgaggcctgattccgctggctcccctcggttgatgggagccagtagcgcaccggatctcggctcccctctttgaggggagctcccgcgaagcgggtgaggggagtttcccctggagctttctcgctggcacaaactcagtgagagaaatatgcagaacatacggaagcccctccttcaaaggaggggcttcctgcgttcaaagaggtacatttgcctgattgcggaatactatctgctttcaaaggggtatcgaaactctgacatcgcgagtatgagcgttgatattccaacgaccatactcgcagttttgcagtctaggtactcctttgaaagcagatagcattccgcaagaccccgaatgtacctctttgaacgcagatagatgtctggggcgctgatcacgcccctcgactgagatatgggttatgttttagcgggtgctgcgcagctcgtggacggtgatagtcccgctgagctccgtgacggtcagctcggtggtgaaatccggggcgttgacagtgtcgcaatcgaagagaatcgcgcctgcgtcttcgccgttgttgacgaacacttcggccacaccgtgatcgtagaagacctcgacccgttcgatctgcttggtggcggacacatagtcgaatctgtcagtcggtaggccggtggaggtcaggtgcacggcagcgccgtcgctgaccaatcgcagcgagacctcggccgtggctccatccggctgagtgcgtgtgcccgaaaccagtgtcgcagagaacgcggagccgagttcggggcggatatccgcgtaataagcgtgattgggcacttggaacgtattgctattgcctgctggcgttgcagtaagaacatcgcccaccaacaggtcgtagacctcttggatcgggcgagagataagccgaccatcgaccacgtgcagttcgcgtggcaggctcatcacgccattggcatagtcaggccgttcgatgcgtacgccgaaccagtcgcacaaccagccgatggcaatacgacggtccacgtcggtgccgttcaccgacgtatgacgatcgaggaaggattgcaccgcgtaatagcatgagccgaaatcgcaccaaccggtgtgctgcacgtccagacgcggagcgtcgagcgaatccgcgataacgcctgtgtaccagcgaattggctggaaacgaccggtcgaatcatgcagtttcatcatcgatccgaccgccaccgccgagccgtccagcgagaaggcatccgggcactcgtaggtataggtttcggcgagtcccgtctcgaacagcagtggaccggcatactcccatgcggccttgcctaaattggtgtcggtggcacggaacaatgccaatgcaggcgtgcgggttgggtcaggctcttgctccccggcggcggcgaacgcaccatcgccgtaccagtattcgccttccggccgcggcgtggagccggagtctcctgcggctggtgcctcgccggatggtagatttgtggccaccacaatagtgggagtgcccgcaagcgcggtaccatcgaacaacgtgttatcagctttcgggtcgcggaaatcaaggccgaaatcttcgctcgggcggcgaatcaccgtggtctccgggctgaaggacaggccgtcggtgctgatggctgtggtctgcgtttccaccacagagccggggtcgccgcggcactcccagtgacgggtcaggaagatgcgaatggcgctcgcctcatcgccgggcacgatatgcccggtctcgtccacggttacggccgaaccggagaatgccccgccgctcagcgagccgtcacggctcagatcttcttgcgggagcagcgtgatcggcagatctgtccagtgcaccaaatcgcggctgaccgcgtggccccaatgcatactgtcccactgccagccgtacgggttgaactgatagaacatgtggtagcgcccttggaaacggcacagtccattcgggtcgttcatccagtgctgggccggttcgaaatgtgcgctcggccggtgcgcggtggcgcgcgtatccggggtgatgattcggatgcctcgatccagcagattcgcgcctccagtcaggtacgcaaagcccagcgtcaggccttcgcaacgtagtgcgtattgctcgccgggcttgattggcagggtgagtcgcatgcgacggtcggcggcagtcaggtgggcttcgatcggtggtgtgttcggatttgccggggtcaagcgcagggttgccggggcagcattggcacctccggaatattcggcaaacgcctcgaacgcggtgtagccatcggcattgatgatggtcataagaggactccttgagttttcgataccgggaattgctggatataaaggcgccggatgggcaaaaagggaaatcccacccagcacgtattgattcgccttcggccctgcaattgtgggttcgctttcagcgaggctcagtgttgccttcgcttggctttcgcctcgctcaggctgacgctacaaacagtccacaggactgtttgcttaacgcgtcagccctttactcccgaagaggcgattgagctgacgaattgcttttgaaagatcacgaacacgatgatgatcggcacggtgatcagtgaactgtatgccatgatctgaccccacgacgtggtcatctgctggaagtactgcacgccgatcatcacgggcctcaggctctcggactgcactaccatcagcggccagacgtactggttccacatgggcaggaagctcaaaatcaccacggtggcggtggccgggcccgacagcggcatcacgatacgcgagtagatgcggaaccagccggcaccgtccacgcgggcggcctcgtcgagatccttaggaatcgtctcgaaatactgcatgtacaggtacacggagaaggcgttggcgatgaacggcacgatctgcacgggcagcgtgtcgatccatccgcgcgtgaagtacaggccgaactggtccaccaccgggcgcggcagctggttgacccaccacagcagcggaatcgcgtaggtctcgaacggcaccatcaatgtggccagaatgaacgtgaagatgatcttcttgccgcgcacctgcagacgttggatggcgaaggcggccatcgagttgacgattacgccaagcaccacggtcaccagcgtgatgatcaccgagttcatgaggaaggtggaggccggcacgcgggtgaatacctgcgcgtagttgtcgagcgaaatgtgccccaccggcaggaacgccttgaacgagccgaggtccgccataatctcatcgtccggtttgaacgagctgacaaccatgaagatcagtgggaaagcgaacaggcaggcgaacaggatgcgtacgatccacccgcccacggacagccggttgtgcttgtaggcgactttcttggcttctttcgacgtgcgcttgtcgtgcgcggtttggtcggcctgcggggatgcggccatagttgttgcgttgctcatcgtcagtccctttccttacttctctcgagtcagataacgctggatgccggtgatcaccatgatgatgcagaagaacacgagtgtgatcgcggaggcgtagcccatctcctgctgctggaagccggagcgcacagcctcgaacaccacggtggtggtggcgtcgcgcgggccgccttgcgtcatcacgttgatctgagtgaacaggctcatcgcggcgatggtgatggtgatgaggatcatgttgcgcgtggagcgcaggcacggccaggtcacgttcttgaactgctcccaggcgttgcagccgtccagttcggcggcctcgtacagttcgccggggatggtctgcaggccggacagccagatcagcatgtgctggcccaccgcttgccagatggacatgacgatgatcgcgcccattgcggtgcgcgggtcgttcagccagtcgactgcctgccagtgcccgaaggtgagtttggccatgacctggttgagcatgccgtcgttctggtagatgaacatccacagcagggagacgaccaccatcgaggtgacgacgggcaggaagtagaccgtgcggaagaacacggaggagcgcacctgcttgttgatcagcacggcgagcagcaggccgagcccggcttggacgggcaccacgacgaccgcgaacacggccacgttacgcagcgcgtaccagaacgtcgggtcggagaacagtcgggtgaaattgtcgatgccgatgaaccgggtagggttcgggctgattgtgcgcgcgttggtgaatgccagtccgaaggccagaatcaccggaatgccgatgaacagcagcagtaggatggatgcgggcagaagcatcgcccagccgacggcgttctcgtggcgctgttcggcggtggacttccggcgcgtggcgacggtgccggttttgccggcgctggttccgggggtgccggttttgtcggcaccgactccggtaccggacgtaccgcgagtggttgcggttgatgttgcagtggtcatggttggtccctctcagttcttccggtagccgtcggcgccttggatgttgccgtcgatatggttgactgctttgtcgagccaggtgtccacgtcggcaccgttcatgatgtcgccgatggtcttgcggaactcggtggagatgaaattgtatgccggggtttcggggcgcattttgacgtacttcttcgaaatctcggtgaagatctgcatgtcgccgccgtcggagaactcgggcacgagcttctgtgcgccttcggtggtcgggatgttcataccggccttggctatgttggcgatgtacttgtcttgcagggagaatcggatgtagtcctgcgcggcttcaggtgcggggcaggattgggtcatgccgaccgtccacgagccgccgccggtcaccgagccgtggccgaagtcggtcatcggcataaccacgatgtcgtcgtaatccttggcgtacttctggaaagtgctcatcgaccaaatgccgccatacagcagtccggacttattgttcacgaagtcgagcgcggtgtcggagccgcccttggacgagatgtagcccttggccacgaggtcgcgcatccagtgggcgaattccttgccttccttgccgttgagcacgccgtccgacgactggtagtccgtgcggttcaccaggtcgccgccgaaggactgcaaaatcggtgcgtaagcgtaggcataccattcgcttttgttatcggccgtgccgatttcaaacgggtaggtccattcgccgcttgccttgagcttggccaatgcgtcatccatttcggccttggtccacggctcgtcgaccgtagccacgcggacgccgagcttgtccagcaccgacttgcgggcgaacagggcgatggtggcatcgaaatagccgacggtgtacaggtcgtcgttccacgtgcccttggccgattccatcaggtcgtcggcgcgggacaacaggtccttgtcggtgagcggggcgaggatgccggcccacgcccagtacggggtgttcggctggtccacgtcgatcagacagggcaggttgttggcggatgaggcggagatgatcgagtcgttgtacgagctttgcgggaaggactgtagtttgacggtggccttcttgtctgggctggcgttgtagtcatcgatgatctgctgcacgccggcaagctcggcttcgctgcctgccgtgtgcgtccagatggtgatttcattggcgttggctttcgccgccgcgcgttccgcctcaccgcagccgcccacggtcacaaggcttgcgatggcaagcgttgcggccagagctttgacggctgagcgtcggatggtatggggcatgatgctcctccttatctcttgtttctttcttccttgaataatggggtcgaaccggttcgacatacagtcgaaaccggatcaagtaggatagatgcgtgatttttgggcaggctatcgctgggggtggggccggacccaggattgcttgatgcgcagctggcattcaatctggggtgactgctcgctcagtggcggcggctgaaccttctcgaccgggtatccggcacgaggaaagggatcgggtgcctcgccttcgatgagcgaggccagcttacctactgcccagtagcccatctcgtaatgcggcagttccacagtggaaagcggcggatccagcgcttcggccacaacctggtggttgtcgacgccaaccaccgcgatatctttgccgataatcagcccgcgacgggtggcctcggtgtagatggcccaagcgcgggtgtcgttgaagcagaagaagccgtcgacatccgggtgtttgtcgaagaacgcgggcatgcgggcggcggcgtcgctgccggtgtccatgttgatcatgagttctgggtcgaacgagatgccgtgctcggagagggcgtcgatgtagccggacactcgcccgggctgagcgaccatattgtgcatggtgcccacgtaggcgatgcgggtgcagccggcgtcgatgagatggcttgtggccttgaatccaatgctgtgctcgtcgggcacgatgctgggcgctacttcggcggcatcggtcgaatcggcgagcaccactttgcagccctgcaacgattgaggcagcatcgtcttctgattaaacatgcgtgcgtagatgaagccgtccacgccgaactgccgcagcgtgagaatttcgcgatcggagcttttggctccgctgttgatgcccacggtgagcagcagatatccgagtgtgcgggcggcgtcttgcgcgccctcaatcatgcggccggcaaacggcgtggtggccacttcgtcgctgaggaatccgatggtgcggctactgctggtgcgtagcccgctggccagacggttggtcaggtaaccgagttcggcggcgatggcgcggactcgctcggcgacatcggggctgacgcggccgatatcgcggttgttgagcaccagagagacggtggagatggaaacgccggcgcgattggcgatttgcttcattgtgaccacggttctacctccttgctggcttcattggctggttgtggttggttgttgtgaagttgtccttcattggatcgttatgttaaccacgttaaaaagtcaaacgtttgacgtcaatcgatttacgtatcggagtgtcggttggaatatcaccattttacgctgtgccaaccgttggtcaaaagtatgacttggtgttgactttcagagttcagcttgcggggtggccgagggttttcgtttgtggatgccgcgttctgtgtgaacctcgttattctggatgtgttgtaaacgtgttgaatggctgataatgggtgctatgggcacatttggtttgggtcatgacgtggttgacgtcgccgcattcgccgagcagctgtctgaatccggctcgcgcatgcgctcgctgttttccgttcgtgaggtacgtcaggcggcggatcgtgcacggctgaagaacgatgacgaggccgtccatctggccgccaaatgggcgggcaaggaggcgttcctcaaagcgtggtgcgattatcttggcaatgccccctatccgttcacgcttgataatttcccgtggcctgaaatcgagatcttggatgattcccgtggtgtgccgcatgtgtctctgggtaagggggcggcgtcagtcttccaaactgattacgcgaattcggctgccggcgctcgctattcctctgcttgttcccctgcttccgataacgggccttatgcagtgatgcaggagcggcggaatgcgcgttcggcgcagcgctcggctctcggtgcggggttgatgccgcatatccatatttctctgagccacgatggtccgattgcttccgcggtggtgacgatttctgtggaatagcgccggtggctcggcgagtcttgggttgtgattatcgaaccggtttgatgtattgtaatacaatacgtcaaacgattgatgcgggcaacggatagagacaaaggagtttccggtggctcaaagcaaccagtcggcacaggcaggatccggactggtgcaagcgcggcgatatgttcggcatgaccatgtacaccgacctgttcgccggcgacctcaagaaacttgccgacaagattccgtacttgaaggagcagaagctcacttacctgcacttgatgccgttgattgacatgccgcacccgaacaacgacggtggctatgcggtccaggacttcgacaccgtggacccgaagctcggcaccaacgaagacctcgccgcctacttcggcacgcccgaggcccccgagtgccacatgctatacaacgtctccatcatggtcaacctgtggagcgcgctcgccagccgcgacgtgcgtctgctcaagaaccaaatcgacaagctcgactcgctgcccgaaaactgctggttcgtgattctggacgcgatggacgccgacctccaaccatacgagtctcagctcacccatttgtgatttcgacggtttctagctcccctctctgaggggagctgtcgccgtaggcgactgaggggagtcctcggcaaagccgcaatccatcaactagattggctggtcctgctgcaaccacacgcgtttgccatcctcgaagaaatatgtataataactcaagtcgccaaaagcgacgcttaacgcggatgtagctcaatggtagagcctcagtcttccaaactgattacgcgggttcgattcccgtcatccgctccactgaaagaggccgcaaacccttggaattgcttggggttgcggccttcggtgttttcggtgcggaaaacatgccgatgcaagttttccgcccaagtccaccaatttccgcccgaaatgtttgacctaatgtttgacctcgaccgcacgaaaaggaagaggcctgaagcccatgacacagcagaagaacacccgccgacccaacggaagcggaagcgaatggcgcgacgacaacggagtctggcacgcgaagaagagtgccggcgtcaatccacgaaccggacgacgccgctggatcgaggcgcaggcgcagaccaagaccgccgcccgacaaaaactccagaccaagctcgacaaacttcaacgagaaggcgacctgcccctcgcagacgtcccaaccctcgacgtgtggatagaccgatggctcaacaccatcgcgcccaacgtcaaaccccgcaccctcgaaacctaccgatccgactgcaacaccatccgcagcgtcatcggcggaatgcgactcgacagaataacccccgccaccatcgacggaatgtgcgccaaactcgccaaggaacaccgaagcaaaaccgtccacaaccactatctcagactcaggcaggtgctcgacgcagcggtccgcgaacgcctcatcccatcgaacccggcgctcgccgcaacgccgccgcgctacgagtcgcaggccacccagatcctcgaacccggacagccggcccgggcggcgcaggccgcactcgaccccaagcgtcgcaaatacagccacctggcagataccgacgacgaccgcgaaatgtggagcctcatgtggaacatcatgttcgagaccggcatgagagaggccgaaagattcgccatcctgcccgaagagctcgccaccgtcgacggtgtgcacggaatccagatcatgtgggagctccaacgcttcagatccgatgcagaagtgcccaactggctccgctcccgccattacgagggatgcttctggctcgtcgaaccgaaaagcaagcagggcaaccggtttgtgcccgtcagcaaccagacgtggctcggactctgggcgctcgtcggacgcaggcaatgccagcccggccagctcatattcacgcgcgagggacacccgctcaccaacaccgtggaacgccggcgctggaaacgctctctcgaagacgcgggactgccctacgtcaccatccgaagcgcccgccacttcttctccacgcacctcgccgaagccggagccccggaagacgcgagaaaagcgatgatgggccacgcaaaaatcagcacgacggccggatacacccactggtccgccgcaagccttgcggcacttgccgacaaggctcgtcaggcggtgggggaatcggcctgattgcgattcttgcgcggccttcccccgcccgcaccgcgaccgggacgagcggcgttccaagcatcgatggtctcaggcagccagccgcgagtcgtgccgatcagcgcgtccggctccggcagatgataccccctcgcggccggattgctcgtgccgatgcgctcgccgacctccttgaggctgagatatcttgcggtgctcatttccggcctcccgacagatagccgaacaccccggcggccatgccgaaggttccggccgcgatggcctgaccgccgatggcgagaatgaggcacatcgcgccacatatcagcgagacgagcctgtatgcgtttgttgtgttcatgatgttccatggattagtctggggatagggagccgcagctccggatactaggactattcggaatctgcggctcttgtactaccggcgaggccttcgccgtatatgcggcggcttgggcttcggtacgggtgacggctcatcgcctttggatttcaccgccgcgatgactgcggcgattccgacaagcagggagccgatggcttctatcgctttccagacctcatccatgtctcacctccttccactgttccgtttttgtttacataataattatagctcaactaagtaagttatgcaagtcagaacggcaaagatctggatgtgcctattcgaatgttctccattactcgcacatggtgtaacaagtgcatgtaaaaccggtagaaaatcaggataatgataagacgacaaggaagcgtctggccgttgtttttgcgtcggacgccagccggaaaaagtggagatgaattttagaataataaccagtagaattgttaactatgagtcaatttcgcgtgggagcctatatagatggctttaatctgtattacggaatgcgttcgcatatggggcgttcgacgcctgaatggcgatggcttgacatacgtggaatgctacagccgtatgcgcagtattgggatcccaacgcctctctgacggtggtctattgcaccgctcgtgtgaacgcctcttcctcgcagtcggcggcgattgaccagaatttctatctgaaagcattgcgtgcgtctggttcggtagatgaaatcgttttggggcattacgtagttcgcagcaattatgccttcatggttgataagttatcacgcagccgagtgcctcaactgctgagcgtaacggcgcagcagttcagcaggataatgccacgcggtccacagaattggcccatctcactccggaatggccatgtcggagtggatatacaacgaattgaggagaagggctccgatgtaaatgtggcttcaagactgttgcgcgacatgtacgagaacacaatcgatgcagctctcgttctgactaacgactccgatctgtcggaacccatacgcattgcgcgagaacgtatacctgttggagtgttgaatccccataaagggccgatcgcgggcagtctgaaaccattccgtaatgcgcagaacagaattggcagctggaacaaagctctctctccagccgattttaaagctcaccaactgcccgatgaagtcaacggaatggtcgacggaaaatacgtgtttgcgcgtaagccagcagaatggtgacatgctggaatacttgacgacatacgcctaccaaggtatatttaccactgtacccaccccgattgccactggcgacggggttttttcatgcccgatcgatcggcagacaaaggcgaaccatcggtatggtcatgttccgtattctggcaatcggagtatggatattcgccctgctgattttcgttggcggattgagcaccgatttcctgacatgcacaatagtcgcgctgatcatcgcattgaataccctgattccgtcaagccaaagccccggcgcccgcagagagcgatcggggcgattccgtatatacggcggtagaatctaatcaagccgcatcgagacggccgagagaacaacgaggttgggggcatgatgccggaacgagagaacgggaaaatgggcaaaatcgtgaaatgggtcaaagataatggtctggccttcgcacgcgaaatggccggtcggcatgacgacgatatgagcaacgaaggggcgagtcgccaatttcgccgtgatatggaacgagccaccgcggcattcgccgagcttggcgcagacaagcagaaaatgtacgaactgctccgtaaatggttcggagtggacagcatggaagaagcggactcctacatcagggacggagcccagtccgaataccccatgacactgctcgaagaatacctgaaacatgaaggacacgagacaatagacataatcagattcaagaaagaccacaacgtagcggagagactcagacgagacccgtcactgtcaagcctcaccccagaacaactcaaacaacgaatggagcagaacaaataaaaacgtctccagcgctcgcctgtcgaacggtagaatctaaatatgtcgcatagaggcggctgagagaacgaggggcgttgagctcggcagccatctggtggagttcaccgtcatacatgcgttactcatggtgccacatccgtatcattttgcgacacgcgcgggcgacctgaatgagccgaacttatgcacattttggccgaaaatgtgcataagttcatcaaaagtgtgtaaattgagcatacggagacgtgatgacaagccgaaaggagactgacatgactgcagtggcggtggctccaaaggcccataaaatcggcaagcctgtcatgctggacagcgaggaaatccgaaagcgcaggaatgtcctcgaaggcaagtacggcactcgtgaacagctttctcagaagcgcgacctcatcggacttactctcgaggagcgcatcgcattgtacgacctcgaggatctcgacttcctagagggccgatgagcacggaatccgaccagaccgaggaacaggccatcgatttcgcccagagactcgagaacatgctcactgaggttctcggccaaccgtcggacgggcaatacaccgccgacccgcagggcgcgcgcaaaaaacgcagcgccagctatctgatcaagacgcgggatccgcaaggcatttctctcaccgtgggcggcagcaccatactccgcctctcgtaccgttaccaatgctcctgccgcgactcgaattcatacctccaagtggatgagtctgcgatcacgctgcgagccgaaagcgaccccgcacccatcatccactacgattacgtgcgcgacccccatagcgccattcccgcggcccacatcaacattcacgccagcaacgacagcgccacgaaagcgatgctcgcatgcggcagcaaaagccagggcaagaacagacgaaaagcgttccttgaaaaaggaaccttccccacattctcctccctccacttcccggtaggaggagaccgattccgccccggactcgaagacgtcctacaaatggcaatctacgaattcggcatcgacgcacagccgcaatggcagcaagccatcgaacagagccgggccgaataccgcacccgccaaatcagcgcccttgtatgcgaattcccggacatcgcataccaagccctctcgcaaaacggatacctcgacagcggcacaccgccacaacgacccgaacgagaagacaccaaaagtcgactcaccaaatactgacgccaaaccgccccggcgctcgcaaagagcggccggggcgattccgtatatacggcgcttgaatctaatcaagccgcatcgagtcggccgaacgaacaacgaggttggaggcatgatacccagagaacacaaaggggccagcgtactggccgacagaaaagattacgtagccttggacctcgaaaccacgggatatgacccacgattggacgaaataatcgaaatcggtgccatcaaagtccgaaacgggcaacccatcgaccggtacggacaactcatcaaccctggtcgccatatcccgaatatcgttaccgaaatccatggaatcgacgacggcatggtaaaaaacgcgccaacgctcgccgacgtgctctccgaattccttgactggatgggcgacggcctgattctcggccacaacgtcaacttcgacatcaatttcctctatgacaacgccgaagatatctgtggcaagtatgtcggcaacgacttcatcgacaccctccggctcgccagatacctctaccccgaagaacgtcacaaccgactgcaagacctcatcgtcagattcgatatcgccgaagaccaagagcatagagcgctcgccgatgtggaacagaccatcgcgtgctatcggtggatgattcggcacatgaatgagaacggtattcccttcccggccggagatggccgcagccgcagaggcttatcttcgctattccgtggcggagatcaactgctgcagatagccccacaggacgaagtcacccctgatcccgcattcgaaaacctcacattcgtattcaccggcgcactcaagaaaatgacccgcgccaacgcacaacaggccgtcaccaacctcggtggcatcaacggtaaaaccgtcaccaaagacaccaactacctcatcaccggcagcaccgactacaatgccgccctcaaaggctccaaaagcagcaaatggctcaaggccgaaaaactccaactcgccggacaagacctcaacatcatcagcgaagacgtgttctacgacatgctgggggacagcatcgcccaagcaccaacgcaaagccaactgaaattcaaaatcacgcaaccagcttgcaaaaagattctggaaatacccagcggaaacctagatgcggaagaagtcagcgtattggccgtcgatgacagaactaagcccagcatcgttttgaaaactcaggacggcgaaattctcgcagaattcagctccagaatgaaagcgtatgaaaccatcgccgccctgaacggtagaacaatagaattaaccgcaaccaagcacgatgaattcgggtctgccccatacttcaacgcaaaagcaaaaatcattcgatagggcaaacagtcacaaacgccccggcgctcgcagatgagcgaccggggtgttttttgtttattcttacaagaattctagtttctgatatgaaaagccctggcgctcgcagatgtgtggcaggagacgccacggttacggccaaggcggtggcgtgcgtcgctggcgtcatcaggatttcggctgctggcgggtcggactggtcgcctcgatgccgcgcgtggattgtccggaatgcggcgtcgtggtcgcccgggtgccgtgggcggaaccgggcagccggttcacgagggatttcgaggcggagtgcgcgtggctgatgggcgtcgcgaaccggaagaccgtcagcgggttcctgcacgtggcgtggcgcgccgcgggcgacatcgcccgcagggtcgcggatcggctcaggacggcgatgccgtcgccgttcgacgggctgacggcgatcggcgtggacgggaccagccaccgcaaaggccatacgtacatcacggtggtcgtcggccacgagcgtcaccgcgtggtctgggcgcacgacgggtacggcggggacgtgttcgacctgttcttccggcggctcgccgaggagcggaaggcgtccatccgcgtggtcgccggcgacggggcccgctggatcgactcatgcgtcgccgcgcactgcccgaacgccgaacgcgtgctcgacgggttccacatcgtctcctggatgaccggcgcgctcgaccaggtccgcagacgcctgtggaaccaggcgagacgcgccggcaacgaggaggtgaccaagcgcatgcgcggcgtcaagcacgccgtcctgaagaacccggacgacccgaccgaccggcagaacgacgcgctcggcgccatcaggaacacggacccgaagggccggctctaccgcgcctggcagctcaaggaactcctgcgcaccctgctcagacaccccctcgaccaggcgcgcggcgaactcgaccactgggtgttccgggcctcgcgcagccgcatacccgagatcgtcgaactctccgaaaagatccgacgccgacgccccgacatcctcaggaccatccggccgggctaccccaacgccagactcgaagcatccgacaaccggatcaaggccgccatccgcatggcctacggcttccaccacgtcgacaacctcatcgccctgaccatgctccgatgcggcggactcgacatgcacctaccacaacccgcaatctaacccacgaaaacagcagaagcctccgttattacgaatacacgctataccgcgctagcgtaacggtaatgcctgacgcctggcgtttcactgagttccatgttggtgccaaggactgccgctggatgactcttgatgagatgcttgccgaccccggcatcaacaaaatcaatcatgatgtcgttgcgatggtgcgggataacttgtaattgttgccacttcgggcatatgacgattgagccaaagcatgttctatgtttcgataatcatcaaaagcagagcatagtatgctctacggggatttttctataccctgaaaacaccgaaaatcaggatatagggcagtagcacgaattagccaacagcggtataccaaggaataaggccttttccgcccgcgatgtaacgtagatccgtaccttacgaacctcatatataggatcgcgaccaaagcgtcgctcgcaacaccgcccgcgccatcatcgccagccatcaccagcatcacacaccgctcggtgagtcgtatgtttgcgttcacaaaaattacatgtagtgtgtctccgcgtatgcgtagcggtgtgtgatggtgtgtgatactgcacgcacacggagcagtggcatactgacggtcgttggtaactccgtaccccacgtagcggtggcaaatccgcctccgttcccggatggtgggaacgacacgccccgtcgagaagaaaaggtgcgttatcgcgcgggggggggcgggggtgccgctttccgaaaattccaaggtctttaccaatatcggataagaatcttcccctatccggggggacgcattcgcactttttgattaatagcataacgccttgtacgtgtaacgccaggttctggcgtactcgattgtaagagagacggacaaggctatgaagagaattgcagaatggttcgcagcggtaggagccgcagcgggcaggagaggcaagcggttagtggccgtcgttgccgccgtggcgatgctcggcggcgtcgccggcgtggctggggtaagcgccaccgccatggcggacgatgggaatgcctccacaacacaatcgcagaccaccgatgagaaggcggccgccagcgtgcctgttcctctttccgctgagggaacaaacggtgtgccagatgatccgacgttgtctgctccggcccgcgagaagaccgttaccgccaatggagacggcacatacaaggtggcattgaacgtcaccggtgcgaagagcgcgggtacgggcgagattgtgacgaaccagccgctcgacatcgtgctggtgctggatgtgtccggctcgatggccgaaaagattgcttggaaccagcctacgaagattgactcgctcaagaccgcggtcaataacttcatcaaggcgacggccgacgagaacgcgaagattaccgaccagagccagcagaaccgcatcgcgttggtgaagtttgccggtactgcttccgataatgtgggtaacgacacttattgggatcatcgttggagacagcgctataacaactcccagattgtgacaaatctgacgtcgaatcttaatggtctgacaagtacagtcgactcgctgaacgctgcgggagccacgcaggctgactacggttttcagaaagctcgagtcgcactgcagaacgcgcgcaccgatgcgaaaaaggttattatcttcttcacggacggacaaccgacgagtagtaatgagttcgaggattcggttgcaaatggtgcggtgaaaaacgcgaaggcgcttaaggatgcgggagcaaccgtctactccatcggagtgttcggcgacgcgaacccgaacaacacgtcaaccaactggaacaatcgctttaacgcctatatgcacgctgtctccagtaactatccgaatgccacggcgtggaacaggcttggcaatcgcgccgacaacagcagctactacaaggccgccacggatgccgaccagctgaacaacatcttcgagtccatccgccaggagatcaccaagacggcagagtacgccgacgtgacgattcacgacaagctgtccagctgggtcgtgagctccgacggcgcctccgcgaatggaaagcccgcgggcttcacgtacacgaagacccagcacggccagaccacggcgtgggctggcgccccggaggcgacggttgcggctgatggcaccgtgtcttggccggtcacgtccaacggcggcaagcttgaggacggcgtcacctacacggtgagcttcaatgtcaagccgacgcaggctgcgttcgacgaggctgttaagaaccacaaggacgatgccagtgcctccggcgacaacaacttctacacgaacgacaaccccagcgccaccgtcggctacaggaccgtggtgacctcctcgcagggcggcacgacgacgagcaatccgcagaccgccctctacccgcagaagccgaccatcacccttccggtctccaagatcacggtgacgaagacttggtccgacggcagcgagaatcacgcggatgattccgtgcaggtccagctcaagcaggacggcagggattatgccaatggttcagcaacgctgaatgccgccggcaactggactcacgagtttacggtgtctgccggccctgaggggcacgcatactcggtttccgaggtcaaggttgaaggctatgactccaaggtcgataagactgacctcaagctacaaggtctgaccgcacaatccggtgccttcacggtaaccaacacaccttcttacgtggccttgcccgcttcggatgtcaaggtgacgaaggttgtgcagggacatgctgctaattcggacttcagcttcaacctgaagtgcgtggatagcacggatgcgaatgctggtaagtgtgctgacgttaccggcttggtcaacaatggactgactacgactgtgtccaagggcgaattgactgctagcggcgcgagcgcgacggttggcttcggcaatggggatctgaagttcagggttccgaccggtaacgccacgcagctcgtctacaagttcaatgtgacggaggaccgcaccaatgtcccagctggctggcgttacgacggcagcacgaagacggtgacggtgaccattgccaagaacgatgacggccagtgggcggcgactgtgaacgacaacaacccgacgttcacgaacaagtacatcgctgtttcttccctgccgttaaccggtggtcgttcggcccgtgactggctggtgtatggcggtggcctgggtctgatggccttgttggctgctgcgggttacacggtgtggcgcaagcatcaactcgtctagcccgttcctggctcccctccctgaggggagctggccggcggagccggactgggggcgcaggagacttccctcagaccgaaaagagcaattaaagatttgcggattgcgaagccccttgtgaaaaagggttcttagcctccgtgattgcagaaaacaagtagtaaacaagttaaggaagagagggtttctcatgaagttgaggaagcttttcgcgggcgtcgctgctgcggcgaccctgttgggtggcatggcgttcggtgccgccaccgccaacgcggcggatactgaccaggccacgattacggtgaacaacgcccaggcgggttacacgtacaagggttacaagttcgccacgttcgataacgtccagggcacggccccgaatgccacgtccgtcgaggtgaacaccgtcgccgcgtggaaggacgccgtgtacaacgcggccgacgcggccaacggcgatgctgcggttcccgccgagtacgccgagaacccggccgcgtacgtggccacgttcgatgccgccaccgcccgtaggttcaccgacgagctgacgaagcgcatccccgcgggcgagcagggcactgccgccgtgaacggcgtgatcaccgccaccgagggctggttcctcgtgaccagcacgacagaggagaaggccggcaagtccgctttggttgccacccagatcaccaacggtggcaagacctacacgaagatcacgctgaacaccgaggacggccagcacaacatcgacacgctgggccagttcaacgccaaggacgagaacgtcccgacgccgccgaccaagacggctgacggcaagggcaccgtgaacgtgggcgacaccgtgaactacacgatcaccgccgtcgtcccgcccgcagcagccggctacgacacctacaagtacaccatcaccgatgccgcatccaagggcctcaacgtggccgaggacaacgccaacttcacggtcgtcgtcaagaaaggcaacgccgacggcaccgacaagaccctggccaaggacaccgactacacgctgacccagaacggttccgcctccgacgagaacggcaccgtgacgaccatcgcgttcccgaacgtgaaggactacgccggcaagaccatccaggtgacctaccagggcgtcgtgacctctgacgccgtcgaccaggtgaccaacacggccaccgtgaagaacaataacgaccagaccggcgaaggcacgactgtcgtcaagaagctcggcaagttcgacttcaccaagatcggtgtcggcaacgacgccacgggcctggccggtgccgagttcaaggtttccgccgataacggcaagaccttcatcaagttctcccaggacgccaacggcgtctactacccggacgccaccaacggtagcgagaccctgacctcagccgacggcaagggagcacagaagacccttggcaaggtcgctgtccgcggcctcgccgaaggcgtctacaccgttcaggagaccaaggccccgaccggttacgccgagaacttcaaggtcaccttcaccgtgaccatcggcaagaacggcggcgagggcactctgaccgttgacaatctccatcaggtcaacacgaccgacaagacggtcttgaacgtcaagtccatcacccagctgccgctcaccggtgccgccggtaccatgctgttcaccgtggtcgccgtgctcctcgccggtgttgccgcgaccgtgttcgccaagtcccgctccaccaagcgcgcactcaacgtgtgaatcgagagcaatgaacgcgtggtctaattcatcagtgaattgaccccaattggaagcgagtgaagtgccaacttcgctcgcctccttttttcttagactttcaaattcgacataaccagaatcaaaggtgcagcatggcaatggatcctattacttcttcattgttgagcgatttcatcgctagcagtggtttggaacatgaaacggatataacccgccagtttgaatacttcgcgaactattgtgtggttaccaacagcagcccttcaagcgacttcgaatatacggatatcgcaacgggtgacaatgctccgggaatcgatggcatggccatcatggtgaacaatcagctggtctccagcactgaggatatagatagtctcatcaacgccaacgggcatatcactgtgcggtttattgccatctcggtcaaaacgactgccggattcaataccgggttcatcagcaatctattcagcaacgtgcagttgttctttggggacaaccccggagcgacgttcaatacgccggagatggagaatttcctcgaacttaaggactacatatacagcaccgcaatcgtcaagagatttacccgtaatcccgatctcctcgtatcactggtgacattggggtcatgggatgacagcaatgaacagttcagagcgctggtcggccagtactgtcaatctttgcaaagtacgatgctgttcaaccgtgttgactttcgtccgtatggagccgctcagattcagatgctatatcgcaaggccgtggcaaaaatcgagaatgccgtgactttcgacagggccttgatcatgtatgacgataacgacaagggcgaagaatccggatatataggtgtgctgccgttcggagagtatcgcaaattgttgttgaatgatgacggcaatgtgcttcccgtctttgaagacaatgtccgtgggtatctcggcgacgataacgaagtgaacagcgctatcgctaaatccatcactgaaggtgatgcgaatgcattttgccagaaaaacaacggtgtgaccatcgtggcttcctccgttaagagaaccggcaaccagttcgttatcagcgattaccagattgtcaatggttgccaaaccagcaataccttgattgtcaaccgagacaaaccaaatatcgataaactacttatccctattcgcctcattgtgacgaaggatgagtcgttgaaaatcgaaattactagagccaccaacagccagaacgccgtcaagcgtgagcagttggagtctctgtccggtttccagaggaaacttgagcagtattacggcggcatgagcaacagcttcgggaaagatgcgctggtatatcagaggcgtgaagggcaatatcggggtacggaatatcagaattcacccttgctggttactatcgcacaacaaatcaaggcatatgccgcaatgtatgtatcaaaaccacatgaggtgtccggacgatacggtgtggttctgcgcaagatgggtaaatccatcttccaagatactgattcactcgctccctactatttaagtgtgttggcgctgaagaaattcgaagcattacttgggaatggtatcgatcgccgataccgtaagtgccggtatcatgtgctgatgctgatgcgtacggtaatcgacatgcagttctccggcataaagccgaagaagcgtcgggagggaagcgacgcgatgattacggccatcctgcaggatcccacggcctctcttcgttgcttccgccatattgtcgactacatcgcgagccaagcggaagatatcgagtttgataatcgaaaatgcttcgaacgcaaagagacaacggagaaactgttgaagtctgagcgtttggccaaactcgaaaaggcgattcgcgaggattcggctatcgctggttgtgcagctcgataacggcatggcattcggctgattccccgttatagatgatgacttctgttgacggcttgcaatgaggccactatgccaatggcaatctgatgtctgatggttgggtgacataccgtttgatgtgtagggcaagatgacctggcgcagatttttttcggcggcctcgctcggcaacgagcgaggccagtttattgttctcgactacccaatttctgtgtcatggtacgtaaaacttgtgttattgacgcaaaaacttgttccatccgaaatttcggagccaccgtcatctaccggccaccggttcacgtaagaaaagcggcatatgttgcaccttcccgcaagggtgataatagggggagtgccggcaatgaggcaaggagcagtttatcggggatgaaacctaccctactaggggttagaaaagcccgtataacaagtactatcatcccaagctatgacatgcccccatattcaagggggtgcgaacgaaccttccagagagtgcaggagatgaaaatgactgtcggtggagggagctttagccccgaagagatcaagtacctgaagtcattgccggcggtggcggaagccacttcgaaacgcattacctacactgacgactttaaacggtatttcttgacccgttataacaaaggtgcctcgccggtgcgattgttccgtgaggccgggctcgatcccgccctgatcgggtacaagcgcatcgaacgttgtcttgcccgctggcgcgaggcacaggatgagatcctgggtgccgaagcgtcggaacccgcccagccttggggggggggtatctcatttgaggctttatcgatcgggaaccgctggaacgtcagatacttcgaacgagtggcgcgaggcggagagtgccgcgattacggcgaaagccggcagcgaatccgatttctacgtatcccccgaacgccgcgccatcatcttccccatctcccgcaaagagcagaacaacgatttacgtgacctgctgatcgcacagcaagtacgtcgtatcgatgagctggagcggcaggtcgatatgcttgaggctttgctgcatagcgggcgacgggggagcagggcatcatctttctcgcttccgaaacgcgaatcgggcgagcggggcttgtctgcgggcaataatgacgttgctcccacggattcggataaggagaatcgtagcgaggatcatggtgagggccatggcgagtaatcgatcgtatcggagacttgcccaacacgcacgctaagatgggcatcgcaataatcggcaatgagcaggtaatcggcgaggcggtgcatggagcaggaatccaacgagcaagaacctaacgaggcgacggaaatcgtaggcggcaaagtagagaccgtcgaggtttccaagcaccccgaggcttccatacccgagaccgatttgtctctggcggatatcgagcgccgtcgttcgcatccgttgcgttgggcgctgattattcttgccgtactgtgcgccatcatcgcgccgtactggttcggccgttcgttggcggtaaataatactgactccattgtggccgtgctcgggggagtgtctccgcaaggcatcgcactggtcggttgggtgaccgtggtgattgcgtacgtcggattggcgatggcggtggtcgtctcgccgtcctggccgtggttgatcgtgttcgtgatcgggttggccggcgagcagttcatcgcgggactcagtatgctcaatctcaatttctggtattccacgtacgtggtctacggtaagcaggccggcctggcgaatgccgcgaatctgggcattatgggtgcggcgatcggcatcgccgtatatgccctgatgttcgtgggtctgctggtgattatccggaagacctcaccactgaacgtactgaccaaaagctgggcaagtttcattctgtacttcgtgattgaaaccatcgccctgctcgtggtgttgtttggcggattgctcaccactgtgtgagcgcgtgtgccccagtccggcccctgccgtatagttttcgtttggcgtaatttcgcccgcggatagagagcgtttcgagcgaacctgcacgaaacaccgcgcaacgacacaataaggaggacgccgtggcactgacggctgacgagaagacccagattatcaacgagtacgcgacgcacgaaggtgacaccggttcccccgaggtccaggtggctctgctgtccaagcgtatcgccgacctgaccgagcacctcaaggagcacaagcacgaccaccactcccgtcgtggtatgcagctgatgatcggtgaccgtcgtcgcctgcttgactacctcaagcgcgtcgacatcgagcgttaccgttccctcatcgagcgtctgggtctgcgtcgataattgaagacttccgcccgagtacctaggatggtgctcgggcgttttacatatcgccagccaacggcaacaacggcaagagggttagaggataggccagcaggtaaggccgacaggagaacccgaatgaaggggttgacacgaggaacgacggccacggggccagtcgaaacaaggtatgtgacgtccgctgaagaggacagttgcggttcaagcgagtcgccaaaccgcagcacagtatgtaggaataattagaaaattaaagaaggaggaaccctatggagggtcccgaaatcaaggccgttgaggccgtgatcgacaatggatcgtttggcaagcgcacgctgcgcttcgagaccggccgcctcgcccagcaggccgatggcgctgtggccgcctacctcgacgacgattccatgattctgtccaccaccaccgccggttccagcccgaaggagaactacgacttcttcccgctgaccgtcgatgttgaagagaagatgtacgccgccggcaagattccaggctcgttcttccgccgtgaaggccgtccgagctccgaggccatcctcgcctgccgcatcatcgaccgcccgctgcgcccgctgttcccgcacaccctgcgcaacgaagtgcaggtcgtcgagaccgtgctcgccgtgaaccctgatgacgcttacgatgtcatcgccctgaacgccgcttccgcctccaccatgatctccggcctgccgttcgaaggcccggtctccggtgtgcgtctggcgctgatcgacggccagtgggtcgccttcccgcgttggagcgagcgtgagcgcgccgtgttcgagatcgtggtcgccggtcgtgtggtcgagaacggtgacgtcgccatcgccatgatcgaggccggtgccggcaagaacgcctggcacctcatctatgacgagggtcagaccaagcccgatgaggaggtcgtggccggtggtcttgaagccgccaagccgttcatcaaggtgatttgcgaggctcaggacgagctcaagaagatcgccgccaaggagaccaaggaattccagctcttcccggagtacaccgacgaactgtacgcccgcatcgacgagatcgcccatcaggatctgaacgaggcgctctccatcgccgagaagctgccgcgccaggaccgcatccacgagatcaaggagcacgtgcgcgaggtgctcgcggacgagttcaccgacatggacgacgccgagaaggacaaggaactgggcaacgccttcaaggaactgcagcgccagatcgtgcgtcgccgcatcctgaccgaggactaccgcatcgacggccgtggcctgcgcgacatccgcaccctgtccgccgaggtggacattgtgcctcgcgtgcacggttccgccctgttccagcgtggcgagacccagattctgggcgtcaccaccctgaacatgctcaagatggagcagcagatcgacgcgctgtccggtccgcagtccaagcgctacatgcacaactacgagatgccgccgtactccactggtgagaccggccgcgtcggctccccgaagcgccgcgaaatcggccacggcgccctcgctgagaaggctctcgtgccggtgctgccgagccgtgaagagttcccctacgccatccgccaggtctccgaggccattggttccaacggttccacttcgatgggttccgtgtgcgcctccacgctgagccttttggctgccggcgtgccgctgaaggccccggttgccggcatcgccatgggcctcgtgtccggcgacgttgatggcaagcacatcttcaagaccctcaccgatatcctgggtgccgaggatgccttcggcgacatggacttcaaggtggccggtacttccgagttcatcactgccctgcagctcgacaccaagctcgacggcatccccgccgacatcctggccgccgctttgcagcaggccaaggaagcccgcgccacgattctcgaggtcatcaacgagtgcattgacggcccggccgagatgagcgagttcgctccgcgcatcatcaccacctccgtcccggttgagaagatcggcgaagtcatcgggccgaagggcaagatgatcaaccagattcaggaagataccggcgctgaaatcgccatcgaggatgacggtaccgtcttcatctcctccgagggtggcgaggccgctaagaaggccaagtccatcatcgattccatcgccaacccgcacgtgcccgaggccggcgaaacctacaacggcaaggtcgtcaagaccacgtcgttcggcgctttcgtgaacctcacccccggcaccgacggcctgctgcacatctcccagatccgcaacctggccaacggcgagcgtattgacgccgtcgaagacgtgctcaaggaaggcgacaccgttgaggtgatcgttcagggtgtcgatgatcgcggcaagatctccctggccatccctggtttcgaggatcaggagaacaacgcccgcccgagccgtggcgatcgcgatgaccgccgtggcggccgtggccgtggtgaccgtgacgatcgccgtggcggccgtggccgtggtgaccgtgacgatcgccgtggcagccgtggccgtcgctccgatcgcgatgaccgtgacttcgacgatcgtgacgaccgtccgcgtcgccgtcgctccgatgacttcgaggatgattacgacgaccgtccgcgtcgccgtcgctccgatgaccgtgacttcgatcgcgatgatcgcgatgatgatcgtccgcgtcgccgtcgttctgccgaccgtgacttcgacgatcgcgatgaccgtgatgctcgcgactcccgagatgatgatcgtccgcgtcgccgtcgctcttccgatcgcgatgaccgtggcgatcgtgatgaccgccgtggcggtttccgtggcggccgtggccgtggctcggaccgcaacccgcgctacgccaccgacgacaactacgacgactaccgcgccgaccgcgaagagcgcactgagcgcccgcgtcgccgcgtccgtcgcgactttgatccgttcgaggactaaagccctctcacggatcggtcgcggcatagccgccccccctcacctacgggaagcccgcagggcttcccgcttaacggttcggcattcgaggactgatcgttctctagcttctctcgggtgagaagagcttaatcgcaaaccaaaaggcttctataccgtttcattcggtatagaagccttttggtttttcggcttcttcgcgctacatatttcgatgttgaatagggcactcgtgctgctgccatgtacattcagttgtcagttgacaactattctcatgcatcaagaatggcggaaaacagccattaagatgattggagccacgctaaaaagcgttgacaactgacaacagtttgtacacggcaccgcatggcacctatcctgttgctcacgaccggatctattctctcgtctgttgttatgcccaacagcaaaatccgcttgccgtgccgcgccatgtccgagtcatggccagccgttgattgaatggcggatgatcatcgaaggtactcatgggcgttgatcactgtggcaacaacaaaggccgggcccttgtgagagcccggcctttatgccgtatggcggcggattaatccttaaaggctaatccgttgtcaatcagcgttacagaatcgccatgcacacgaagtccagaatgaacagcgcggccacaatccagatgatcgggtgaacctccttggccttgcccttgcaggtcttcacgatgcagtacatgatgaagccgccggcgatgccgtaggagatggagtaggagaaggccatgaacacggctgcgaagaacgccgggatggcttcggcgatgtcgtcccacttgacttccttcagggaagcggccatcatgcagccgacgatcaccagcacgccggcggttgcggcggacggcacggcggagacgaccggggccaggaacgcggacagggcgaagcagatcgccacaaccacggaggtcaggccggtgcggccgcctgcggcgatgccggcggaagactcgacgtaggtggtggtgttcgaggtgccgcagatagcgccaatggaggtggcgatggagtcggcgaacagggccttgtccatcttggaggagaagccgtggccgttctccagagccttctcatcctcggcggagaagatgccggtgcggcggccggtgccgatgaaagtgcccagggtgtcgaacgtatcggacatggagaaggcgaagatggtcacgatgaccagaggcagcttggagacgtcggagaacagcgccgggaagccctcagcggagaagatcgcgccgaaggtctgcggcagctgggagaaggtttcgctgatagactgcgagttggaccaggtggtaacgccgaacgggatgccgatcacggtggtgatggcgatggccagcagcatgccgcccttaaccttcatcacggtgaacacaatggccagtacgaggccgatcaggaagacccacagcaccttgtcgttgaagtcggccagactcggggtcgccgccacggcgcctcccttggccgcggctttcgggtcgccgggggtgaacttgatcagtccgacgttcagcatgcccacataggccacgaacaggccgatgccgccgccgatggcgtgttgcagggactccgggatggccatgatgatcatcttgcggatcttggtgacggtgatgaggatgttgatcaggccgcacaggaacaccatgcacatggtctgctgccagctgaagccgaggccgaagcacacggtgtaggtgaagaacgcgttgaggcccatgccggcggcctgggcgtacggcacattggcgaacaggcccatgaccagggtgccgatgatggccgcgatgatggtggccaggaacacgccgccccacggcatacccgtctgcgacaggatctgcgggttgacgacgatgatgtaggccatcgcgaagaacgtggtcaggccggccagaatctcagtcgagacggtcgtgccgttttccttcaaatggaagaacttctccatttactctctacttccttggttttatgcggggctgcgcaccgcgcgcataatgctgcggctggccccggcgagaattgcgactcgccctgatcggcctgcccaacgcgcgtcaggtgttgcgcacccaatcagaaccgtggccgattatagcttgtggaggtaacgtgaacgggtccgggagtagactgactgccagaataattcggaacaactcagggacacgcagggcacacccgtggaaggaaggcgcgcgatgaaaccggccgtcgaagtcagcatcacctcttggaagaagaatgtcgtcaagcccggtcaggagtacggccgcgtactgctgatgcctggcaccggctacaactgcgaccgtccgctgctctactggtcggcccaggctctggtcgaggccggctggcgaatcgaccgcatgaacgtacgcaacgcttccgacgacctgtccacggtgattccggtcctcaatcaggcgattgacggctggatggccgccgcgcgcgagtccggcgcgggtaaagccggtgattccggggatggcgttgccgccgatgattctgctaccgtgctggccgatggcgcagctggctcgccgaaccgtgattccgacaccccgtccggccctcgcctgttgctgatcggcaagtcgctgacgacgatgacctacccacatgtggcctcacactacggtctgccgttcgtgctgctgaccccggtgctgcatcacgccgacttcgatccatccgcccgggtgattccggtgccggctgtcggcgatgatatcgtcgccgaatccgaggctccgagcgtggccgaagcaagggcgatcatccgcgcagaactggccgaccagtcgcacgccgccagctcccgatactccggcccggcaccgctgatctgcgccggcaccgccgacccgttctacgatcgagcccgcgccaacgcgctcaccccgcacgtgcacgaatacccggatgccaaccattcgatcgaggtgcccggccactggcgtcgctcgctcgactatctgaaggaagtcaccgcgtccgtagcccagtacgccgccacgttgtaatgccttgcgacacgcccgaattctgcaatgtcgctgaccatccgtaatctaatcatccgtaaaccacagaccgttggttgaagtgcgcgcgagtgcatttccgaagtttggttcgccaagccagcgcaggttgagagatataagcccgtcaagggccggcgaaggtcgcttcgcgagattatattgctctgcctgtgcgcagggcttttttgttgcccggccgaaagttccgaactccaagtcaacggccgacttaggaaggaacgccatgaagaggcccgaaaaggaagcggtagtcgctcagcttacggaagaattccgtaacgctgacgccgtctacctgaccgagtaccgcgggcttaccgttccgcagatttccgatctgcgtgaaaagctaggccgcgatacttcctacaccgtggcaaagaacacgctggcacgcatcgccgccaaggaagcgggcatcgagggtctcgacgagattctctccggcccgaccgccatcaccttcgtgaagggcgacttcatcgaggctgcgaaggtcatccgtgacttcgccaaggacaacaaggctcttgtcatcaagggtgccgccgctgacggcactgtctacgatgccgagggcgccaagaagctggcagacctcaagtcccgcccgcagctgcttgccgaattcgccggcgacatcaaggcatcgatggccaaggccgcgtacctgttcaacgccctgcctaccaaggctgtgcgtacgatcgacgccctgcgcgaaaagcaggagaaggctgcctgatttacgccctcacggcatgaatcagtcgcttcgataatttaaacaataaggtttattaggcagcggatctaccacttcgtccgccgccaagattgaaaggaagccataatggctaagtacaccaacgatgagctgctggaagccttcggcgagatgaccctggtcgagctctccgagttcgtgaaggccttcgaggagaagttcgacgtcgaggctgccgctccgg

SEQ ID NO: 61 - DNA, 45844 bp, Unknown
  R206_24m  MAG No. k141_1056
accggttcaaatccggttgggggtacgacgaacaactcttcggagttgctacgccaagccaaattggggtgtggtgtaattggcaacacagctgattctggttcagccattcttggttcgagtccaggcaccccagccaataaccctcgcggattagcgagggttttttgtttttacacgtcctgctcatgagatacggccgagagggtaatcctgaatagacaactctggggcaaagactgggctatagtcccaatccgtgactcaaaaacggcagaaatcccgcgtccgaacgtaaggggcgcgggatttctgccgtttcgggccgtgcaggaccggccgacatcgcgcgttgccgcgacttgagcgctgtccgatcctgaaaacgtgagggagaccgacctcgtcttacttcttgaccgcgttgacggcgtcaacagccttctgcagcgacgtggtgtgctcgtggtaccacgtgacctgctgttcgagtttcttggtcgcggcctggtagcccttggtgtcgtcggccacgcagccttcgtacgtcggcagttccacggtcagttccttggacagcgcgtcgagagcggaggcgtccgagacgtctgccttggtcagagcggcggcttctgcagcatcgccattgaccaagttgttgtagtcgttggtggtgttacgtacgtcttccgaggcggcggcgcaggcggccactgcgctatcgtactgagacgcgctgtatgcgcgggcgccgaacaccgcgaccgcggcgataatcgccaccgccacgatggcaatcactatagcgacccacttcgtcactcgcttgttgtgcggctgtgccgtcgcttctgcttggttctgggattctggctggttgccgttcgcctgctgtgcgtcagtcatatttacctctacttctcactgcctctgtttgtatcttgcggagggcctgtttcaaacaacgggtatccaacatatcgaggagagccgagattgccgggcgtttcctactggttgcgctgtggcgtggccgtttttgtctcatatggcgaaagtatgcgccagaggctattgccggccggtgacccacggcgcatccgaatggacgtgcggaatcatcatcgcgatgaccgccagcagacacccgagcatcaccatcaagatgatgttctcgtgtccgtgcgcccgcagaagcgcgccggtcagcgcgccagacgccagcgccagcattacgaccgcacgccgcccgagcttcgactgctggtggccgtgtgccgaagcgtctgcgacgacgccggtcagcgtcatcgtgagcacggtggtgggcaggtccggcaccgacagcttgcgggcggtggagttctggatgcccattgccggggcgagcagcacgatcagcaggatgatgtgcaggtcgatgtgccgtgcggtggggaagttcaggctcggctgtgaggcctgtgaggcctgggtggtctgtgcaagccgtgcaatcgaggagacgccggacgcatcgtctgcggggccggtgatgagctggttcaaaagatagacgccgattagcgcggcgagtacgaacgacgcctgcacgcaggtagaaaccaacagatgcttggcccggttctcctcgaatcgccggatgatgcgcccgccgataagcgcgccgaccatgaaggagacgagcgtcagcgccgacgtccaccagacgaagccttgggcatgggcgatcgaaaacccaagaaacacgatgttgccggtcacgttggccacgaacacatgccccagcgacaggtagctcagcgcgtccaccagcccggcgacgaacgtcagcaccaccaaggcgggggagagcagaccgtatctgtcttccttgcggggaaccaacgtgcgtcctgcttcggcaagatgtgatgtcatggttgcgacgaggctccttttcgggattgaaattatggcgagaacgtgcgtcggtcgacgccgccactctactccctactcccgtacggttcctccggtttccgctcgtgcgcagatcgtcgggacggagaagacgccggtgatgcagatcgatgtgccgaaatcccgcagcgtggtctcgaccaagtcgggcaaggtgttgcgacgccgtatgaaggtggatggtacgccggagagcgtgccgatgtacccgtacgagatcgccacgcgcctgtccgatttgggacgtttggacttttccgcgcagccggtgccggatgcgacccgtgatgatttcgatccccttgaacgcgaccgtctgcgccggattatcggcacctaccaatccagtgaccgtaatttgttggaactgaccgatgaggagctggagaaatccctgcaattgacggtgaccgtcgatggcaagaccatgccggcgctgaccggtttgctgctgctgggcaagggggagtctctgaaacgtttcgttccgactcatcgggcgtctttccaagtcatgtctggtacggatatcaaagtcaaccaagactatgccggaccgttgctgaagaccatcgagcaaatcaacgacatgttctctccttggaatccaagcgtcgagctatccgtcggtctgttctcaatgatggtgccggaattcgaccatcgggcgttccgagaggcgctggtgaacgccttcggccatcgtgactacaccctgctgggacgtgtgcgcgtgcagttggatgatgcggggcttaccatcgccaatcccggcgggttcgtggagggcatcaacatccataatctgcttaccgccgaaccgcatggtcgcaatccctgcctgatggatgcgttgaagcgaaccggtctcgccgaacgtacggggcgcggcatcgatcgcatctgcgaagggtcgctgcactatggacgtcccctgcccgattacacggcgtcgaatgagcgtaacgtgtccgtgtacctgcagcgcagcgcacccgacgtcgaattcgtgcggatgcttgccgaggaacaggagcgcaccggtaagactatgccggtcaacggtctgctgattctgaatatgctcaggaacgaacggcgctgcacgttcgagaccatgaacaagaaactcgatatgagtgagcagcgtctgcgcgctatgctggggcagcttacggaatccggcatgatcaaaggttctggcaacggttctcggcggacatacactttggggtctacggtctaccggcgcaccggcaagaccatcgagtacgtacgtcagacgggcatcgaccgggtgcgatggccggagctcattatgaaattggttgcagagcagaatgatgtcacgcgggcggatgtcatggaactgctgcatgtcgatgcgaaccaggcgtactaccagctgtccaagctcgttaagggtgggaagctgagggtcattggccgtggcaagggggcgcgctatacgatcggtggctttaccgggcgaaagtgatgtgctggcagatgtgcctgtatgggtgctttgtgctgggcatcgtccgaacttgggaagtcgcttcggtacttaggaaggtacctaggaacctaggaagtggtgtgggtaaggttcctaggttcaggtatgcgttcgtgtggcgttcatcggagggggtcagggggaaccttcgcgctgggccgaccggtattcgctgcgatgcgcttgcgatacggaggctgggattgttgcgaaccaaaacgaaaaaactgcgcggagcacacacggggaacgacaccatgggcgctgcgcccgtccccgccagcccatcaccctccacccgcgacgaggttgcgcgaagcgaaagccttcccgaaccatatcgcggcccgaggcgcgccatagttgcaccataagtcagaccaccggcgcgaccggcccgcgaaaacggcggttttccaacgcccccacaagaaaaagataggcgggaagaatagaacaacatgatcgagcgattgaacaaggagatccgccggcgcacccgggtcgtgggcggcttccccgactccaacagcgcgctcatgctcgtctgcgcgcgcatcaggtacgtcaccgcgaacgaatggcccaaccggcgttacctcgacacgtcccggctcgatgacaacctcgtggaagcgaaccggtcatcgcgccatggacgggcatgatccaaagtgcgcgacctttcggacactacccgctaaaatggtgctcaatctaaagacgggagcgtgaggaagatggacagggctgttcagctagtggtcgaacgaatgactggcggtgcgaagctagtgagcgcttccgaggtggaggaacgcttcggcgggaaagaactcccgccgggcttgcgctttgcgtgtccttgttgcatgcgggaagtgatgccagcggcattcggcgatggctataaagtggagcctcactttaggcatagaagaaacgatgatcttgcgcagttctgcgagaactacatgagcggcagtggttccacggaaaatgattaccgcgagccagttattcccctgttcttgcgacggtctagcgaatcggcagaaagatttgtagttgagattgggttttggcgttctggtgagacttttcgaaagtctatgcttggctctgattcgtgggtgactgttgaggagaggaaatatcccctttggcaatttgctaatcccaacttcaaaatacgtattcaaaaactacatcttgcggtaagtgatgaaatccagtttcagggtatgtcctcgaaaacgagcattggaatagtcgagaatgccaagcaggcattcgtctttaatgatgatttcgatggtgatggaggtaaacgagttcgatttcaggattccatcaaatctgacagagattactacgtcgttgcagcgaaggctgtcggtaagcagctcaaaagagcgtttagcaaagtggaacatgtcggtacagtccaaggcgatggagaactgttcgatgtaacccgagtctgcattctagcggattctagaaggcgtgagctagctgagcaggttcttgcttcattcggctattgcctgaccgactatgatagatccgcaaaacttatatggcctccatctgctaacttgtatggagtcgatagcccaatacttcgtgattcgccaatcgtatataagcctcagttccgaacaaatgacgaacaagaagatgatgaggtttcgcttcattccgttggggaacaatatgggttgactgcgtctgacgttggagtgattggagataccggcagggaacttcagacggattgcgaggccggctgcttcttcgtcaagcttgacagatttcacccgtggtcgccctttgcctcagataattcaattatccaatcgttagaactatctgacttggatgagtgcactgtgaatttaagcgagtccaatacagatgggggcaagccatatgttgaaataaacggaagatatcctatacaggcagagatccttacgaggcataatctttcgaaacgattgactgttgatcttaattccgaaaagaacatcattccgcttgattatcggcagataatacggatactcgcttcagcactggcgtttcctaaggaatggcaattgacgatgttggatgcatcgactgcgcatgttgctgatgtgaattgtacctcggaggtcaatcgagctatatcggaacgcagacttatcacggagtttagtctcggctatcgaatcgcggtcaatcgattagaagggaaagactggccctgcggatttgagaaacgcttcacgttgctcgtgaaggaaagggagcggaatggcttggtatagcaatgatgagtggagaccatcactatgtatggtccagtacaaagacaatggcgatcctgataatttctatcggcttgctgattatgaagagcaagacgacgggagcttcatactttcgtggattgatgaggaaaatcgaggagatcggttcgaggacccgtggacactctatagccatgctctgatagataaagttgatctgctggattcagatttcatcattttagattggctgcccaatttctctgatggcaagagtaagccgcgtgtccgtgatttgtcattttctatgcagcaaaggcttaagaagtatgaattatttgaggttgttgactgccgtgatgtgaggggacaagcagaattgcgagcaaaaatgcaggatgggattccatttgcaggtaaatccacagcgcgaattctgtttgtctactcaagcaatgatgataaaagatcggctgaggcggtacttctccgatctagtgatttgaaatatgacgggaggctattttcgctgaagtcgcgaacgcctggaagttcctcaagtgttgacatttatcagcttgattacgacgatatatatagtctgcctctgcagccaacgcaggatgatagatatttgtatatgtcttcaacgcttcctaatccggttgggaaaatgtcaatcagatcatttgaggattatgcagcggactatgtgaaatggttttacgatagggctggcgaaggcttgacgcgagtgcagcgtcgtgaaatttcctccttcgtggaaggggcttttaaggttccggagaggttggaggatttcatcggagctacgcttcccagagaagaactagcagacattgttgattcagttcaacgtattgtgcatcctgagtccgacacaatgtcaaaactggttgcatcggttctggagaatgatgaaacgttcaggaatgagtgccggcaaaagcttctttccgggaatgatcctgaaatgatgtcgcttcgtgccgaaacaaccaggctctctaaagaacgagatgatgctcaatcgtccttgaacgtgcttctacatgagcgggacgtgacccgtcttaaaatcgacgagtgcaagaaggccaagtcttctgccgaagctgaattacataacattgaggagcagaaagaccaattgctgcagcgcctcaatgatgatgtggcgctgaggttgggtttacaggcggtggtgtcgaataaggcgcctcaaagcattacagtggataactctacggctttgatgccctctgcatgcgcgtatgccgccatcgacgggccttcactggtagttaagaatactgtgtctgaggcattcgcggcaaacttgaaacagttgggatacaaagatgctaacggtcaaagcattggcattaaggctttcgctagcggagtgctgtcttcgttatcggcaacgaatatgctagctattgactcctcgtttgctgttgcagtggcgaacgccttgtctgtagcgctcaatggtcaagcggcgatgcatgtctctatcccagaggcctattcagatgccgaagcgattgcaaggcaatgcgaatcgaatacctatcatgtgttggtgttggacaatgtgctagacacattaaacgaggggatgatatttgccctttctagattaagcacgcagataatcttcattcttccgattggggcgaggggtaatcttcgtttactcgccccggaagcttgggagcatgtattttatgtgccgaccgagaactttgcatgtataccagttcggggtctggagaagctaaaaatgtataagagcagcgcgggttgggggccggtcaagccaagtaaagctttgtacgatgatctctctgcaattgagtctgtatcgcagattgttcccattgcatcgtggtatattccgctggcaatcgctgatgtgattgagaaaaccagtgagacggatgactcgtcggaattgttgtctgcagatgaatggctctgccttcatttgctgctggtcgcatatggcagcggcgatcaaaaatcgattgacgattttcgggattcgatgagcgattcccgctggaatgtggatagttttatgcggagactggtggggaatcgcaatgttcgatgaggtccgactggttgacgtgatggctgaaagcctaggcatcaagcgaattaaaggcgagggggaacgtccattcgtgattcgctgcctgtactccgcttgtcgattctgggttgaggcgttttgtcttgatgatggatatggcggaaacgagggaatacgcagacaactcattgccagaagactgcgagcatggcttgtggaagtatccgaaatctaccctgggattctggaatggttcggaaagcagaatggcggtgaagataaccttatcgtcaaacctctttacgagcagaccatcatggtaggggatattatctcggagaatcaggggcggacataccgctgtgctcgtccgcataaagtgccgtatgcgaataacgcctgtgcactcatcggactatgtgatgtttccagtcaggcaatacggaatcaagggattttgtccggaatgatgatttcaatatcgtatcccagcgattccgggcatttcttcaacgaggaaacgtataaccctaagtggtgggatcttcccgacgcgtatagtgcgtgggttcctctggccgatttgccggatgttgagtacttcgatccgtctgccaggaagtggcgtctgcgggagccctcttcatggcggcctgatttcccagagcatgcagaacacgtcttggcaagaacccagggtgcatactccaacgactattacttcgttaagttaagaaaaaacggtcaatgggcgctacaagttgacacagataaggcgctgaacctttccctgcatgtccggaaatcatatggcaagcccctgcaagcgaccatcgaattgctggatgataatcatgcgaaaattagggctccgttcggactactccccgcagaaacgtcacgttggatggactacatgacatggcccgtcagaggactagaggatagggtatatcggataatacgcagagaacttttggaatcggcaatccatatgctgaaagtatgtgagttggagataaaggagagctgaatggccgtgcaaagaagcattgcagccaccgcgcagggactgtctcaaagaatcatccgttacgttgagactgagtatctgggaaagaccccggaactgctggccgcatgcaagcaggaccttgagcagcctggggtgttgtaccagcacccatacctcgaggcgacgcctgcttacaaaattgcggcaggcggtttgtcggctgcttccgttccgcaagacgtaaacagctttctgcgaagcatggccgaggttgggaagggcgtgtttgaccatccctatgttcatcagatcaaggctttggaggatttctggtcaagtaaggatgccttgatctccacaggaacgggatcgggtaagacagaatgtttcatgtggccaatggtgaccaagctggaacatgaggcggccgcatccacaagctggagtcagcgtgcggtcagggtcttggtcctctatcccatgaatgccttggtctcagaccagatgggacgtctccgcaaaatgatcggtgatcataatgggagcttctccacaatatggaggcgttacacgggtcatgtgagaagacctcaattcggtatgtacacgggacgaactccctacgccggcgatggtaggagctccagccgagatagggagtatgcgaagaccctgaaccgtgatttcgttgacctagccgaagccgatgccgtaagcctcatcagctcggggaagtatcctgaaaaggcgaatcttgcggcttatgccgctaatgtcggagcccacgatgatgggtgggaaccggatgatgcagaaatgctcatgcggttcgagatgcaggcgcacaccccggacatcttggtgacaaattattccatgcttcaatacatgctcattcgccgaacggaatcctccatttggaacaatacgagcaaatggctcaaagacaatccgcaggaacgtgtacttgtggtgctcgatgaagcgcacatgtacaaaggcgcagctggtggagaagtagcgctattacttaggcgtctggcggcgaaattgcgcgtaggaatggataggatccagttcatcctcacatccgcgtcgattcccgatgatcatgcgcctgtagagcgattctacgaagatttgaccggaaaatcgtcagagcatcttcgcatcactactggcgagcgcaagattattccggtagggacgattccgatgcttgcaagcgatatagccgactctgtaagtcttttagaactttgcggcggagaatcgtttcagattgcgcagattgccgcctttcttcaactgtgcggtgttagtcccgctccggaaattacctatgaggagattcgcgaacacttaggcaagtgcctacgcgcattggtgccttattcacgcatcgatgtggctctccaagcgcgaacgatgacgctcgaagaactagctgatgaggcgttccccggggaagcaaaggccaaagaagccacggacatagtattgaacctcgcggcgcttgctctagatgctgggaagccgttgcttccaacgagaatgcatatgttcatcagaggtgtccaatcgttgacggcatgtgccgatccagcctgccgccggaagaaacaaaacgaccttccttttggtgtcgtatacatcaatcatgcgccggagacttgtaattgtggcgctaagacgtatgagcttgtcacggatagaaactgcggagcacttttcctgcgtggatacgttcgcacggtcgatggagacttctatttctggaactctcttccggctgaagaaaaatctttccaagagatggatctgttcccgatcggagatgatgaaaggccagatgacctcgacagcggatggttggatgcgatctcaggcaaggtattcagggatgaccataatggacagccacatttcctgcatgtggcgttcgattcaagccgggatcccgaggggacagggatgggttttgcgagttgtcccaagtgtggcggcaaattgacagccagtacgttcgagacgagaggaaacgaaccgttctataacgttgtcgctgagcaatatgccatgcagcccttgtctactgataaggagaagctgagccgtaatcctaatgcgggtaagaaggtcattcttttttccgatagtcgtcaaagtgccgcgagaatcgcattggatcttactgattcctccgatagagatctcatgcgaaaactggtgtgccgagcggcctatgatctgcagacgtggggtgaagaagaggacgaacgagtcaatctgaaaatgctttacccggcgttcttaaagaccgtttacgagcaccgtgctcacatattctatggtgattcacgtcgacaagttgatgatcgcatccatgatgtaaaagatgagcttgaagacggcgattacgattacagctctgattcaatcggtggggagattcctgacgaatatcgatggctccttcttgccgttctttgcgacagatacagatcattgagcgacatgactatcggctggatagctcccacgagagctgcgaagcgaagggcggcgaaggcgttaaagggtattctttccccagaggaatttgagtctgtgttctatgcgtggagcgagtatctcttggtgcggcgagttgcactggacgtaagcatacccaaaaggctgcgagacaaagcagtgccgtacgtgtctgactatggcgtaaaggaagataatccgttccaggggcaaaggagcgggcatgctccattgcagaagcttctcgttgacagacttggagaagacaagttcctcgcgctctccgagcagcttgggaaattcttagagtcttccagcgcaggtggttttaaattcctcgaccccgccaaaattttcttacgcatcgagccggatacagagtggaagacttgccaaaggtgtggaaagaatgcgccttatgatttgtggggtaagtgtcctcgatgccatctgggtgatatgaagcccattgtctctttcgattccgttgatttctggcgccagcccattctcggtattcttcatggtgatgatgattctcttcgttcaagaattaacacggaggaacataccgcccagttgtcccacaaagaccaagagggagatagttggtccacgaccgaagaatacgaaatgcgcttccaagacatctttgtgaaggacatgtccgagccagtggatgtactcagctgcacgacaaccatggaggtcggcatagatatcgggtccttgactgcggtcggtttgcgcaacatacctccgatgagggagaactatcagcaacgtgcaggacgtgctgggcgcaggggttcatcgatttcaacgattcttacatatgtcgattcgaggccattcgacgtgcactactttgaacatccagagaaaatagttcgaggggagctccgagagccgaatatcgatgtcaataactcaaaactgcttcgacggcatctggctacgattgtgttcacggactatggcgatgccgttggctgttcaatcgagcggcttccagtgacggagttcgttgaggaaagatggaatgatttcgcgcaattccttgatgaatataatttcgcagaagcacaaagaagcgaccttatccccaaggggctcctctttgatcaagctttgttcaaagataggctgaagcgtgaactagagtctttccggaatgattattttcagaaccgggaaaactatctcaaagttggtgggaaggaagataagagccttctggactgcctgttggagaacgccattctgccgacgtattcgttcccgaggaatgtggttggctttgatattgaaaaaccatatggcaggggagaattggaacagcgccccgaacgttcgctggatatggccattagcgaatatgctccgggccgagatcttgttgtaaacaagaaaagatatgtctcgggtggaatctattcgcatgcttcaaaatatgcgaaacgagatgaggggacggaatcgtttcagccggcaaagaagtattttgccagcaatgattatttcaaggaactgcttctgtgctcgaatccgacttgtaagtggtttggtttcgagtctgagctgcaagtatctgattgttgtcccttctgtggagagaaggagctgaaaagaaaccaatttctcaagccttggggctttgcgcccaagggcggagaaagcgatgaatcaggcagggaacaggtggagatgtcctatgcggagcctcctttctattcggcaacgccagacgaggctatgaaagacagcggatatgctcatgccaagttcaatgcaagaagagattgctccctcgtcgtcattaacaaaggtccagggggtgatggtttcagcgtttgccgaaagtgtggtgcggctgtccccggcaaagatggagaaaaagctcttaggaatatcacgcctccctatgggcgagacgataggaacagccgatctaggtgcttccacgagtttgaaaatggattgtatattggtgacgtattctcgacggatatgactattttcgagcttagccttgatccaaaagaagtcagcgtctatgactcagataatacctggctgtctcgtgctcgaatttctttggcggaagccatgcgacttgcggccgtcgatatactcgacattgatttcaatgagctgtgcgttggcagccgcaacaggctggggaatagcggggcgttcgttgacgtttttctattcgactctctctcaagcggtgctggttattcctctgagctggcttctgagcatatactgaaacagctttttaacaagacaaaggatattttgacgaattgcaactgccaagatgcatgtttctcttgtctgaagcatttcaacaacaagttaacgcacagcaagctcgatcgtttcgctggactggatttactcgaatacgcaatatgcggaacgtttaagtcatcagtaacggcaggtgatgtggaagaggccttctctcaagtccgagaagtgttgaagttcgaaacgggtataacgacaaagctggagggaaacgagctaagggtcagcggaaaaggaattagccgcgctctcaggtgtctgccggatatggctcccaaaactcggggagaatcgggtgatgaattctggaagtatcagttgacccatgatgtgccggctgtcgttgaacagattctcgacaaatgaagtaactgatttggttcctccccgtagcgggtaggaccaaatcagattaggagtgcattcattagggtgcatatgtctcaagcattatgccgtgagctggtttatagtcccatagccttagccatatggttgatctgagcgcgtccttttgcggggctgattggctccggcctcgtgtggagtatcttattggtacgaaaatcctcggggtgctggtcaaaatagtcaattgccatcttgcagattgactgtagtgcatttatcgtctcgatcagtttcgggcagtcttgataagacattgccgaataatcgtaccttttcgttaggcgatgtaggaagtcctgtgttttcagtttggcggtattccgcacgccggggctatcgacaaggatgaggaatccgcagatcgttgccgcaaaatcatgtgtcaaagggtaagtgcggaatgcgtcgaataattgtttggggttttctccatggttgagctctttgacgcagtttttcacatacaaggtcggtttaatctgtttttcgataccgatcattaggcagttgttgtgcgaagaggcattgcgcataatccggatggattggaacagattcgtcgcgttgtctttgtagctccgctggtttaagtatgccttgtagagtttgcatagtgtactgaagtcaatcacttcccaaagattccaaattgaaggatcttcgaaatacttgttcagcaagccttcggtgtaattggagtgatgataacgtgagttcacatagtctccatggaatgagaattcaccggcttcgtcgaagttgtgcacgatgttgtagccatcttcattagcgtcttccatgatgagttgattgaaacgcactttcaaggcgtgttcgaggttgagacaaaggtagcttagtagcgttcgcaggtggcagtcgatggtggatagatctgcgagatatgcaaaatccagtccacggtaccggccgttatctcgctcgaaattgttttcgaaggctttgagcttgaagaaatacgtacggctggttaggaactcttgcgcgtctgcttccgtgtacagattaaatgtgacgccatgcgatttcagagattcgatctgctgacttacgctgtatttcggacgccgcatagtacctcacaataaccaatggggcgcacgctacaagagcgccgccccacctggtaggacccctgacataaaatcaaggccttttgttcaatcagttacaaatttacagtgcgaaatagcgcatgtcaagcatggagtgttgtcgctatgctcaatttgctgtgaacttatcacatccacggccatggtcttggaagccgctattatttgtacttccgccgagccatctcgcggcgggccttgcaggcccacaggcctcccttgccgatgagctcattcaattgcgtggcgttgagctgttggtagtgcaggtctgttgcgtagggagggagactcgccttccatccggcaatgtctgtgacggaaccgtcggcttcgcctgttgcgggatgatgagtggcgttctcgctcgcgccgtcttgccgtcttgccagttcagatgtcggttcgtttgccgtaaggccttgcaaatcttgcgttttctccgggatcgcccacggatcggcatcgtcggacaaggtgggaaacgccgtcttgtctggttcgtgcagaacgttgcaatagcttggttttgacgaaggcggcaagatggcagtagctcttgtgacagcgaccggatccggcacagttgcttctggagtctcagtttgttcaccgctgagggtgtccgtggcttccgcattcaaatcttcagagctctcctgattcggatgatccgcataatccggcgacagccaccaccacatgttgccgtacttcttgcttgccagcagtggctttgggcgtcgtctgccgtccagaacttgctgcttgctgaactcgcctttcgcttcgttgattactctgtacgacggcacaccccaatacaagccatccggtgtgagctccttgttgtggtcgaagtagtcttggatgatggcccggccacaaccacaatggtcgctccggttccacatcagctaaacgggtcagcgaataggcgcggggcgtcagttcagtcttaagctcagactcaggctggctgctttcgcttggcaaaatctcaaactccaagccgctcatcgccgcgtcggaagcgtcgtgagcctcaccagccgcctggataaacgtcaacgaccgcacgaacggtgtcagcgtctgcgccacttgctccttccagcgagtgccggtgtcgtccttatccataatggcaaccacatcagctccactaagggctaagcacgctgaatcaagatccagtttcgcggcgaagttgccgccgcctcccgatgcggttacagcggcatagccgagcgctcgcaatgtgccggcatctttttctccctctatcagatacactggcttgcccgatgccacggcacgtttcgcgtcggcggccatccacaacgggtgcttgccggcggtgttgccgctttgcgagattcgcttggtgggagagcgacgaacaatcagaccgtccgcatattcatatgctgtgccgcgctcgctgtcgtagatcattgcttcatagccattggaacgagccagcgtagcgggagcgttcagcgcgttgagcacatcgtcggcttggcaagtgctgcagcggagcaatgtggcgctttccagcggggaatacagcacagtgagcgagtcagctgcgccgcagtttgggcaagtgccgtgcagcaggccggtgtttggctgaactgcaatagctgcgcagatggcggcgaacataggggatcggcctagggccaatggttccaagtatggttcgggcatctcgtactgctgtctgatttccgcagagttttccgtgtgtgcaggtgtaatcgtcgttgtctcatttctgctgagaagcggagcgttcgtgacattcgcatgccgtatggccgccaaatcggcggcagtgagccggctatcgcagctgtaactgttgtagccgctgtaatcggcatggccttgaggtccgctttgttgatcgaacaggtcgatgattttcaatccaagtgcaccggcaatggaagcggcatcgcagtgttccgctccgaagcagtgcagcatggttttgccgttggactggtcgtaggtgatgtgcagcgaagtgccgccgtctccgtcatgggcggggcagctgcactgagcgtgttgtcttccggaggtgtcgcgcggaagctcttggagcctaggatctcgagaatagcgtctcgcggcttcgagcactcgctcgtatgaggttgccatgctcactcctcacctgcgaattcgcgcacgctggtgagaatcaccagaaacgtgttgcctaccttgcgagcgcgtatctttccggttctgatcaatccgtaaacgcttttcacgtccttgtagcccagcatctccgccacttgcgctggcctggcggtgaggcgcgggtagtcatttttcgttggaattgcagccatatgtttccttgctctcgtgcggaacagagcctgaggagcgaagtgcttccgtcgaattcggacgcacttcgccctagatggttctgttgtggttgttggctgcaccggtgcatgttccccaggtttttgccggcccctgggaagctggaattcagaatatgacgttattccaaggagcgcaaaggttgaaaacggctgaagcttgaactagatgtgtggtcgtgaaatcgttggaatttcaacgaaaacaagtgattctgcggtgaaataaggcgttcagaataagacgaataggctttgttggttgcaatgagattggcttatggcatgttgtctttgatgagcccgtttgtcttggttgagtccagtggccttggagtttgttggcttctggcagaaattggttgaatttgttaagtggatttctccgtatccgcgcttgtgatctcaagcattccttcatactcgtcgaggttggttacgcgggcgtccttcagcagttcccgcagggacgggatacccgtctgcggggttcgtgcctccgtgtttttgatggcccgcagcttgcggaagaatgattcgacgatgctgatgtattccttggccgtccgtatgcgcgacaccgttttgccggcggcccacgccgccgccgtcaattcgttccggatgtcgtgcgcctccttcttggtgggcggcccgatgatgcgcgacctgtccggggccttttccgggtcggttagggaatcgtatatcttggcgagtgttttcctgcctttgcggcggatgggttctgggcgcatgccttctccttggcggtcatggcggtgccggtgccgttcgctggcgaatacccgggggaggttgccggcggtagggtctgccggtttctcctcgggcccatccgaccgacgaacgttcctcggcttcctgtctatgcatcaaggagttgatcgacggttcgaatggaccttcatggcacccgtatgcgttcgtgtggcgttcatcggagggggtcagggggaaccttcgcgctgggccgaccggtattcgctgcgatgcgcttgcgatacggaggctgggattgttgcgaaccaaaacgaaaaaactgcgcggagaacatgaagggactcgaatcggcccactgacgggacacatgggacgcggtcgggcttcgatgacgaacacgcggcgggcgggggccagaaggcgttttcggaatcgtcggttccgatatgtgacacgcgcggcgggtcggggccggaggtgtccaaacggagggtacctggagggaaccgacaatcggaaggaaccaaagcaaaaccccggaaaccgaatgatttcaacggttttcggggttccaatccgggcggaggatacgagattcgaactcgtgaggctgttacaccaacacgctttccaagcgtgcgccatagaccactaggcgaatcctccatgctttgcagcgcgcagttgaactgtgttccgcaggcaactcgaataagttaccacaggtttcggataagtgcacgcttcggcgtggcgcgtgtcgcgacgcggatgtgaagaatgatcactgcgagtgaaagactcactggaaagtcccgcgcaacacccgcacaaggaccgcatgcttgtgcagggcccacacacccgcgcgcacctacacaacccccggtaaagaaatcaccgtatccgggtgaattttcgatgttcgcccggcgcgcgcccgcaatcgcgcctaggctgtggagtcatgaacgaggggacagcggccgacgtaaccgcagcacatggcggccggtcgcgccaatcgaagaaacactcaaagacgtaccgcagcatatccgcgatccttagttggctcacggcccgccgcccgaccacgttatccacatcgctgcgcgcgcgattcctcccttacctgctcacgctcgctatcgcctggctgccgtggctcatactcacctggccgggctcgatgcgcgacgatacgcttgcccaatatctgcaatcgtccggtctgcaccactactacacccagcatccgctgtttgatacgctcacgttcggcctgttctggcatatcggcagcgcactcggctcccctctgatcgggcaggccctgtacaccgtgacccaagcggttctactcgccgccgggtgcgcgcttctgctgtgctacatccgcaaaatcggctcgccgcgctggctcatcggtttcggcctcgtctatcttgccgccaactatgtggtggtcggcgcaatcaccacgatgggcaaggactcgttgcacgccgtgttctatctgccgttggccgtgctgttcgtggaggcttgtctgacgcgcggctcggtactggctcgccgcccggtggcattcgcgttcgtcatcctgttgttcgccaccatcgtctccaagcggacggcgctcataatcgtgctatgcgccggctgctgtttgctcgccgtctgcacgcccaaaggcgcgcggcgtcgtgcgtttgcgtgtcttgcggttgccatcgttgtggcgcagggcgtgtggacgccattaagcgcggccgccacgcatgcgaatcggtcgcccggacgtgaggtgtggggcctggtcacccagccagtggcccggctcgcgcacgatgatcccagcgcgatagacaagattcagcggcggcgactgaacgcgatcatggacctcgactgggccgccgccggcatcaacccgcaccgcaccgatgagaccttccgcactctgcgcgagcaccctaggccaaccgcggcgcaacaactcgcggccctgcaggtctgggcgcagctcggcctcgcgcatccggttgaatatgccacggcctatgccggggtgactcgcggatggtgggacccgcgcgtcaatttcgcgtaccccactgattccgactacctgttcacgcctagctatctcaggcaatgggcgtctttcctgactgaaggtgcttggaagcatacttccgacggcgatgccgataccgtggcggccgaacgacttgccgccatcgaacatgaccttgcgccgctgaggggtacctccgacaagccgcaatggcagaaaaacatattgcgggcgattcatcggtgggtgcgttcggatggtcgcgtcggtgttcgtaaaggcaatccgctgacttcgatggccctgtacgtcacgtggattccgctggctgctggtcttgcgctggcggtgcggcctgcgcgacgacgctacggccccgcactggccgcttacggcttgctggcattcacggtgctgtcgctgtatgcctcacccgtggcactattttggtatccgattccggtattcctcacgttgccgctttttgtggtgttgccgttcacattccgggaaagccatcctctctgagcatagttatctcagatagtgaaataattgcggggttgaaaagcactaaaacgccttctattacctcgcacccgtcaaaaaatcaagactgttgttcaagaatttttttctatagagttcatagttgtttttggaccattcgagtacttgaagtgagaggaattcagcatggttcgtcgcgcctgcgcgcagtccgctgaaatgaacacgatgcgggaacgtgatacgcgcgttgccgtttctcgcgtgcgcgcgaagtcgggcagcaccggtcgtctgcagtcggccacggtctcggctcgtgcatttgcggtcatcgtttttctgtttgcgatgatcgccgcgaccttcctcccctccgccatcattccgcagtccgcgttcgccgtgccgccggcaaccactgccactgctgccaccgtcaagagcgacgacaccaccagcgtcgattacgcgacctgggccgacgttgccaaggccgtcgaagcgcagttgcaggaaggccttaaggaatacaaggacggcaacccaatgggtgccaagtccgatttcggggctgcatacaccaccgtctacgtgacgtccaacttcaacaaagtggtgagcgacaccatcggcacagacaagcagaccgcgcagcagcaggccttccaggacctgcaaagccaggtgttcacgtcagaccaggccgatcagcttacccagaaggtcaacgacctgaccgccgacctcgacgccacggcccagcagctcgacgccaacaccagcctcgccaacccgaagcagtactccgaagacctccagaagcagatcgccaaggagcgcaaggagctcgacgccaagaagaagcgcaccgaggaaacggccaagacttggaaggaagtcgcggatgcgatgcttccgatcctggacaacgcctacaaggcctatgagggtggcgacgccgccaagggcgccacgctcgtgaacgacgcctactaccagcactacgagaagctcggcttcgagaagaccgtgctgagcgccatcagcggcaaccgcgtctcccaggtggaataccagttcaagctgtgccgctcctcgatgaacaccggcaagcctgcttccgaagtcaagaagtacatcgacgacctgaagaacatgctggccaccgatgccgccaagctcgacggcggcgcggccgatgaggagggtggcttcctcaagttcatcaccagctcggtcggccaggcgttcctgattctgatccgcgagggtctcgaggccctgctcgtggtcgccgctgtggtggcctacctcgtcaagtccggcaacaagcgcttcaccaagtggatctacgtgggcgtgctcgccggtctggccggcgcaggcatcgtggcggtcatcttcatgctcgcgttcggcggctccggcccgctgcaggagatcatggaaggcgtgtgcgcgctcgtcgccatgtgcatgctgctgtggaccagcaactggatgctcaacaagtcctcggtggaagcgtggaaccgctacatcagggaaaagaccgaagccgcggtggcctctgtctcctcgcaggtcgaatccggcgagaaggtggcttcccgcacggtgatttcgctcgccatgctgagcttcctcgccgtgttccgtgagggcgccgaaaccgtgatcttctaccagtccatctacacgatgagccaggatacgcatggcatggtggtcggcgcactcgccgccgccgtggtgctcgtgatcatcttcctggtgattcgcttcacctccgtaaagattccgattggcccgttcttcctggtcacctcgatcctcatgtccgtgctggtggttgtcttcgccggcggcggcgtgcacgcgctcatcgagggcgacctgctgcccgccaactacctgccgggcgttcccaccaacgactggctcggattctacccgtacgccgaatgcatcatcgcccaggtactggcagccatcgccgtcatcgcgctgttcgtggttggctttgccaaacagcgtaaggccaaggcccggcttgcggccggtgcgagcaagtcggacgcgaaggctgacgaggagagcgcgcaggcgtagcacaacgcccggtgcgaccatctcgcgcaacacaacttgcgacatggcaatggaagcgattccagcccacgccgccacaactaaaaacagataagtcgtgaataatccattcaccacaacagaaggaataagagaaatgatgaagaacaagaagcttgccgctctgctcggcgtgctgctcgccggctccatggctgtttcgatggctgcttgcggttccaccaacaacgcttccgataccaagtcctcgaccagctcctccgacaccgccaagaaagacgactccaagaaggccgacgccccgactgagacctccggcttcgaagaggtcccggtcggcccctccggcaccgccaaggagcaggacaaggccgctggcccgctgaccgtgggtgccgtctacttccagcccatcgacatgtaccctgcttccatgggtctgaaggctgctgacgcttccttccacctggaagccgacatccacgcctcccaggaaggcaccgactacggctacggcaagggcgacttcgtccctgaccttactgtgaactacaccatcatcgacaagtccaccggcaaggaagtcgagggcggccaggccacctccggtaccttcatgcagatgaacgcctccgacggcccgcactacggcgccaacgtcaagctcgacaaggccggcacctaccaactcaagctctccatcgagtcccctgagaagaacggctggatgctccacgttgacccggagaccggtgtcaagaaccacaagttctggaccgagcccatcgaggtcaccttcgacaactgggactacaccccgcgtcagtggtgattgaataagcagacagccccctcgtcagagggggctttacgccgctttagggagataattcttaggacggtctaaaaactcccctcagtccgctttgcggacagctcccctcagggaggggagcctaagatgaacagagaaaggacgcgaatgcttgaacaattcgtggcagtgatgccgggcaccttggcccccgcattgctggtgatgagcctgagcgtgatgctcacggtcggcgaggggcgagataagccgataagctcgcattggcgtctcatcggcctgaccgtcggcctgatcgccgctatcacattcgccggcctgcgcgcctcggccgtgatcaaccagcgcacgttcgtcaactatccggtgctgtggtgcgcgatcattgccgacatcctgaccatcgtcgtggtggtgttcgcacgccgcatcaccaccaattggcagcagcacaaggtgttcatacacattgcgaacgccgtggccgccatcgacatcgcgctcaccctgttctacgcgctgccggacgtgatcctgcagctgaccatctgggtggagcccggcgacccgatcttcacgtccgacatgctgctgcgcgcgctcggcttcgcgctgggcctggccatgtcgatcatcgtggccgtgatcttccgcacgatgcgttcgaccgcggtgcgtgcctcgttcaccgccgccgtgctcgcggtgctggtgattctgttcgtccggcacctgaccggtgtcatgcagatcctgcaggcacgcggtttcccgataggccacacgggattcgtggccctcgcctggtcgatcaaccacaacgactggatgatcatggcccaggcgttcgtgttcctgattccggccgtcgcctccgtggtggccggcttccgcatgccgctgaccggcgcgaacgaagccatcggccgcaagcacaaggcgttccgccgccgcgccgtggcctccgccgtctggagcctcgtggccatgatcggcgtcacgctgaccctcaccgtcggcgtcgccgcgacccatcagaccatcactctttcgccgccggaagcctactcgctcaaggacggcgtggccaccattcccttcagccaggtcgaggacggccacctgcaccgtttcgaatacaaggccaaggacggcaccgtcatgcgcttcatcatcatccgaaagaacggtggcgcgtacggcatcggcctggacgcctgcgagaactgcggcgacgccggctactacgagaaggacggcaagatcatctgcaagaagtgcgaggtggccatcaacctggcgaccatcggcttcaagggtggctgcaacccgataccattcccgtacaagaccggccacggcaagatcaccattcagactacggatctggacgcgctgagcgcccacttccagtgagtcaggcaggagacaagaatcatgttctttctgcgtatgattactcgctcgttcacccgacagctgcgccggcgcctgcttatcgcgctgaccgtatgcctgtcggcgaccgtgtccgtatcgatgctgggcgtcgtgttcgacgtgggcgacaagctcaacgccgagctgtccacctacggttcgaacatcaccgtgcagcccaaggcggacgcggtcgtttccgacctgtacaacaccgagtcgggcggcgcggcgtccaccagcgacccgaccgcttttctgaaggagtcggacgcggccaagatcaagacgatcttctggtcgttcaacatcaccaacttcgcgccgcagctcaacatccacgccacggtgaacggtgccaacgtgccggtcgtcggcacgtggttcaacaaggacctcaagatctccaccggcgagaccaccgtcgtgggcgtggaaggcatgcgctcgtggtggcagctggacggcaagtggcccaaggacgattccgaccagggcgtgatcggcaagacgctggcctccgaactcggtgtgaccaccggcgacaccatcaccctcaacaagaccaccgcctcgggcaagaagaacgagcagaaaatcaagctcaccggcgtctacgattccggcgacgaggacaacggctcgctctacatcgcctcctccacggcccaggtgctcgccgacctgcccgattcggtcgacaagatcgaggtcaaggccctgaccacgccggagaacgacctggcccgtaaggccgccgcgaacccggccgcgctgagccaggaggaatgggagacctggtactgcaccgcctacccgagctcgatcgcctaccagatcgaagaggtgattccgggcgcggtggccaagcaggtgcgtcaggtcgccgcgttgcagggcaatgtgctgcagaagacgcaggccgtgatgattctgatgaccgtgctgagcctgatcgccgcagccgtggccgtggccaacctgatggtcgcctcgatcggcgaacggtctggcgagctggcgctgctcaaggcgctcggtgccaccgatgccgcggtatcccgcctgatgctggccgaaacggcggcaatctcgctgctgggcgcgattgtgggcgcgttgcttggttccggcgtggcccagctgataggccgggtggtattcggttccggcatcacgatgcggccgatggtgttcgtgctggtgttcgtgctgctggctgtcaccgtgctgctggcgtccgcctcctcgattcgttcgattctgaatctcaagcccgcggaggtgctccatggccgctgagtttatctacgtaggtgtggaaggaggaaaccgatgaccaacaccggtatgttcttcagaatgctgttcagcgccgtgttccgccggcgttcgcgcgcggtgatggccgtggtggcgtcgctggtcggcgcggccacactgttctgcctggcgatgatctgcctcgccgtgccgcagcagatgaacgaggagatgcgtgcgtacggcgcgaacctgattgtcacacccaccgaatcgaccaatgccgacggcaaggccggcatcgacaaggcgatggtgcagcacaccactgaaatggtcaaggccaagggttccgcgaaatacgccacctaccgatacgagaacgtgcgcgtcaacgcctcgccgtacgtgatggccggcgtgaatgcggcgcaggtcaagaacctcaaccatcactgggtggtcgacggctcgtggccgaccgacggcaaggtgctggtcggacgtgacatcgccgacgccatcggtctgagaatcggctccgccatcaccatcggctaccgtgcatccgataacgccagcaccaacggcacttcgtcgaactcctcgatcgaccagcaaaccaaagacggccgtgtctccagcgacatcatggacacctccggcaccgaattccgcgtggccggcatcgtggacaccggcggcagcgaagactcgatcatctacgccaccaacgccgacgtcaacaagctcaccggcatcacgcgcggcgtggacgtcatcgagtattcggccggctccagcgacctcgcaggcctggtgtccagcatcaacgacatgacctccatgcacgtcaaggcgcagcaggtcaccaagatcaccgcctccgacacccgcatcatcaccatgctgcagacgctgttctggatcgtctcgttggtggtgctggtgctgacgctcgtcggcgtcggcaccacaatcagctcgatcgtctcgcagcgacgcaacgagatcggcctgcgcaaggccctcggtgccagctcgcgtgccatcggcaccgagttctacatcgaatcatcgctctacggcctgatcggcggcctcatcggcaccgcaatcggctacggactcgccagttggctgtgcgtggcggtgttcgaacgctccatcggattcaactggtgggtggcgctgatctccgtgctgttcagcgcgctggtcgccatcgtcgcctccatcccgcccgtccaccgcgccacccgcatcgaccccgccgttgtgcttcgcgaagaataaagaaagagaaacgtcatgctacttgaactcgaccacatctcgaagatctacggcgacctgcatgccgtggacgacctcaatttgaccgtgccggaaggcgaatggctcgccatcgtcggctcctccggctcaggcaagaccacgctgatgaacatgatcggctgcatggacacgccctccaagggctccgtgaagctggaaggccgcaagctggaggacctgaacgccacgcagctggccgacgtgcgcaagaacctcatcggactggtgttccagaagttctatctggtgccgcacctgaccgccgtggaaaacgtgatggtggcccagtactaccattcggtggtcgatgagaagcaggccatggaggcgctggaaaaggtcggcctgaaggaccgcgcccaccacctgcccggccagctctccggcggcgagcagcagcgcgtgtgcgtggcccgcgcgctgatcaacgacccgaagctgattctggccgatgagcccaccggcaacctcgacgagaagaacgagaaaatcgtgctcgacctgttccgcaagctgcacgagcagggcaccacgattatcgtggtcacccacgatgcgcttgtcgccagctgcgcgcagcgcgagatcatgctcaaccatggcgtgctcgtcggtgagaagtggaatgacgaggatgcgcgcaaggcctacgaggcggccggcggcaagcccgcctccacgggtgcacaggtcgagggcgcgcagaacggcgagaccgccattggtttcgctgaccccaccaaggccgcgaaaaccggcggcgaggagtagggccgtcaggggcatcgagcagtatgtgaggaatacatggcaagctgatggtctctcccccagtcagcttcgctgacagccccctcgtcagagggggcttaaggagcgtgaatatgaccgaaaagaatacgttgaagaaatccgcgacattggcggcggccggactggtcgtggctggcgcgctgctggccgggtgcggcgaatccaaggccacgccgatggacgatgcgtacgccggcaactcgggcgagaccgagaagtcgcaggaagagcagtcgcaatcccagtcgaacggctccgatagctccgacggctccgattccggctcatcgcacaacgacccgtccaccaccacgtccgacaagaaggacaccggcaactacaaggacggcaactactcgatcaacggccagtacggcccggtcggcgaggattccatcgacgtccatctgaccatcaaggacggcaacgtcgagaccgtcaaaatcattgggcacccgttcaccacgatttccaagaaccatcaggacgacttcgccaaagccatcaacggcgtagtggacggcaagcccctgaagggactcaaagtggacaaggtcgccggcgccagctggacctccgacgccttcaacaaagccctcgaagtcgcccgccaggaggcttcgattcaggagtaagaccgctacttcagcaatgctggccacagcagatcggccatgcgcgaggcccaggcggtgtcgtcgtccatcgctttgccctcgatggcctcatacgccaccaaagacccgataatcgtggacaacagcaacttctcgtcaacgtcctcgcgaaacacgccctgcgcgactccctgcttgaggaacgcccccacatgctccagccacggggtcaccacctggtcgacgatgtgctggaagaactcggcctcgctggacagtacaatgcccacgcgcttgacgtcgatgtcgttgtcgcgcacccaatcgaccaatcgctgcaatagttgcgtgaaatgctcacgcgtggggctgggcactgggtcggaatccgggatggccagatacatcgcgctgatctcgcgcagcagctcgtcggcattatggtatcgacggtaaatcgtggttttggccacaccggagcgccgggccacctcctcgatggtcacgccgctgatgccgcggtccaccgcaatctgcagcgtggctcgcatgagcttgcgatccgtcgcctcgcgcgtgcgctcaccgcgcggtgtcgccgtcgtacctgtcatctccgtcatctcttctcttcgaaatatgctcccgtacgctcccgttggcgggagctgactggcaaagccagactgagggtggtaagtccatgccgtttgtaggcaactcccggataatacctactagcccagcactttagtgctctcgactttggctacataccactggttgaaccgcaccagtggcttcctgagcaacagtccaagcaacagtagcggcggcacgaatgccagcagcattccggcggcccgccagtaatccatgtcgtagatgccggcgatggccgcacgcatcatcgtcaccgcatgggtgagcggcaagaacggactgactttggcgatgaagtcgggcaacatctgcaccgggtaggcggcgttcgcacccgaaatctgcacgatgagcataagcacgccgattgccttacccacattgccgaaactcaccaccatcgtataggtgaagaacgagaacaccagcgaggccagccatccggacaacataaacagcagcggatgcacggcctgcacgcgcaggaacagcagatcgccgccgagcgacaccgtggattgcagcagcgcaatcagcgcgaacaccccgtaatgcccaaggaagagccgatgcggccgcggatcgcccaaggctttgcgcgtccggcgagacacggtggttttcagcgtcaccaccatcagcagcgcgcccacccacaacggcagcagcgtgtagaacggcgccatcgacgaaccgaaattcgccaccgggaatacggccttgcgcctgagctgcaccggcgcggccaacgtactggccagcgtttcgggatcattgcccagcacctctttgaccatgctcatatcgccactgtttagtgcgtcgctcagtgtgctgttgaacgaagccagttcggcaccggcggaacgcagtttgccggacaccttgcccaaggtggtgcgagcgtcgctgagcatatcgctggcgtcgtcggaagtccttttcaggtcgccgagcgtggagtccaactgggtggcgccggaactcagtatgccggaggcgtcagagacggtggacgacagggagtcgatttgcggtttcaccgtggccgtgaaatccgacttgatattggcgatactgttctgcgcttgatcggccagatccttgacctgcgcatgctgatcctgcgcgtcctgattaccttggcgaatatcggtcgccgccgtattcagcgcttgccgcagcctgttctgccgtgcgattgaacggtcaatcgccgtgatgatggatgagtcgttgcccagtatgccggccaacgtgttgcgaatttcagtgtatttctccgtctgcttgccaatggccgtggcttgacggtccaattcgtcggcggccgtggtggcaccatcattcgcgtcggaatacagcttgtctatggaatcggacaccgcgccgaaactggaggcgctcgcgtccagtgagctgctcatcgcgtcagcggtggtgcccagggctccgaccacgtcggtgactccctgcttggcgctggcgagatccttgcctccttgtttggcggcagaggaaacctgcgtgatcagcgagttcgaggtgtcaagcaaggcgccggccgtatcggtcaatgcgctgtatgtgccaagcaaatccgccgtatcgtcaagccgtgtggcgaaatcggcgatattggcgttgaaggtattcagttgctctttggcttcgggcttggacagctgatcggccagcgaagacgcgatttccagccctgccgaagtgatggtcttggcgaacgtggtgttgatttccgccgccacctcgtccgtgccctcgttgagcagattcggtgccagcgcgttcttcttctcgttgcggtaataggtcagttcggcatgctgcacatcgtcggagaagaaggtcatcatgtctttgctgaacgacttcggaattacgatggccgcgtagtatttgccggatcgtgcgccctcgacggcatcggctttggacgtgatcgtccaatcgagctgactgttggcgcgcagcgcgttcaccacctgatcaccgaccgtgactttcaccgggatcaggtcggaacgatacccctcatccacattcgccaccgcgaatttcaggttcttcatattcgagaacgggtcccagcatgcggccacgttgaaccaggtgaacaggccgggaatcatcaccaagccgatcacgatgatgatggagaccacgttgctggtcaggcgtttgatgtcgccggtaaatagtttccacatggtgttcatcgtgcgtgcctgccttccttggtcggcggaatagtggggatgattgcggtaacggcggcgctcgggtccgcttcttcgtggcgttcggcggaggtgtcgcgacgcttggccttatgcccgtacagcatggcgcggatcgactcgtcggagaggttgccgagctcggtttggcggcggatggaatcgcgcatgaattccacgaccatcaggaagcccatgatgatgagcacccatgccagccatgtgcccatgaccacgattttctcgctggtggtcagcacaaacacgataatgagcgcggccggcaccacgaatccggcgataagcgcacccagcagcagccggggatactggtaggcgaatttggcggcccgacgttcgatggcatgacggtattcgtcgcggtcggccagtgctgcaatggcctgagtgacacggtattcgctgccagacaggtgcaccggctcgccgataatcatgtcgctttccttgatttcccgcgcgaacaggcggttgagattggccagtttcggccgggcgccgaggccaagcgcaaaggccagaaccgcgaaaaccagcaatttgccgatataggcgaaccagaggccgtcgtagaagccgccgatggtttcacgcattgcgtcaatcgaataggtgaacggcagcagcggatagatggcgcggaagaacgcgggcatcatttcaatcgggtacaggccggaggcgcccggcacctgcagaatgaccagcgccacgcacacgcctttgcccacgtgcatgaacgtggtggagagggcgaaaatcaccgacatatacaccagtgaggtgatgacgcaggtgagcagaaacaccggggcgctcgcgcattgaatgccgatgacaagatcgccgatggccgtgaccaggccttggacggcagccagcgtggccagcagcaggaaacggccgagatagccttgggttggcgtgagatcgtcgatgccctcgtcgtcggtttcgagtttgggaatgaccacgagcacgaacgcgcccacccacaaagacagggtggtgaacagcggtgccatgccggaaccataggaggcgaccgggtagacggcccgttcgctgataacagtgggggagagcatgaagtcggcgattgtggcggcatccagtttgccgtcggtgccgatcagggaactgagtgaactggagatgctcagggctttgatgtcggtggtcagcgtttcgagcttggtttgcatgccggccagcgccttatcggtgtcgtgcagggcggtcaccgtggtggaggcggctttgtcgagttgatcgagggtgctcttcgactgatcgatgagtgagccttgcgacgtgatgccggtcgacagagtgttggcggtcgagctgagggtgttgaggccggtgttgagctgaggaatggcgccggagatgatggtgccgcgagcggtattggcctcgcgcaccgtggtttgggtggcggtattgagatgctgcgccaatccggcggtgtctgtggaggcgttgccgatagtggtgttcaggctatcgaggttgcccagtgcgccggcaagctcgctattgtggctttccagtgtggcaatggcggattgcagcggttctcgatcggcgttcggcagccctttgagttggtcgatgatgtcggcgttcgcttggttgatgtcttccgccgtattgatcagtccgtctacctgctgattggcggcgctgatggttccggctaccgtgcccacgctttggttggcctgtgctgcggcctggctcagcaggcttgagccttggtcaagcgcttcggacgtggaggtgacgaagccgttcagactggcttgggtagtgccgatcagggtggagacgccggccagaccttccgcggtgtcgatgccaagtgcgcgcgcgtcgtccagcgcctgacgtgcggtgcgtgtctgctccggggtatcggtgagtttggtggtgagcttggcgatggtgctgcgtgtgtgctgcacgtcgccggaggcctcggcaagggccgtgagggccttggctttggtggtgtcttcggtgctgatggctttgccgccaaccgtattgatgacttcggtaagtacttcggatacggtggagacgaatgtggaattgaccgtgcggtccacagtggacgcgcctacatcggtgactttgggggcgatggcgctggctttttcgttgacgtaatactccagagtgggccgactcttgccgccggtcaccacgccggcgagatcgtcggaaaagtctttggggatgatgatggctgcgtatgccttgccggattccacctggtccatggcctcggcttcggtgacgaaggtccagccgagctggtcgttgcttttcagctgcttgacgatttgatcgccgaggttttgcttgccgatgagcgcgttgtcggtgccgtcgtcattgttggcgatggcgacggtgatgcctttggtattgccgtacgggtcccagaagccgacgatgttgtaccacgaatacagtggcgggataaacaccatgccgaacaggatcacccatgcggccggcaccttgaacaggcgcaggaagtcgcgtttgaggaccttgaagatattgcccactgatacctccggagcttggtgttgcttgattgctacgttttccgtagcgatacgttaatcgtagcgctacggttgtagtagcgtaatacggctgccggagattattggggtgattgatgatggttttggcggaataacgccgctgcccagcggcttatcgtgtgtcgctgggcagtgtgcctaattttttgtggctggggtgctgtgtggccgggtgtgctgtgtgtgttggtgtgaggctgccctccatggggcggtaaaaccttcattgggtggtaagtggcccatggggcggtaaaattcccatggggcggtggcttaaaatggctttattccgcggaatgcggttttgggctaaccgccccatggggtaattaccgcctcatgagagagctaccgccccatgggtaaaccgttgtatcagctttcgatggtgccggattggccatcaatggccgactgctcgttctggctggatgactggtcggagttggagttaccggaagtatcagaacctgtgccggagctgctgccggtgccggactggccatcagtgccttggctggagcgaaaggcgttctggaacttattgacaagatttctggatggtttttggatgtttcctgaaagcgatagcgggctcggtgtccggcaatgtagacagacatgtaccggctgcccatcaagttcggcaaaactgcaatcgggtgatagtgtaaggggacgctatgtggggaggaaaccatggttgaattcaaggacgatggcacggccactacccctggcaagccgcaggagaaccgtgacgccgagtccgcagtcgtggctgatctggtggccgtcgaactggacgacgccggcttgaacctgaacgccaagcgattaccgattctggcgcgcatctatggcgcggtcgtgctgctggacggactcgccacattgccgattatggtgatttccatcctctatgccgtgcgcgagattctggatggtcatgtgcacgtcgatgcgatgagcctgactttcatcctgtccgcgattcatgcggtggtgctggtagtcagtgccgcatgcctgattgtgttcggcgtgatgctgctgcgcaatcatcgccggtatgccgcgcgctggacctacgtgctgatgccgttgacgttggccgacggcatgctgtcgctggccctgaccggccttggcttcaacctgctgctgccgctgattcagatgattattctcgtcgtgatttcggtgaccgccgatccctccctgagcgaggaacgccgtttgcagcgcgcgctcaaacgcatggacgatcgcgatgattatgaatcggcggtggcggccggcatgctgggccgcgaccaatccggcaagggctatattgcactggacttcttcaatatcttctggctgtttaccatcgcttcggtgggtggcctgattatggagacgatctaccatatggcgctgtataacggtgaacttcaggaccgcgcgggtttgctgtggggcccgttctcgccgatttacggctgtggtgcggtattggtaaccgtgtgcctgaatcgcctgtggaaggcgaatccgttcttgatcttctgcgcttcggcggtgatcggcggcgcgttcgaatactgcaccagctggttcatggaagtggcgttcggtattaccgcgtgggattacaccggccgttggctgtccatcgacggacgtacttcgggccaattcatgttcttctggggactgattggtgtggtgtgggtcaagtggctgttgccgcgactgctggctctgattaatcgcattccatggaaagtacggtattcgctgactgcggtatgcacggtgctgatggtgatcgacattgccttcacgctgatggccttggattgctggtatgggcgcatggccggccagccgcaggattcaccggtcgcgatgtggttcagcgaacgctacagcgacgctttcatggccaatcgcttccagaccatgcatatcgacccttccaaggccgggcgtatgtgaatggctggcaagtaattacgcttcgcgggcagaaggtgcgtagaacctaagacagccttcgcgtgtggggtggtaagtgggatacactttcaagcgttgaaggaatgattccctccgctgatgtgctgttttgtgacgcgcgtgatgacgatgggacaatcaaacgaaaggcaaggcgcatggccgaagctacagcaaacattggtgtgattggactggccacgatgggctccaatctggcgcgtaatctggcgcaccatggcaacacggtggcgttgttcaaccgtcactactcgcgtaccgagaagctcatgaacgagcatggcgccgaaggcaacttcgtgccggccgaaacgctcgaggaattcgccgcgtccctgaagcgtccgcgtaccgccatcatcatggtcaaggccggtgctccgaccgacgcaactatcgcgcagctggaagaggtgttcgaaccgggcgacatcatcgtcgacggtggcaactccttcttcaaggacaccatcaagcgtgagaaggaagtacgtgccaagggcttccacttcgtgggttgcggcgtgtccggtggtgaggaaggcgcgctcaacggcccgtctctgatgcctggtggcactgcggaatcctggaagaccttgggcccgattcttcagtccatcgccgccaaggtgaacggcgaaccgtgcgtgacccacatcggcaccgatggtgccggtcactttgtcaagatggtgcacaacggcatcgagtatgccgatatgcaggtgattggtgaggcgtatgacattctgcgccgtggactcggcatggataccgaggagattggcgacgtgttcgctgaatggaacaagggcgaccttgactcctacctgatcgagatcaccgctgagattctgcaccacaaggatgccgagaccggcaagccgttcgtggacgtggtcgtggatcatgccggcatgaagggtactggtacttggaccgtgcaggctggtctggaatttggttctcctgtggctgctatcggtgaagccgtgttcactcgtgcactgtcttcgcacggtgagctgcgtgaagacgctcagaaagaaggtctggctggcccgaacaagaccatcgatctggccggagaagacaaggccgcgttcgtcgaggacgtgcgcaaggctctgttcgcttccaaggtcgtggcctatgctcagggcctgaacgagattcaggacggtgctaaggaatacggctgggatatcaacctgtccgaagtggcccgcatttggcgtggcggctgcattattcgcgcccagttcctgctcgaccgcatcaccgaggccttcaagggcgataatttgccggcttccctgttgttcgatccgtacttcgagaagatcatcggcgaatcgcaggatgcatggcgtcgtgtaatcgtgcgtgccgtggaggccggtatcccgaccccggtgttctccagctccctggcgtactacgatggtctgcgctccaagcgtctgcccaccgccctgacccagtcccagcgtgacttcttcggtgcccacacctacggccgcgtcgacaagcccggcgtgttccacaccctctgggcgcaggaaggccagcccgaggaacagcaggcttgagcgtctgcgacaatctgtgggccgggcccctcattcagggtccggcccacaggaggcgccatcacaactcggtgacggtttcttcggtggagaaccaggtgaactcgtccactccgttggcgtaggaggacgggtaatccgggttgttgggccgctcgaagacatgggccagcgattcggctttgccggcaccggcggcgaagaaccatgtacggcgcgagcgggcaatcagcggcgcggtcaacgagacgcgcaacggcggcatcttgggggagtggttcacacccacggtgagcctatcggtaaccttgacctcatcatgacccgggaacagcgacgcatagtgaccgtccggtcccatgccgagaatcatcagatcgatgaccggttccggccccaattcattcaccaactcgcgctcatagtcgctcgcggcatcgtccagcagcgcatcattcgcggcatcggcggcggcgcgaacggaagcgtcatcactatcggcctgatccatcacatcggcgatgtcatcggctgaacgggtatcggccgccatctcatgaatattcgattcaggcagcttgccatccgccaccagctggtcaagcagcaggcgacgggcctccagagcattgcgatcggtgtcgtaagccggcacaaaacgttcgtcgctccaccagaaatgcacgcgcgaccaatcaaccgcatcagccagtggatcgttcagcgccaaacccaacggctgtgcggccgaaccgccagacagcgccacatccacacgtgtgcgatgcgtgccatcaggcaatcgttcggcgagcaaatcgagtagcgccaagacaaaacgttgcgcgccagcctgaatcatcagatctttattcggatacacaatgagttttcgagttgccatgtatggtccttatatggggtatgtgtcgtactttgcaatgtggattgtgttgtcagttgacaacgcataatacgggtggcatgccgggaatccagccatttgcagcaatgaaatgtgttgtcagttgacaacacaatgtacattgtgcgacatcgcatatgtcactttattactccgcggtcatgagtttcggcatcgcatgaggtaggaaacgatgagcaacggcgttggcatggctcgaccacaattgccgaactcatgccaacgccgctgtggcaacggttttaccgacttcagtgacgaatcagatcccagccttcgttgatgacctcggcgtagatctcatcgggatcgatgcggcgcagttcctcggtcagacagtcctcgatggtgcgcatcggcacggacacttcctgcggagtctggccgggcagcgagatcagcgcttggtcctcatacgggcgttccagtgagatcacaccgtcctcacgggtcaggtacacgccggtcacggcctgcgcgtcgggcacgaactcagtttcgactggtacgccgagtttcagacgcagccatgcgcacagcatttccagaggcaggaagtcggccttgccggtcaccttcacggcggtgatgggcaggtgcggcggctgatcgagcatcgaggcgagcattgcgcgccagacggtcagtcgtgtccaggacaagtcgatgtcttccggtgtccaattgcggcgcaaacgctcgatcgtggcctccggattattggagtgcagcgcgtcggtgatgcgactgcgggccatcgcacccatcagatccttggccgggttcgacggcggtgtggtcggccaccacgccactacaggcgcatccggcacaagcagcgggataaccagcgtatccgggtggttgataaggccaccgcgcggacgcaagatgataatctcaccggcaccggcgtccgcgccgaatcgcacttgggcgttcagattggaatcgttcggatcgttcgggccgtcggtcaaatcgacggccggattatcgcgattcgcgctcacctcggcggccacttcggtctcgttcggttcgccttcgccggactgatcggcaggattggcatccggtactacggcaatcacgcggcacgggtgctcacggctggccgagttcgcgatttccagcgcatgctctaggtccgcgtcctcggtggcgatgagtagcgtcagcacgcggccggtcgccgattcgccgcgctcctcgtgcagctgttcgattttgtgcgcaatctcgcgggtgcgggtgttcggcatatcgatgatcatggcatcctccagtggcggccgtcgcgcgtcagcatttcgtcggcctgtgccggaccccacgtaccggcgcggtaggcctgcggctggccaagcgtggaccagaattgttcaatcggatcgaggatctcccagctgaggttcacctcttcggtggtcgggaacaacggcggatcaccgagcagcacgtccagaatcagtcgctcataggcttccggcgagttctcggtgaaggagcggccgtagctgaagtccatgttcacgtcacggacctccatggtggagccgcccggcaccttggctccgaagcgcatggtaacgccctcgtcgggctgcacgcgaatcacgatggcgttcttgccgagttcgcgcacggcggtctgctcgaacggcagatgcggggcgcgcttgaacgccacggcgatttcggttacacgcttgccgaggcgcttgccgcaacgcaggtagaacggcacgccagcccagcggcgggtgtcgatatcgaggcggatggcggcgtacgtttcagtggtgctcttggggtcgatgcctttttcttccaagtagccgaccacttcgtgcgagccctgccagcccttggcgtactgaccgcgcgcggtgttggcggcgaggtccttgggcaggcgcacggcggaaagcaccttggtcttttcggcggtcaggtccttggcggtgaagctcaccggctcctccatggcggtcagagccatgagctgaagcaggtggttctggatgacgtcgcgtgcggcgccgatgccgtcgtaatagccggcgcggccgccgatgccgatgtcctcggccatcgtgatctgcacgtggtccacatagttggcgttccagatcggctcgtacatggcgttggcgaaacgcagggccagcaggttctgcacggtttccttgccgaggtagtggtcgatgcggaacacggagctcgggtcgaacacttcggataccacgctgtcgagttccttggcgctggccagatcatggccgaacggcttctcgatgatcacgcggcgccatgcgccctcggacgagcgcgacaggccggaggcggccaactgcttggcaacctgcgggaaggcgcgcggcggcaccgacatgtagaaggcatggttaccctgcgtgccgcggtcgcggtcaagctcctgcacggtggcgctcagacgctcgaaggcctccggatcgtcgaacgtaccctgcacgaagcggatgccggcggccagattgcgccaagtcgactccttgaacggcgtacggcaatgcgcccggacggcggccttgacgaattcgatgaaccgctcctgtgtccagtctcggcgggcgaagccggtcaggccgaagctcggcggcagtaggccacggttcgccaggtcgtagacggccggcagcagtttcttttgtgccagatcgcccgtgacaccgaaaatgacgaggctgcacgggccggcgatacggggcagtctgaggtcgcgcgaatcgcgcaggggattgctccaattgggggattcactcataatgtacaagggtagccgccggcggctatctatcgctagaggcgatatgcgatttgggctgcgatttgggccacattgcgtgtgctgtgccgtgcgttgggccaatcgcgtactcaaacgtgtacgcaacgccgtagttgaaatatcccaaaacggtgtgtattttagaagagttgcccctttagctcaacggttagagcagcgtccttttaagtcgtgggttgtgggttcgaatcccacagggggcacaacaaatccttggaatcgcaatggttccaaggattttttgtttcgaccagcctggctcctagagtggtgccccatgtcatgcaccacgattcttgtcggcaaaaatgccagttacgacggttccaccatcatcgcccgcgatgacgattcgggctcgggccgttacgatcccaagcgcttcgtcgccgtcgcccccgacgaccagccgcgccactaccgcagcgtgctgagccatgtcgaaatcgaactaccggacaatccttgccggtacaccatcgcaccgaacgtgctgaataatcgtggcattctggccgaagccggtgccaacgaacacaacgtggcgatgagcgccaccgaaaccatcgctgtcaacgagcgcgtgctcggtgcggacccgatggtcgagttgcggccggctgtcggcgggccggacagcaccgattatcaggccgagcagcccggcggtatcggtgaggaagacatcatcacccttgtgctgccgtacgtcaccaccgcgcgcgagggcgtcgcgcggttgggcgaactgctcgaaacctacggcacctacgaatcgaacggcgtgattatttcggatgcggacgagatctggtacgtcgagaccatcggcggccatcattggatcgcccgccgagtgcccgacgactgctatgccacgatccccaaccagctcggcatcgacgacttcgacctcgccgatgcgttcggcgagcagcgcgaatacctatgcagcgccgacctgcgcgagttcatggccacgcatcaccttgaccgcacaatgggaacgtcggtctcttccaacggccgtcacgtgcatagcgccggattcggaacaaccgttgcccttcccacccgcttcaacccgcgcaaggccttcggcaccgcgacgccgaaggaccatatctacaacacgccgcgtgcctggtacatgcaatgccgcctcaaccccagcgaggactgggattcgccggccgcccgctacacgcccgaatccgacgacatcccgtggtgccgcgtgccggaagacaaggtgagcctcgaagacgttgatttcctgctgtcctcgcacttcgaaggcacgccgtacgacccgtacggcacgaccggcacggcggaatcgcgccaccgttaccgtccgatcggcgtgaaccgcaccggccatatggtggcgattcaggtccgcccgtatgtgccggcggccaatcgcacggtgatgtgggtatcgttcggctccggtccgttcaccgccgccgcgccgttctacgcgaacgtcaacgacacgcctgcctacctgcgcgacaccacgcccgaagtctccaccggcaacctgtattggacgaaccgcctgatcgccgtcgtggccgacgcgcattggtatgagacgaaccggttcatcgagggctatgcggaaggcgtgcgcgcgttcgggcaccggctcatcgagcgcacggatgagcagttgcttgctcgaagcgatgccgaatcgacgggtacgaatgcatggccgctcgatggcggccacggcgatgagaaggatgtgcagggcgtggcggatgtgctcgaagcggccaacgacgagatggccgactacctgcgcgagcatacaaccaagctgctgaacgacgtgctatacacctccagcaacctgatgcacaacagcttcgcaatgtccgaccgttgggccgagtagcaagacctcggctggggaggtaatagggatgccctgctgataacgcgtcagcagggcaaagccgcaatccgaatcagttgaagccgacgatgcgttcggcgatgagatagccgttgcgcacgatccagcggccggttttaccaggcagattgagcgcgcgggacatcagcttcgagcgcacatccttgccgatggccggagaataggcgtcaatcgcatcccacagctcggttttcttaacgtagttggccggatcgcgcgagagaatcaggaacgccgaggtaacgcatgattcgatcgtcaggaagtgaatcatgtaccggtacagcccctccggcaccgtaccacgttcgggcgtggcctcggtcatcagccgattgacgagccgcagctgatccacacgcttaatcatcacgtcggtctgcacgctctgaccctcgcgcccgatgaagtagtggtagaacggcacgtcgagatactggatgcgcttcacccacgggaacggctggtacgagtaatagaaatcgacgtagaacgtatgctccggcagcttcagcccggaatcgcgcaccacctgcgtgcggaaagtgagcgcatgcatgatgatgtactgcgccagaccgaacttgcccaggtcatcccagccgagcacgcggccggcctccatcacatgacggaagttcaccacgatcttgtggcgcttggtcactttgtcatacacatagttggtcaccagcatgtcgatcggctcgctggcctcacgttgcgcgcgcaacgtggccagaaccgtgtcgatggcctgcgggtcgacccaatcatccgcatccaccaccttgacatacatgccggtcgccgccgtgataccggtgttcaccgcgccgccgtggcctttgttctcctggtgaatcgcgcgcacgacacctggattggtgcgttccagtttgcgcgcgtactccagcgtgccgtctttcgaaccgtcgtccacaatcagtacctcgaggtcgctggtgtcgcttgccgaaagcagcgagttcacgcaacggtcgagataggactccatattgtatgcggggatcacaaaggtgagcatctttgccgtgctggccatgaaagtcttacgtcctcacatatttagtcgttatgttcagtttcctgttcaaaccgtagcacttcgtctcccgactcggcagagtgttgcgcaacctgtgcccctgaactcacattctgcaaccctgaatcttccctgagcgtgtagtcgaggtccgtctgctctaagggcgatgatgccttgccgtccggggccggtgtttcggcatcgatcccgcgcttggcccggcgctcggcctccttccgggccttgacgccttcaaacaacagctgcggcttggaatcgagccggctcaggccatgccatgccaggtccacgatgta

SEQ ID NO: 62 - DNA, 24075 bp, Unknown
  R206_24m  MAG No. k141_1320
cagctcgccatcctcggcgatgccggcggtgatgccgcacatcggcatgccgatggtgccgatgcgattgtcttccggcaagctcacgcacaccggaccacaggtttccgtcatgccgtagccttccagcaccggcatgccgatgccgttgaagaagtgggagagctcggaatccatcggggctccaccggtgacggcaaagtcggcgttcgggccgaagatggtacgaatcttcttgtacaccacctgctcgtagaaagcgtgagcaatacgaccgggaagcggcagcttctcgcccttctgctcggccttggaccattcgcgcgcgttttcggcggcgcgcatgaacatcttgcccgcaaaaccgctgccggcacgctgggaggcggcgttgtagaccttttcgtacacacgcggcacggcaagcagcagcgtggggccgaaggtctcgaagtccttgaccatggtcttcatattggagctcagggccagagaaatggtgccgccaaaactgaagaattccaggaatcgggcgaacacatggctcaggggcaggaacagcagcagacggcggttgggccatgcgccggcacgaggcatgtactgcaggccggagcgcaccaggaacgcgaagttgcggtgggtcagctccacgcctttcggggtgccggtggagccggacgtgtaaacgatggtggcgcggtcgtcgccgtgggaggcgttcttgtattcccagaattcggcatcggtgacgctttcgccataggtcttgatggcgttcaggccgcctgcttcgatgacgaacacgttgcgcagggtgggcacctcgctgcgcacggattcaatcttgtcgcgctgaccgtcatcctcggcgatggcgagcgtgaccttggaatcgttgaaaatccagctgacctggctggcggagttggtctcatataccggcacggtgagtgcgccgatggacatgatcgccatatccagagcggtccactcccaacgcgtgcgagacacgatggccacggagtcgcccttgttgacgcccagaccaatcaggcctttggccagatcgatgaccatgtcgcggaagacctgggcgctgtacggctgccaggtgccatcctcagttttatattcgatcatggcgccatcgggatcgcgcttggctcgctcatcgagcaaatcgaacaggttgatgtcgctgtcgatcggctccttgacgggattggtgaactgcttgacgatatgagtatcgttattggccttgtcagcgatgttttcagtcatattccccatgtaactccatggatgctacaaaacacgcgcgaaacaacggattgtccagaccaaatggccccggcaatccgtctagttttcccacgactccattatgccgcttgttggaatatccctataccactgcggcgtcccgtacgtgactatgtacgagaacgccgccacccctgtttgctgagaacctgttagagctgcttagaactgaatgtaatcgacttccgtatgttcgccggtttccaagtatttcgccacatcatcaggaccggcgaacaccagttcgaccgcttgcgcaatcatcagattgacacgatccattggtgtaaggttctcgaaatagccgtacaccggaattcccagcgcatgcgcatatccgatttcgaacatcgtgcccgggtcctcgtccataagattggcgaccacggctttagcagcattaatgccatggatatcatccgcaaaacatccttcagggccgacttcttcgatctggctgacaaaccgcggcttgaacaataccttgccatgatcttccagtatcttttccaaacgttccatacttgccgtttgctcaggatcgaagaacggaccggccacatagaagtcatactgtttgtcttcactcatggtctctagtcatagcgcagccgcgtcggacgccagccgttattttcactgtatggacaaggggtcgtatcgtgaacattactacgggataaccgtcaatgactacgtacgttgcccccgatcagcacactccgccactttcgccccctcccgtatcgtcgagcacgcgaaccaagccgaccaaatagccgccatcccatgcgctgattaccgtatccgaatgctgcaatgccttgaacaaccgttcgggccactgcgccgattcccaaccaaccgacttgaacagcgcctcaacctgttcgacagtaaaccgcttctcttccgtgtattcgatagccatggaccctcacgataaccgtgaagccccacatgtctttgcatagtttcacatgacgggatgatggatggtggaacctatacgtttacacatgcctaatgcctatggctcatcaccgatgaatagaggctgagataccgtcatgtttccgaagccaagtgcccgagatcggattcgaaccgacgacacccgctttaggagagcggtgctctatccactgagctactcgggcaacgacgtttcattgtacacggccgcacgcccagtcgcatcatgttcgcgtggcagcctacataagacgcatggcagtctgtgtaagctacctggcagaacccgccaccaaggcatggccggttttcgtgctggtttggtgcgaactgctcttgcgcacggcgaaaagacactgaaagacaagccgcacacggtacagtggcaaatcgcacgaaaagcaaggtaacagtaaacaagccggaggaaagggcagcatggcaaaggcacggagtactaccacaggtgcaagcgtacgagctcgcgccgctgccaagccacgctctgccaaagccacggcacgcccagtatccaagtctgccgtgaagccacacaaacggcatcgtctgcttggttttctcgccacgatgttcgcacttcttgcccttgccggcactgccgcccgcgcgctgcctgccgatttacaggaactgccatttgtgccgattgtggtatcggcaacgccctggttcacgttgcttggcctgattgccctactgttggccatcgtgtcgcggcgtatccttgccgcactaatcgccatcgccgcaatcgcatgcaatggctattggcaatatccgttcttctactcgaccgacccactcccccaagccgcgcagaacgccgtggctgcggcctcccccaacaccagcgatgcctacgcgcgcgtcatgaccttcaatgtatacaaggggcaggccgacccacaagccatcgtcgaactagtccgcgatcagcgcgtcgaagtgctcgctttgcaggagaccaccgaggatttcgtcaaaaaactcaacgaggctggcattgagcactatctgccgtatgcgcaggtctcatcgtctgacggcgtattcggtaacggcctctggtcggccacgccacttgccgatccggccgacgatgacgtgaattccagcgcctcattcatgcccggcggcacggtggatatgggtggtcagcagattcgattcgtatccgtgcacaccaccgctcccgtacccggctattggcggcagtggaagcgatcgctggatgagttgggtccgatgcgcgggcatacggatacacggtatattttcatgggcgatttcaatgccacttacgatcacacgccattccgtgattttcttggcgaccggttcgtggatgccgcacgtgaatccggacatgggtttacgttttcgtggcctacgaaccgcgtgtatatgccgatgttcgccggtattgaccacgtggtgcttgatcagggcatgaaggccgggcaatgcaaggtggtcaaagtcgagggctccgatcatgcggcgttgttggctaccgtggcggttgggtgatttcgtattcctcggccagccgcatacactgggacacggcttccagaatcgcctcgatgccggacttcttgattgagccgtcatcctttaaatacttcatcaggcgcactgtggatttggtgctggcctcggggtcagggcgagcgccgggagcggcgtcgacgataagcatgtggatagtgttcgaaccgatatcaagcacaccaagtcgcgtggtgcgcgaacgcagattgaccatgatccctattcccgaccttacctaacccgtgatggccgaacaacgggccgaccatcgcaatcagccagccgtgcgccaccatggcgagtcgttcggccggcaaccaacaccgcgaggccagccgaacatcacacaaactcgactactgtacaacaatcacaccggctgccgcgccgttcacaacgattcgacgaacgttccgagacgttccagcccctcggtcagggcctcacgtgaggcggcatagctcaggcgcacatgcgtatccgctgtggccgcaccgaagtcgcggccaggagtcagagccacatgggcttcatccagcgcgcgttcgcagaacgtccaggcatccagaccagtacgggagatgttgaagtaggcgtagaacgcgccattcggctccacctcaaccggcaaaccgatgcgcttgagcccgtcaatcacaatgcggcgacgggcaagcaattcctgacgacgagcttcacattcggccaaactctccggcgtaaaacaggcgagcgccgcatgctgggtgggcgtgtgggcgcacaggtagtagttggtggccaggtcgtcgaccgcttccagcacggtggggtcgtcgggcagaatagcccagccgagacgccagccggtcatgccgaagaacttggagaagctgttgcacacgatggcaccgggatcgcaggccagtacggacttgacttcggtgccgtccggctcacggtcggccaaatcaaggtaggtttcgtccacgatgcgccatgcgccgcggctggcggccagcttgcacaccttgtccaatacgttgaagtcgatggtggtgccggtggggttggacggcgacgtgatcattacggccttggtcttgcttgtccagtactggctgcacaggtcggcggtcaggtggaagcgggtggcggccgaggtcggaacgtcgatgacccgcccctcaaaggagcgcacaagttcgcggttgcacgggtaggaggggtcggccacaatcacatcgtcaccggggtccacggtcagcgcggtggccaacagcagggcggccgaaccgccggcggtcacgcagatacgcttggggtcgatgtcaaggtcatgacgctcgcggtagaagtcggcgatggcttgacgcagttcaggtaggcccatggcggcggtgtacggcagggcccggccgtcgtactgttcgcgcatggcgtcgcgtacggcgggcggcgcgccgaaatcgggctcgccaaggcttaatttgatgacgctgataccttgggcgatcatcttgtctgcttgttcgccgaataccatggcacggaagggattggcctcacgcgctcggcgggacatgactggagacgcggccggagattggggctgctgctgcgctgcttcgttttccatatttcggttctatccgcctcacgggacaaggtttcttcttctataatcactgtaggtcgattgagtgtaccaacccgtattcaaggaggaataatgagtcgattcaatggcaaacgcgccgagttcgaggccagcggcgaaaagatcaacgtcgcgattctgggtgcgggccgcatagctcacaccatggccgacaccctgacccagatggctgaaggttcactgtattcctcatggattcacccgtatgcggtagcggcccgtgatattacgcgcgcgcaggcttttgccgaccaatggcattttgacaaggcttatggatcgtatgaggagttgacggcggacccggatgtggatctggtgtatatcgccaccccgcacagtctgcacgccgaacaggcgatcctgtgtatgaaagccggcaagaacgtgctggtggagaagtcgttcaccgcgaacgccgggcaggcgcgtgaggcgctggccgtggccgaggaaaccggcatgctgtgcacggaggccatctggacgcgctacatgcccagccgcaagctcatcaacgaagttatcgagtccggcgagatcggcgaggtgaaagcggcgagcgccaacctgtgctatccggtgtccggcaaggcacgtatgaccgatccggcctgtgccggtggcgcgctgctcgatgtgggcgtgtatccgctgaacttcctggatatggcgatcggtgccgaccatggccgcacgctggatcatttcgatacgtcgatgatggccgccgaaaccggtgtggatgcacagaattccaccacgttgtattacgatgatggcacgatggccgtgtccaccagttcgatgctggtttcctccgatcgcggcggctacgtgtggggcaccgaagggtatttggtggtcaccaatatcaacaatcccgagtccatcgatatctacaacaacgatcacaagcccgtgcgcagtgttgcggtgccgtcgcagttgaccggttatgagtatgaggtggccgatgcagccaacgcgctgctggatggcaagatcgaatgcgaggcgatgccgcacgccgacaccatccgcatcatggagctgatggatgcgattcgcgaccgttggggcctgaagttcccgtttgaggtctgatttcagctcccctccagaggggagctgaaattattccgctgaatctgcatctccttcaacaatctgctcatacagccgtgcgaggcgttcgtcacgcacggctttcgttaattcgcactcccatacggtaattacacgccagccggcggcctccagttcagcccgctgcgcgatgtctcgattgtgattgcgcagtagcttcgtctgccagaattccacattcgatttcggcatcgaatgtttggaacagccttcatgcatatgccagaaacagccgttgatgaacacgatggtgtggtatttcggcagtactacatccgggtggccggggtaacgcttgtcgttcttgcggaatcgcaaacccttgcgaaacagatagctgcgtaccagcacctcgattttggtgtctttgccacgaatatgcgacatcgtgtacgaacgggtgccccgctcatacttctccactagctgtttcttgcgattcacgcactccagactaccgtgacgttgcggcgaggatgaaagcctgaacgaacaatcacccatcttgcccgtccgtgtctcttatcgcgggcaatgatcatctgccggtcgagactgcacgattagaccgaatcaaatggatgacatgatgattcgtagggccacggcggccgatattccccaaatcgacgaactgctgcggcaggtgctcgaagtgcatcatgccggccgaccggatctgttcaaaggcggtgccaagaaatacacggacgaggaattgaaggcgattctggccaacgatcagacccctgtgttcgtggcggttgcaccatctgccaatgacggcactgacgtcgaacataacgccgactcccccgccaccgaccaagtgcaatggcatagcgccaagcgacgtctgctttgcgagatttgcgagagatgaatgcgataccagcgttcatggctatgctccttaatccaatatcaatggatgaacctgcactgccccgtatgtcaccatcataatatatcgaatatcaatataaaaatatcgaaaatcactttcaccattcacccacacacatcgcgacgtgatcgaccgttcttgccttgctcgcagcatccacgaccaacacgggaaagtcactttaaaaaagcactttatcaatgtggataactcggaagctagaaccacatacccccgttcagcttgccaatcagaaacctcatcccataccgtcagatgcacccgcacgcaacgacgcgtcagacaacagaaagaaggaccaatgaacatctctacgtttacccacaactcccacccggcaattcggcatacgcattttgtctagtgcgagattgagagttatgatgacacgaagaaaactcatcatcaagaaacttcggcaagcggcaaagcagcgagggctcgatttctatttgttacggcaaggcagcagacatgaggtttactgcctggacgggttgaggatacccatcccccgccataatgaagtctcagaacgaaccacgctggatatcatcaacgagagcgagcagaaactcggaaaggggtggtggcaatgagcaactatgacgtgcttgtgcaacccgatggccgatattggtacgttcaggtaccagctatcgaacggtcgacccaggccaaaggacttgacgatatcgagccaatggctaaagatctcatcactgtcatgaacgacgacgacaatccggagctcaaggtgacgtttgtgttgccgaaacaagccaaacaacacgtaacagaaatgttccggcagcgcgaaatagcaaaaaaagccaacgcacaagcggctgccgaatcccgactcgccgcacgggccctacgcaacgagggactcacgtatcgacaaatcggagctttattgggggtctcctaccaacgagcatttcaattggtcaacggcaaaacaaagcacaaaacgacagcgtccgaatcgcctcagccaacaactgaatcacgctccccacgcacgcaccatgccacaccgctatcgactccggtctcggcttagcgaacgggtccacaaagcccagactgtttccatcaccaagctcaagagcaccgagcaggatcttctcatcccagcagattgaggagatcgtccttggtgagggtggcgatggaggcgggggcttcggtgagggcgctggcaccggtgccagcttcgtcggcaagcaaggaagcatcggtgaactggcgggcgagctcgctcttggtatgctgaagctccaagatgcgttcttcgatggtgtccttggccaccacctgatacacgttgacgtcttcggtctggccgatacgatgtgctcggtcggtggcctgatcctgcgcggcagcgttccaccatggatcggcgtggatgaccacgctggcaccggtcaggttcagtccggtgttgccggccttcaatgaaatcaggaaggcgggcgtatcgtccgcattgaactggtcgacgagttcgagacgcttctttttaggcgtggatccggtgatggtgtagtagcgtagtccttgcgcgtcgaaacgttcggcaatcagatcaaggaagctggtgaactgggagaagatcagcgccttcttgccttcattcacgcaggtttccaccagttcggtgatggcggcaagcttggccgactgatccttggcatcggcatacagcagccttggatcacagcagatctggcgcaacttggtcagctcggcgaggatgcgaatcttcgacgtgttgaaatcggcttcttcgctgtgttcgagctgcattctgagccgctgctcgtgggccgcatacagtttgcgctgttcgccggcaagctgcacggtcagcgtggtctccaacttgtccggcaaatcggtcagcacttgggacttcaacctgcgcttgatgaacacgcccaccaacgactgcaattggcgagacacccgggcggcctcaggattgacctgtgcggcggcccgaccttcggccgtgctgccatctgcagcccgggcgttggagatgggcaactcgtagcgctcatggaatcgcttgtatgagcccaatagtcccggcatcaggaagtcgaagatgctccacagttcggagagtcggttctcgatcggcgtgccggtcaaggcgaaacgatggtcggcggccacggccttgaccgctttggctatcttcgtggtgtgattcttgatgtactgggcttcatccagcgccatgacattgaaacgttgctcattggcggtgtaatcatcgacatcccggcgcagcaggtcgtatgaggtgatgagcacggtgggttcatccgcccggaacgcgcggccgatggcggtgcggcgctcggctttggtaccggccaccaccacggcgttgaagctcggggcgaacttggcgaattcggcaccccagttgtacaccaaggacgccgggcacacgatcaatgatggatgcggcccgccatcttcggaatcgaaagtaatatgaccggttacggctgattcactattaacagcattaccggcatccatgccttgagcggtcggcatgccactagattcgttgtggtatcgcgacagcaacagggcgataagctgcacggatttgcccaaacccatctcgtcggccaaaatgccgccaaaacccttgtcgcacaacgtgttcagccattggaagccttcgacctgataagggcgcagaatatgcttgagactatccggcacttcatacgacttagggtcgatgatcttgagatcgtcgatgtattcggtgaacgaagcgtccttgactacatcggagccgtcatccggcagctcaccatccagtaggaatgctcgaccgcccggcaactcgatcagcccggagttgagctgctgctcgctcagatcaaggtcgctggccaatcggtccaacgtgctgagattcgcgccgctgagtttgaccagcgtgccgtccttcaaatgatggaatcgttgacgccgacgatacgaagacagcaaggcacccacttcgtccggcggtacttcatcagcgaggggtgatatctccaccaaattgcctttgatggacaatccgactttgacgcttggcggcttgggcgcgatcagccggtcaaaagccggtgtggtgaagacctcccctacttccttcagtgcgggcaatccctcgtcaaaaagacgaacaatctgcgtggtgtcatcgcgatcgatagtggccgcatcagacacgaattgtttggcggtctttcgcgcggccggcgttcggaacccattcaccgtctgatgagtagcggccgcaacgcgcttgcgctggtcaggcatggtaaagaattcacgcactacatcaatcgcaagatgctcagcgtcgaaatcacgcccaatcacgccccgagacaaggggatggaacgctcatccctagcatgcaccgtcgggccatcgggtagcaacgggacaatggcatcgccgtagtgtgccttgacctcgcattgcacaccatgctcatcacgatccagataaaactggaggctgcattccgtaggacttaattcagccagctcgcgaggaatctcactggcctccaacagtccggcaccaaccagctgaggcaatagcgtgcgtgcgaacagggcgatgtcatcgccggcaatgacctgcccctcgccatcgggttcaaacaggtctcccaatagtcctcgcaacggaatcaatcgtttcgggcaacggacgaatcggcatcccgctgcgcttttacgctgagaacccgccatcatggcggataccgcaccggccggattagtggaggcgagcaacagccatacatccttgccaccatcaatcacggtttccaccgccggcactccggcaagcaggtatccggcatccggaccatacgtattgaaatcacgccgcgcaatgcgcataagaaaatctggctcgccaccatcaaccggcaccgatgcaggctgcccggagaaccatgtgttcaacacgagctgtacgcctctgccctcacgtacggacagcaaccgggccacttccggtgctgaaagtgtcaggtgacggtcgatggcgatatgcccgtaataccggtcctgctgctcggccgcacgacgcacggccatcgcgtcgtcaaggaagcccagcagtgggcgcgaatcatcgtcgaacatatccggcgtatgggtaaaggcaagcttctgcccataatccgtatagtcgccgttcgccatggtaagcacaaattgcggaatcgatttcagtacatagctggacccattggaagtcgatccgatcttgaactccacgctccacacgccatcgatgaaactcaatatcggaacaagctgcacctgccccaagcccacagtctcactatcgccctgatacccgccgcctcgggtgccggcacgagagccgtatccgctattcgtacgtcgtccacctgcgccatttcgtctttttgcagtatcgaaccggcgcatgagcgcattgcggcgacgcgctttggcttgagcatcttgcctatcgacgtgctccatatagtcgatcagcgtccgagacggcctcacagccccggcacggtacccttcaaaacgctgcggatcatcgcagaatatgaaggcgagcgcaatcatgtgcttgcacatgccatagccacggccgtaagccgggcatgagcacttgccaccgacggcttctcccgtatcgaggtcgaattgcacgctggtacgatacctactcgatgggctggtggtgccacgtagaataccgtcaagctcggcatacccggttcgatgattttcgctgtataccggattgataaccatggtggccgctttgcgcgcaatgctacgggcacgagcgagcacggtattcgacgatgacgattccacatcgttgcgtaacgcaaggatagggacggcatgggcttcggcacgcttcgcagacccggcgaaatggccttcgtcctcatcgtcgaaccatacggaacgtccttgcctgaaacgatagggcataaccgcatcggcggcggacaaactgtccgttccaccaaacgttacggctctactgccggcagcgcctgcgccaccaagcattccatctgcctcgccagagataccgcctataccgctgctcttgccggcaaagagacccctgtcctcattagtgtcatctgtgtcatctgcgccataccgatcatcgtcgtaatcggcaccttcgtcgcctccccttttccaaggattgcgacggcgcaacgcatggccccaggaaacgccggaatcatcatcctcataaggcaggaggtcatcgtcatccgcattatcgggaacatggccaaatacaccataccctttgctcatgggcgagcctcctttccagcgaatgcatttcagtccaacacttctatcctagacgaggcgcgcggtagccttaatgtatggatgcagacaagccggcgcaacgcaaatcctatgcagggaacaccaccctcgaaatcttcgaggtgctgtggcgtcacagctactttggacatggcctgaccgtgcggcaaatactcgatgaacttgcccgtaaacaccagctggaagatccaagcgagctgccgaccgagaaaaccatacgaaatcagctcaaaaagcttaccgccacggaatttctcggcagacatatcgggcatctcaccgaaagcgaccttgccggcatcgaatgcaagaatccacaacccggctggtatcttgacgcattcctatccaccgccgaaatgcgactgctactcgacagcctcaccttgtctcgcatcagcctcgacaccatggacgatctcatcggtaaaatccgcgaactcgcaggtgccgctgggcaagcagtaggttatcttgagcacgtggccacctacacgcatatcaacggcgagttcctatccaccatcgaccaactgaatcaggccattgaagaaggccacggcgtaaccttccaataccgtgattacggcccggacggcaccctgataccgcataaaagccgtacgggcgcaggtcgaattacctacaccgccgacccttaccagatggtgtacaagaacggacggtattacctcatctgccatctacatggcgaggataatctccgcattttcgtggtcaaccgaatcgccaacgtcagcgccaaaggcaggaacggcacagttccactggaaaaaccagcgccggctgattttgacgcagtgaacttcatgcgtcaccgcccgtatcccgtagccgatgccccgattcgcatccgcatggccgtacgagacgaatccatgctcaacaatgtgttcgaatggttcgacgaccctcagatcaaacattcgccggacggcacacagttcgaagtcatcgtcgatgctcccgaacgcgccgtgttctggtgggcattgcagtattcctgggatggccgcgtagtgattcttgagcccgattcgctcaagcgcaaactctatgatgccgggcgtcgcatggccacagcctatgctcccgaatgatgcagcatcacatcgcacacctccttgccgagttgttcaccagcgaatttcaccggagaacctatcatcccatcgccaatcacgttcggtaattttttaccgaacaactcgatttcaagccattccacgaactatggcccccgcctagccgtacttgacgctaaggtggaaccatcacatgccgcgatgcacatgcaacgcaaacgcaacgatatgtaaggagcaactatgagcgaagagcgtaccgcatggggatggggtctggccagcgtagacgccgccggcaccaccctggacgtctggtaccccgaactgaatctcggtgaggcaccggccgaggccgatcgtccaaaccacaatttcggcactctggctcacgatgaagccgacgcccgtggcatccgccgcgtgccggtattcgtcgtcagccagttggacgagccgatcagcaacgccgcggacgcttacctgaaactccatctgatgagcatgcgcatggccaagccgaacacgctgaaccttgacggcatcttcgcccagctcgccaatgtggtgtggaccaactacggtcctttcgccgttgaggacttcacactacgcaaggccgatgtcgaacgcgcctccaccgaagccgctctcgctttcgctgctcaggccggactgcctgccgcagctcctgccaccaccgtcaacgtgttcggtgtggataaattcccgcgcatgatcgattacgtagtgcccaccggcgtgcgtatcggcgacgccgaccgtgtgcgcctcggcgcttacctatcttccggcaccaccgtgatgcacgccggattcgtgaacttcaatgccggcacgctcggcgtctccatggtcgaaggccgcgtttcgcaaggtgtggtcgtgggcgacggttccgatatcggcggcggtgcctccatcatgggcaccctctccggcggcggcaagctgcgcaactccatcggcgagcactcgctgctcggcgccaacgccggtatcggcatctccctcggcgataactgcaccgtcgaagccggtctgtacatcaccgccggcaccaagatcagcatctgggacaaggccaaggccgcagccggcgagccgctcgaagtcgtcaagggtgctgagctctccggcaaagacaacatcctgttcatccgcaactcggtgaatggacgtatcgaagcccgctaccgcaaggtgggaattgagctcaacgccaagctgcacaagaactgaaattgaaataatggagcgttatcttcgttgctcctcggtcgacgtacttccgtacgccttccctcggtgcgcttcgataccgcacacattatttcaatttcagaactagccctgctcgttcttatgcagccgtcgcagcatagctggtttgcactgtacatatagaaagcgcctcactggatctccagcgaggcgctttctcaaaccaacaatcaccgctcgtccatcggcacgaaatcgcgctcgaccggaccggtgtagacctggcgcggacggccgatcttggtgttcgggtcggccagcatctcacggtactgcgcaatccaaccaggaatgcggcccagtgcgaacagcgtggtgaacatggccggatcgaagccgatcgcccgataaatcaagcccgtgtagaaatcgacgttcggatacaggttgcgcgatacgaaatactcgtcgttcaacgcaatatcctcaagctcggtggccacatcgaacaacgcacgctcgtcggacggcagtttctgcgtatcctcgcgctccatgatcttctcaagatacttcttggcaatcgccgcacgcggatcatatgacttatacacacggtgaccaaggccggagatcttctggccattctccttggcatccgtcacgaactcggccacagacttgccggaatcacgaatcgccttcagctggcgcagtacggcctcattcgcgccaccgtgtaacggtccggacagggcattgacgccagcggccaccgccgaatacagattggcgtgggcggaaccggcgatacgcaccaccgaggtcgagcagttctgctcgtgatcggcgtgaataatcagcaaacggcccaaagcatgcacatacaacgggtcagattcgaacggctcgtacggcacagcgaagcacatgcgcaggaagtcgtctacatagccgcgcgcgtaatcggggtacagcatcggctcatcgcgacgacggcggaagatgtacgacacaatcgtgcgggccttggccatgatgatcttggcggcctcatcgagctggtcggtgtcggagatatcggtggtgtccggatagaacgtggccagcgcattgatggcggaggcaagcacgctcatcggatgagcggagcgcgggaacgaacccatgaaggtacggaagtcttcgccaaccatcgtcttgtggttgatgtccgcgcagaactgctcatactcagccctgctcggcagctcgccgtggcgcagcagccacgccacttccagaaaatcggagttctcgcacaactgctcgatggggtagccacggtagcgcaggatcgaatgcttgccgtcgatataggtgattttcgattcgcactgtgcggtggtgaggaatccggggtcgagcgttacccagccgtcattacgcagcttggaaacgacgatgccatccggccccgcactagccttcaccacgggcaggttgaacttgttcgaatcgacatcaagttgtgccgttgccattcgcgcaccttcctcttcatgaaccacttaccccaaacattaacgttcacgcgttcgcgaacactagtgtttcggtactctatgtcttctgtgttaccgctggcgaatgccggtcgatacacgaaagccgaagtgcgctcatgctatcaaagcaaacgcacttcggcttgttacgtctcgaattcgcgggaaaaccgcaaacatatagacggttgatgagatgccgatcgcccatcacaggccaatcaggcacccgccatacgccaaacgccaatcagaggttggtgcgatcggtgaagatgatcgggccgttctcggtgatggcgatggtgtgctcggagtgggcgccgcgcgagccgtcggaggcgcgcagggtccagccgtccttcggatcctggaagatctcgtcggtggtcttgaggaaccacggttcgatggcgatgaccaggccttcgcgcagcttgtagccgtggtgggcgcgaccgtcgttcggcacgtgcgggtcgccgtgcatgatgtggcccacgccgtgaccgccgaactcgaggttgatcgggtagccgtattcgcgcgcgacgtcgccgatggtgttggagatgtcgccgagacggttgccgggcttggccacgtcgatggcggcggcgagcgcttcctcagtgcacttgatgatgcgcaggtcttcggggtccgggtctttgccgaccacgaagctgacggcggaatcggccacccagccgtccacggagatggcgagatcgagggagacgaggtcgccgtccttcaggctgtaatcgtacggcacaccgtgcagcacggcgtcgttgacggaggtgcagatgtagtgggcgaacgggccggtgccgaagtcaggagcgtagtcaacatagcaggattcggcgcccttgcggtccacgatcttcttgtggacgaactcgtcgatctcgagcagattggtgcccaccttggtggtctcctgcagttccttcagaatgccgccgacgaaacggccggcaggcttcatctcctcgatttcacgaggggtcttcaattcgatcatgaggttctttctaccttgttgagacttgttctcaactctagaccagcccggggtcaaccgccagcgatcaccaacggcggcggccataagaaagcgcccggcaggttcacaacctgcacgggcgccttgcatcgattacttgagcatcacttcctgcgcttgccaaaagtgaacgcgcgaatcactgaagtaatccccatcaccaccatggcacatccgccgaagataatcatgaatacggcggagctcagcgggctcatcagcaccacgaagccggcgataatcgagatgatggcataggcgatggcccagccggagcgcgggatgcgccatgattcgactagagccatcacgccttccataatccaaccgaaaccgaccatcagggtgatgagtaatgccaaggtctgaccggtcataccgtagtttcgtacgactacgacgcctccgaaggtcagcagaatgccgacgaacacgtccagcacacgccagccgcccggcagacccggctccacgagagcgctgacgatgcgcaccacgccggaaatcacgaaatacacgccgagcaacaatgcggccaaagccagcgtcttgttcggcaccaacaacagcgcagcgcccaaggcgatggcagccacgcccaccacgccgtaaatgatgcgaatcttggtcttggccttttccggcagccattcctcgatcaggtggaatggactgaaattgccggcataccagttggtctgctgccagccgggttgactttgatcgccccatggaccattcggctgcccgtccgcttggctattcgattggccgtccgcctgataccgccgatcgtccggaccccatgctggctggccgttcgggccatagttcggattgtaggcgtacgggccgtagtacgggttctggttcggtccgccttgtggctggccgttctgcgcctgctgattctgagtgtcttgcgctcccggcgcaccttgcggaggatattggccgccatgattgctgtcatacgcgccatactgcggttggcccggttggcccgccggattcggctggctcggctggctctggttgggctggcccgtctgtccattccactggccctcgtttgaattgctcatcgtaactccttaactcaaggtccatattcaggttccacataccatgttaggcaagttacctaatttgaaccatcaccacagttaggcaatccatctagttcactgatagcgcaatgcccataacgcaatatctgcatcaccagcgcttctcccccgccgcgattaggcttagggccatgaccaacgaaaccgaaacgctgacgtcgggcatcgacccggcatcgttctcctccgtcatcaagccgaccaacgacctgttccgctacgtgaatggcccatggatcgacacctaccgactgcccgacgatcgttcgcgctacggctcctttgacaagctcgccgaagacgccgaaaaccaggtgcgcgacatcctcgacgccgacgactgcccggccaccaagtcgcaggctctgtaccattcgttcctgaacaccgacgccatcgaggccgccggtcttgacccgatccgcgacgagcttgacctcatcgattccgccatcgacaaggccgctctcacgcgcgtgctcggcaccatcaacccagccggcggccccgacctgttcggcttggccgtttacggcgatcccggcgacccggaccgcaatatcgcccaccttgaacaggccggcctttgtctgccggatgaagcctactatcgcgaggatcactacgctcccgtgcgcgaagcgtacgtggcgatggtcgccacccagctggtgaacgccggatacgcacccgccgccgagtccaacggtggcgatgaactgccggccaacaccggcgatgacgagagcaacgctcccgccacggttcccagcgaagccgcgcttgatatggcccgccacttccttggcgtggaaacgaaaatcgccgccaaccattgggacaatgtggccacgcgcgattcggtgaagacctacaaccccaccgattacgccgatttggccgccacgctgaagaacttcgatctcggttcctggatcgacgcctggcagaccgcctatgacgccaccgaggccgccaaggctcagccgatcgatttcaagtctgtgttcgcgcgcgtcattgtgcacgagccgagcttcctcactggtcttgatgcgttctgggccgaggctgatctggccgaccttaagctgtgggcccgtgttcacatgattctgggcttcgcctcctccctgtctcgcgacttcgacaccaccaactttgacttctacggcaaggtgctctccggtgccaagaagcagcgcgatcgttggaagcgcgcggtgagcctggtcaacggcgtttgtggtgaagatgtgggccgcgaatacgtgcgcctgcacttccccgaaagctcgaagcgccgcatggaagagctggtcgccaatctgattgacgcctaccgcgtgtccatcaccaattccgattggctgggcgaggataccaaggccaaggctctggagaagatctccaagttcacaccgaagatcggctacaccaaccactggcgcgattattcggcgctgagtgtctccgcggatgcgctacccgccgagaacgccaaggccgcgaacctgtacgagaccggctatcagctggccaaggtcggcaagtcggtcgacaaggacgaatggctgatgaatccgcagacggtgaacgcctactacgagccaagcatgaacgtcatcgtgttcccggccgcgattctgcagcccccgttcttcgacccgaaggccgaggatgcggcgaactacggcggcatcggcgcagtgatcggccacgagatcggccatggcttcgacgatcagggttcgcagtacgacggcgacggcaagctcaacaactggtggaccgacgaggatcgcaagaacttcgaggcccgtaccggcgcattgatcgcccagtacaacagctttgtgccgctgcagctggttgagaagtacgctgacgagcctgataaggcgccgcacgtgaacggcgcgctgaccatcggcgagaacatcggcgatttgggcggcgtgaacatcgcgatcaaggcgtatgcgttcgcgcttggcaaggcggcaggtaagtccgacgccgaagaagacggctcccccgccgccatcaaggcactgctcgataccgcccccgaaatggacggattcaccggcctgcagcgcttcttcctgagctacgcctccatctggcgcaccaagaaccgcgacgagctggccgaacagtacctgcagatcgacccgcattctcctgccgaattccgcaccaacggcatcgccagcaacgtggacctcttctacgatgcctttggcgtgaccgaaggcgacgccatgtggctcgcacccaaggaccgtgtacgcatctggtaatccccgttatgtaagagaaaaccgctgtgcttgcctcgattacaggcgaacacagcggtttttcatgatgtacggttggcactcagaattcggattcgccgggatcggaagattcggcgaaaccgtcgacataggtttgttgggctgcggactgtggctgattagcgccagcgtccggttgcgacatgacggcatcggccatggacgcagccgccgactcggttgatggagacggtgattggccggaatcggaggtgaccccaaattcgacggggccagattccgacgaggtcgcatacgggtccatacccacaccggatgcggcaccgtccacactatattgcgttggcctcatgtgcggtgacgatgctcgttgcccgtttccgccatccatgccttcggcggcaccgttggcattgccgttaccgttgccaccattgcctccgttcccattaccggcacgctgtggcttgatcagcgacgtggtgccgaaggtcaggtcatgcccaatgttggtggcttcgagaacggttctactgcgcggttcgccttgctcattggtccactgctcggtgatgagtgagccgaccacaatgatgcggtcaccgcggcgaaccgaactggcggcgttcacggccaaagcacggaacgctttgacgcccacccatgcggttccgtaatcctcccattgtctggtagtcgggttgagtcgactgcgggtgctgcccatacggaatgtcagcacgcggaaactctcagttccgcctagtgtcggatcaccggccacaaagccggtgacggtcactgctgcttgttgatttgccatgatcggtcctttcctcggcctgctggcctgttgtttggatgtggaccgccggagcctgtctccggcttcattgccggcttgcacgccccagcggtacctccactgtgaggcatgacgtttgaagcgcacaagggcaactggcaaatgtggatactgtgacgcagttgaaattttaagaatgtggataaatttcggttatccacaacaaagcgccattctgcgactgagcagaatggcgcttgatgcgattaacgccgaggctgagtaagtgggactcagctgagggcggcgaagcgctcggcgagcgcgtcggcggcttcggcggcgggcacggcgaccttgttttcgccgttgcggtcgcgcagttcgatggtgccgtcgttgacgtaatcgcggccgaccacggcgaccagcggcacgccgatcagctcggcatccttgaacttgacgcccggagacaccttcttgcggtcatcgtaaataacctcaaggcccttggcctcaagctcggagaccagcttctcggcaccttcaaacgccacggcgtccttaccggtggccaccacgtgcacggcagccggggcaatcacggacggccaagccaagccggcttcgtcgtggtgtgtttcggcgatgcaggccagcacgcgggaaacaccgatgccatagcagcccatccacaccggcacggccttgccgttctggtcgagcaccttcaggtccagtgccttggagtacttgagacccagctggaacacctggccgatttccacaccacgctcgaagctcaacggaccggaaccgtccgggctcatgtcgccgtggcgaacctcaacggcttccaccacgccgtcggccttgaagtcacggccgtacaccaggttgtagtagtcgacctcgttctcatcggcaccagtgaaccaagcggaacccttgaccacgtgcgcgtcgaccaggtagcgaaccgggttcttcacgccagcagcctcggcctgcgggccaagcaccatcggtccgatgtagcctggcaccagttcggggtgctgcttcaggtcttcttcagtggcctcctcaagctcggcgggagcgaactgggcttccagtcgcttcatatccaccgtacggtcgccgggcacgccgacgacaatcacttcacgccacggctcgtcatgctcttcatcctcagggtgcttgacggtaatcaccacgttcttgaggatgtcggaagcctgccattcacggccatcagtacgcgggtggtcggcgttggcacgctcaatcatgttatcgatggtcttggcatccggggtggcttccttggaagcggcgggagtggcggaagcatcgatttccggcagctccggagtgctcagggcctccacattccatgccttgccggaaggcgccagcgcgaaggtatcttcgccgatcggcatcggagccaggaactcctcggatgcggagccacccatcgggccggacatggcgaacacaggtacgtacttcaggtcgagacgctggaagatgcgctcgtaggcgccgcgctcgtcatagtaggccttgcgcatgccttcttcatcgatggtgaaggagtaggcgtccttcatgatgaattcacgaccacggatcaggccggcacgcggacggaactcgtcgcggtacttggtctggatctggtacagggtgacgggcaggtctttgtaagaggagtacatgtccttgaccagaagggtgaacatctcctcgtgggtgggggccagcaggtaatcggcctcgtggcgatcc

SEQ ID NO: 63 - DNA, 11355 bp, Unknown
  R206_24m  MAG No. k141_1737
ccggcacctgctcagggcggccggactggcgaaaagcacgtattaccatcttctgtcgcatccggccgccgtgacccggccggacatcgagccgatggtcgccgagatattcgcgcgcacgcccaacgggtgcggccaccggcagatacgcatgtgcctcgtgcacgagttcggggtgcgggtgagccacaagagcgtgctgaaggtcatgaggcgcatgggcctggaatgccggatacgcaggccgaacccgtaccggaaatacagctcgtaccggggcgagacgggcgcgagggtggagaacctgctgaaccgcgacttcacggccgaccggccgtgggtgaagctgggtacggacgtcaccgagttcagggtcgccgacggcaaggcgtatctggctcccgtatacgatatgggatccaaggagatcgtggcctgggacgtcagccggcatcccgacatggcccagcagtggcgcctgctcgccatgctcgaggagaagctgcccgaagacgccaacccgatcctgcactccgacatgggttggcagtaccggcaccggtggtggcgcgaccggctcgcgggactgaacatccgccagtccatgagcaggaagggcaactgcatcgacaacgccgcgaccgagcaggtgttcggccacctcaaggacgagttctacgccggacgcgagttcgcctcatacgaacagttcaagaacgaactggacgcgtacatcatccactggaacaccaaacgccgccagatacgactggagggacacaccccggaggaattccggaacatgtccctcacagcctaatcaggtacccttaataaaccacgtccaacaatcggggcgcagttcagtttccaacaccggggcttcttattatgttgtgctatcgcaggatttcagctggagtctattacgccctgcccatcagcgtcaggacaatcagcagcacgttcaacgccacaatcagcgccacgacgatcataaagatcacgtgcttgacggttccatcagcccacttgcccatgagttccttgttatgcgtgtatcgcatcagcggaatcacggcgaacgggatgccgatggaaagcaccacctggccgatgaccagcgcctgagtcgggtccttggcgaaccacagcacaatcagtgccggcaccagcgtgaccacgcggcaggcccacatcggggcgttaacgtgcagcagaccgtgcatgatttccgagccggcgtacgtgccgaccgatgtggagctcagcgatgaagccagcaggccgatggaaaagatcgtgccgatcaccgggccgagcacctgcgtgatcgcccgctgtgcgccgtcgatggagtccgtgccagacatgccatgcagcgagttggcggcgagcaccagcatcgccagattcacggtgccggccagcaacagcgcccaggccacatcgattttcgagcctctcagctgcgttttgatcgacggcttttcgccgcctgcgtaatggtcgttcaccagcgtggagtgcaggtagatggcgtgcggcatcacggtggcgcccagaatcgaggcggccatcaacaccgagtcggcgccttggaagcgtggaatcatgcctttgaccacttcgccggggttcggcggggctacgaacagacccgcgatgaagccgaatgtgataatcagcagcatcacgatgatgatgcgctcgaatgtggtctgtgtcttgccgccttggaaccacagcatcaccgtggagattgtgccaatcgccaaaccgccgatgaacagtggaaatccgaacagcaggttcagggcgatggcgccgccgatcacctcggccagatcggtggcgatggcgatgacctcggcctgcatgaagaacatgaagcggccggcatcgctcatacgctcgcccagcagttccggcagggatttgttggtcacgatgccgagtttggcggactgatactggataagcacgctcatggcgttggcgagcaccagcacccataccaacaggtagccgtatcgtgcgccggaggtgatgttggccgccacattaccaggatcgacgtaggccacggccgccacgaacgcggggccaaggatgctggccagcgcatggtcatgcggcttcttattgttgttcgtccctgctccggccccggttccgactccggcaagctggcgttccttcccgatttccggtgtttcctgttcgatgtctgccacagcgttcgtcatagtggttgccgcagtggtatctgccacggtgtgtgttactgccatattgtttgtacctgttcccttcataccgcgcacagttatagcgcaggcatgtttcccgagtcaacagacggacaatctgcggacgattgatggatgaccggcggactgacagctggcatttcccgccatctcgctcatgaaatgtgaaaaaccgccgaaaactcgctcatgaaatgtgccagacggtagaaaactcgctcatgaaagtgtaaaatcattgatatagcagtaattcggaaaggggctcctcatgtatctcaaacgcaaagccgatgcctatctcaatgcatggaaatccgacccgaatcgctccccgctaatcatcaagggccctcgtcaagtaggcaagacagagactatcgatcactttgccgcacacaactaccgttcggtagtggaaatcaacttcgttgaggaaccgaaatatcgtgcaatcactgcggacggttatggcgcgaataccatcgtccgcaatatttccctgatcgacccagccaaaaagttcattccgggcgatacgctcatctttttcgacgaaatccaggcccatcctgatatcgccactgcactgaagttctttaaaatcgacggcaaatatgatgtgatttgcagcggttcaatgttgggcatcagctataagcaaatcgaaagcaatagcgtgggatataagaccgactacgaaatgcgatcgttggacttcgaagaatttctgtgggctcgcggatacgatgaggccgtcatcgaaagcatgttcacccacctgtgtgatgctacgccattctctgaagtggaaatgaacgtcttctccacggcatttatggattactgcgtgcttggcggcatgcctgcggttgtcgcctcccatatacgcactggcacgttcgagggaacactgcaattgcagcgccagcttattttggactaccaggaggatatccgcaaatacacgcaaggactcgatcaggcacgaattctcaacgtgttcaaccatattcccgtgcaactcgccaaggaaaacaagaagttccaaatcagcaaggttgccagcggagcgcgtttcaaagactatcgaggatgcgtggaatggcttgaaacctcgggaatggtgaatatctgccgatgtatgtcctatcctgaactgccgttgaaaggcaattatgacgaaaacaagttcaagatatatttcggcgataccggtctgttcgtagcgatgcttgacgacgaggccagtgatgatctgcgggccaatcgtaatcttggtgtctataagggtgctatgtacgagagcatcgtctctgaagcgctacggaaatccggctatgacctgtactactacaaaaaagaggattccacactggaacaggatttcttcgtccgcacgcgcgaatggctggtgccggtggaggtgaaatcgaaaaaaggcaccgccaaatccatgcggacgctaatcgcttcggattcttatccggaaattcagttcggcgtgaaactatccgccggcaatatcggtagcagcgaacacgtgttcaccacaccatacttcaccacatttttgctccgacggctcctgcgcgcttatgacgaggggcaggcacctatgctcaacaatcctgagcggtagcccctattcgtctgcgggcacggcctggcccgggcaggtatggaggacggcgagcatggcgtccttttcttgggaggtgacggtgagctggtacttgtctttgacgccaatctggcgggccacgtagtcgcaacggtagtcggcgttggtgggtagccagtaggcggcggaagccgaacccttctcctgattggccggaccgtcgacggccagcaggttataggggtcattgccgaattcatggcgtttggcagtggaccagtcgtgcgcaccggattgccaagcgttttcaagggccaccacatggtcgatctgcactttggcgctggtggcgcggccacgtacgaaatggatggtctgggcggtgtacggatcggccagtgtgccggactcgaccacacaggaaccggcgtatttgtaggtgatgtccgtgagatcgcgggcgagcacgtcgtcgcgtacgtcgcagccattgccgtcgacgtcggtggtgcggaaaccgaaggaatcgcggtcgtagccggaggagctttggttgtcgtctacggcgagcgcgttcaaagtgtcggcggctgaaccggtggcagtgtagccaccggtgattttggccacgtcggagctgacctgcggcagtaacaggccgatggtcacaccgattgctacggcgagaacgatgagaatcagcatgcgctccagcggtccagaggcgttgaaacgacggcggaagtgggcgttacgacgtgccatcaatcacgcataggtgaaggtgagggggtcgtggccggcgcgggtggggccgtcgagggcgtcgatggcagcgtgttcatcggcggtcagggcgaagccgaacaggtcgagattctccctctgacggtcggcatgcacggacttggggatgatgatcgtgccgttttcgatgtgccagcgcagaatcacctgggccgggctgacctcatgggcggcggcgatcttctcgatggtgccgtcgccggcgttgaggtcggcgccacgcgccatcggcgagtaggcctccacggcgatgccgtgcttcttgcagaacgccaccacttcgcgctgctgccacgtggggtgcagctcaatctgattgacggccggccatgcgccggtctccccgtgcagacgcttcagatcggcgggcatgaagttgcatacgccgagcgtgcgtgccatgccttcgtcgcgcagcttgacgaacgccttccaggtgtcggtgctgcgccagtcgaacggcgtgggccaatggatcatgtacatgtccacgtaatcgagctggaggagtttcagggagttgtcgaatgccttgagcgcggagtcgtagccctgctcggagtcgcgcagcttggtggtgacccacagggtctcgcgcttggcgccggtgttgtatccggaagcggcgagcgcacgacccacgccggcctcgttgttgtatccggcggcgccatcgatgtggcggtatccggcttccagcgcagattcgacgacaggggccacgccctcgtcatcgatacgtagcacgccaaggccgacctgcggaatggaatggccgtctttcaaggcgatgtccggcacgttggcgggattgatatgtccgttggtcatggcttgtgatgctccttcatgtactgcaactacacgccactgtacacggttatgcaggcgatgtgcgggtgctgcaaccaaacggcatgattgcgcccggccttccgtgtgggagagccgggcgcaatcatgacaacatcacgctctactcctgcgaccggccctcgccctattgttcccgggcgcgaatttgccccggtacaggcgtcaatcgattgacgtttgcaccggggcagaaatcgttgtcccggtacgcaatttcgggccattttcgagaaccaggacaagacaatccccaaagtccacataccccgacaaacagaatcggcggaatacagccaatcccgaaatcaacatactgtcccggttctcacgtagaacgattgacgtgcaaaccggggcaacgggaattgtcccggtacgcgaaaaacacccgttttcgcaaaccaggacagtgatttctgtcctggtacccacatcaaacgattgatgcacgaaccgggacagaatcgcatcgctgcgccgagacagacgcatctgacagccgacaaccgataaacgacagccgacagatggcatctggcagccggttgccggctgccggcaaccgcatcataatgccgcatcagtctctatcaggagcgcttacgacgcaaagcaagcgagaccccgccggccacgccgagaacgacaaccgcaagacccacggcagtcaccgcgctaccggtattgctcagcacaccagtgatcttgtcgccattcgcaccgttggtcttatcgccctcgcccgtatcgggattgatagtagccccgccattacccgcaccgtccgagccgttgccggaaccaccttcggcccgagcggtaaccgcaaccgtataggtttcggtgacattcggattcgacttgagcgttacggtaaccctcgccgcatcagcgggagcggagaaatcgtaatcgagcgtgaactggtcggcggcaagcgcctgatcgagtttggcgagcgactcgttggtgtactcatcgcgattgattttcccggcttcggccacggccttgtccaggttctccgtggatggcttcaccggagtttcggtctttttgacgagtgagaccttgtccacattgtggttgctcaactgtttggcgtaagtggcgtaggtgccggctttctccgggttggtgaaatgaatgacgaccttggcttcggggagcacttcgcgtatggctttggaacctgcggagaatactttggatatgccgtcccagccggagatgccggcgattttcgcagtggtttcgttgccgacctgcaccatgccgacgtccacgccggcttgtttgaacgtggtcagagcctgcttggtgtagtcgtatacggtgtcggcggttttgtccgcgtcgccttcaaaggatttccacgccttgggcacctgctgcttgctggggtcggcccagaaatcggagtaatggaagtcgaccagcactttcagccctgctgccgtggctcgcttggccatggtcagtgcgcgatcggcgttgacgttgccgccgccatatccttggccgtctgcggtgaacggatcgttccacacacgcagacgcacatagttcacgccggattccttgagcaacgtgaacaaatcctcgacctcgccattggcgttcttgaacgtgacgccgctttcttccagcgagagcatggatgagacgtccataccgccgatgaaatcatcgcttaagccttggatggccttgaccgagacgtcggctttaactggttcttcttcggcggcgtttacggtgaacgtgcctcctgcgcagagcattatggcggccacgccagatgccataatgcgagtaagcgcggtatttcggcgcatgctttttctcctttgaatggtgaacgctcagaacgaacgcccagtgatgcttggcgcttcctttccttatgcgccacgcggtacagctgtgtaccacgcaatcgtcaccttagcactttatgccgtgttggtcaaccggtgtatcaacgcctcgtacggcccagtacagcaacaccagcattacagcaatgtcgttcagcgtgtggaggcgcgggcgatgacctgggattcggtggtgagcagttcggacttggtgatgctgccgtcgatgcgtccgaggatacgattcactgccgtgggagccgtccagtcaaggcgggaatccatggtggtcagcggaatctgcaggtagggggcttcctcgttgttatcgaagccgatgacctgcacctgcacgggcacctcataaccagcggtgcgcagagcggtcaatgcgccgatggccaactgatcgttcaaggcaatcacaccgtcgaatggcacgccggaatcaatgagccgctgggtcacacgggcaccggctccgatggtccaatcctgatcggtgttgccaatcagctgcggatccaaggagagcccacgcctacgggtctcttcgatgatgccgcgcagacgcagctgcgcgttgccttctacggcattcagcaatgcatcttcgtcgtaaacgtcacgggcaccgatcactgcaagtctggtggaaccgcggtcatacaggtagcctgcggccatggcggctgcggatacatcgtctggggtcacgtgatccacaatgccccacgtggtacgcgcgccaacgatgaccagcggaaaatcaaccttcagatcatcgggcgaaatgttttccacctcgctcatggaaaggatcatgccatcggacaccgtggagttgaacttcttcagcagatcgcgcgcgcctttcgcggagccttccgcatacgtggtgacgtatacggaatagtcgcgctgacgggcggcctcgatggtgcggttggcgagctcggccagatatggcggaatcagcgaaggcacggcgagggtgatgaagccggtgtgatcgcggttgaggttgcgggcggccacgttgactcggtagtcgaggtccttaatgaccgactcgaccttggcacgggtctcatctgtcatacgcccggagccattgatcacgttcgacgcagttttgagcgatacaccggcggcctgagcgacatcgcgtagcgtcactcgacgcttggctgttttctcgtcgctcatgccgcactcctctatccggacaacattgccattctagcgcggtttagcaggacgttttagcgataagaatggcgttgcggttcagcgtatatccaacggcgtcagtctcgcaacggtgggcgatgatgggatcaccttccacaccgttgatggcgacgggctggtttgagcggttgaggtagaaatcgaagcgggtggagccgtctgcggatcggcggatggtgtgcaggatgcggggatctgtggtgggataggttggagtttgaccactctcagtcggctgcgccgacaactcccgccagcgggagccaagtgctttgagtaactgggcaatgtcgtgacggttgaggtcgcagcccacgtagatggcggtaccgttgccataggggcggctggtgatggcgggggtgcgctccagctcccagtcggcggcggactcacctgcgtaagaggcaagcactgtggtgtccgcggctacggaagtcacgtcgttctgccacaggcgggtcgtcagaccattggacaggctgatttcgctgggctcgtcttcggcttcttcaccaaggatgttgaattcttcggagcggatgccgagcatgtcgcgtaggagcccgttgccggcgccggggtagccgccgaggccgatgtggaagtgctcgtcgatcaggccggcggcatagccgacgatgacggttccgccggccttcgcgaagtcggcgatacggagaacgtcttcgtcggacaggctgagcacggtgggcagcacgatggttttgtagccggtccagtcgtaggcgagcggcaccacgtccgcgcgcagcccggcatccaggaagccgcggtaccagtcgcgaacgtcgtgccaatggttgagtttcatgctgggcagggtttcggagcgtgtggcccattcggattccgcgctgaacaggatcgccgtgccggcacgctcgagctcagtgccctgcagcccggcgtcggagagggtcttcagcgccttaccgagctcgcatacgccgcggaagaccttggaatcggcacccgcgtggggcagcatggcggagtggaacgcctcggcgcccgacttggattgccgccattggaaaaagcagatggcgtcggcgcccatggccacgtgggccagggagtcgcgcatgagttcgccggcccgtttgcgtgtgttcagcggcttccactgcacggctgaggtggagtgctccatcacgtaccacggcttgcccagcgcgagggagtccatgagcgcgtccgagcaggcgagttcgtccaggtgggattcgccctcatggaagtagtgatcgttggacacgaagtccacctcatccgcccatttggcgtagttcatgacgcactggtcggtggagaccatgaagttcgtggtgaacggcttgtcggggcagatctgctcgatggcgtcgcgttcggctttgtagaagtcgagcagcatgtcgttgccgaaccgctcgtaatccaactgctgcgacgggttgaccatggcgtcgccgcccatgtgacgtggcagcagcacctcgtcgaaactgttcacgtgctgcgaccagaaggccgtgccccacgcctcgttcaacgcgtcgatggtaccgtacttggcctcgcaccacgtgcggaacgcggccaaggcgttgtcggagtagtcgtagcggttgttccagccgtattcgttgcccatgtgccaggcggtcacatacgggttgtccttgtagtgttcggcaagtttgcggcacaggcgcagcgcgtattccttgaacaccgggcttgtgggctgccacgactggcgtgagcccgcgttgacggtatgaccataccggtctaccggcagcacctctggatgggattcgtacagccacagcggcgcggcggctgtggcggaggccaagtccacggcgatgccggctctgccgagcctgtcgatcacatggtcgagccactcgaacgtgaacgcgccctcgaccggctcgatcttgtcccagctgaaaattgccagcgatacgacgttcacgccggcctcacccatgagacggatatcctcgtccagcgtctcctcgggccactggtccgggttgtagtcgccgccgaacgcgatgccgcggccggattccgtcagcagggacggccacctaaatgctctatgagtagtcatattaatcaaatcctttattgtatcggctcatggccggtgctgtgtttgccggttttgggctttggctcccctcagtctcactgcgttcgacagcgtcatcggcgctttgatcaaggcgtgaatgctgcgttgcgttactgcatcgccatgttgccatgttaccgcgttattgcatcgctacgttgccacgttgccacatcacattgcattgccgcattgctgcgttgccgcatcacatatcgcaacacaaacgcagcaacgcaatgacgaccggagatggcatcgccgccacccgcgaggaaccgcagtgcaacgcggtaacgtaacgcaatgcgatgtgattcccgcgtagttacaggcagttacagattgagtaccgcatcagcaatgcgcatggcggtttcgcggtgggagaccagcaccacagccgcgccgcgctccttgtctgcatgctgctcacccacggccatagcgtgaatggaacgtagaataatagcctcgttcaaagca

SEQ ID NO: 64 - DNA, 10980 bp, Unknown
  R206_24m  MAG No. k141_2062
cgccacaacaacgaggagctcgcctcctcgtggggcaacctggtgaaccgcgtggccaacctcatcaacaagaacttcggcgagattccgccgctggacgaggattcgatgaccaacgaagaccgtggccttctggaagaggcttccgccgcgttcgacgtggtcggctcctccatcgaaacccaccaccagaagcacgccctgtctgaggcgatgcgtgtggtcggtgacatcaacaagtacatttccgccaccgaaccatggaagattaaggacgaccaggctcgtctcggcaccgtgctgcacgtggccgctcaggccgtgtctgacgcgaaccacctgctcgcgccgttcctgccgcactccgcacagaaggtgtgggaggcgctcggcggcaccggtaccttctcgccgctgcctgagctcaaggaagtcgaggatctcgacaagcccggcttcacgtacccgatcatcaccggcgattacgagctcggtgtgaacgtgcacccgtggaagagcgaggcgatcgaggtcggcgccgtggtgcctaagcccgcaccgatcttcgccaagattccgaccgaggccgtggaagaggagctggctcgcttcgatgaagcgctggctgctcgccgtgccgccgaagccgagcgtctggccgccgagaaggccaaactcgccgccgagtgattcggctgctagctcgtagctgacgggccacctcgcacatgaagtgttgcgaggtggcccgttgccgtatgtgcggtcaagccccgacaatgcgaggccggttgtcggcgggcgtcacaaattcgtcacactccgccaagacttttcccagacaagcacatcaattcgccaagcatggagcggttatatagaagatgtcaacggaatgaagttcataccggtggcgaggttcttcgaaccccataactgaacccttcttctctcttctctctcacccggcggccccctccgccgggtttcttttttaatgctgggaatgccatgggccgcatattgaaaaaaggattatggcagagtgttgtctgtttacaataaggcattgctgttctagaaaataacaaagaaggggggactgatgatgtataccgtcacattttcgggcaacctgactcaagcggaatcggccttggtcaagcgaggcgccatacagatcgccgcgttgctggccgcaaaaatcactggccgcggactcatcatcaacgacggtgacaccgaatactcatgggatttcatcctggtcgatgccagcagcgatgagcggcacacctttgacgagaggctattgcggatgctgtccgactacatccacgccggtttccccgatgccgtgatccgccacgccaagcacgaggctccaaagctcggcaaataatattggtcgcgtggtgagtcccatacttccgtcggaatatcgctatcgcgatatggtcgcatgcctgttgcgcattgaagcgttcgacctatgcgcagttgatgttccggtgatgacggcaaccgattgacgcgattaccgggacagatttcgctgtcccggttcgtgatttcggcttctttttgggaaccgggacagccccccttgtaaacgcccattatccgtaatcccaaaaccccggaattccgccgatgtacgatggcgaatattgcacggtggggtgataggtgaatgaaattttgtcttggttgctcaaaaaggggcgaaatggagaaccgggacagcgaaatctggcccggtccacacataaatcgattgacatcgctaccgggacatcggacacggacaccgagtcgcgcagcgtcggcgcaacatggatactgtacgactttcgcgataaacgttatattcttcgtcgcctccgccgggcaagctcatcgagtggcgttgccgtcaaagtgaaatcgaatacggcacctcgcaatgccaactgccgcccgacccggtagacgagttcggcttgggatggctcatcggccatgttcgcggcagtggcgatgatgacgatccaatgatgatgtcgcagcagttcgcgcttgtcgttgtcccgccgccactggtttttgtcggtgcgatgatgatcgccgtcatattcgatggcgacgcgaaattcgggccaagcgagatcgagcgttatcggcgcgccgttgctgaatgtcgcgccgggcaccgtgtaatttgtcacggctggcggaagcccgtatttcgtcgtcgcgatgcgggtctttgattccatcggagagtccacgcggggcgtaatgaatgcaagagcgatcatgcacttggattttgcgttgaatttcgggagtccagtgacttgccgcacgaagtcctgataaatgccgtcagcagtgcggccgttcgccagacccggcttgcgggcgattgccgtaaggattgcgtcgccaagtatgaccagcgattcgagcgatatatgagcggcgagttgtgcccaagtgtgtatcagatccagtgcgtacacatgtttgttgatacgcacattgtgcgcatcgctcagcggcttccagatgtgtggtgtcgttggcggcacgatggcacgtattcgtgtgcggtgtgagtcggagacggtatggagctcggcggggtcgatatcgcaatccttgggaagcggcacggattgcagtatcagcgatgtggccatgccgaagagcaccggttgcccgagctgttgcgcggcgtccgtgcatcgtttaagcatttcccgcttacgttgggtgagggtttcgctcattgctggcgacacagggcctgtaatcacagttggcgcggaactcgccatacgtggtgatgaacgtagctcaggattgatggtgcgcgcagacgcaacgcccggtgtgtggggccgggtccagccggacggttcgtcgtcgaatacgccgggcggtggagtgggcaatatgtcgttcatgacgccaccgtagcgcagcggtcacgtgctcgctatgaaaaccggggtatgtggctctagcttgcgggagatgtggataactctgtggataactagttcggaacaattagcgaggccggaacctaccggcaattggccgatgatgacggcacttttgctcagctcagccgcgatagtctcgaataggtgcggccgggcgtactcgcataacgtaatgccccttctctctgaacagggagaaggggcattcgaatatatgctcccgccagcggaacgtcagcggcagcggcgggtgaggggctgccaggggtcgagctcgaccggttcggcggcgagcagggcgcgggtggcgtcatcgaggtattccttgcggatgatgagctcggtgacgtagcggtcgaaccaggcgtcggacatgacgtagtagccgtccttgccggcgtccttgccccagctgttctccaccttccagcggttcggcttgccgtcctcgccgaggttcacgccggtgaaggtcatcgcgtggttgctcgggctgtcgccgtattcgaggccgtgggccttgtcgccggtgaattcggtgccgaacagctggtcgacgcgcaccacggactggtcgaagaaaccgtccttgcgcagggcgaactgcgtgcagtcgcaggcgaaccagatcgggtggcctgcggtgagctggtcaagcgcggccttcttgaacacgtccagcggcacgttgacgaattccatatcgccagcctcggccacgttcgcgctgaagcggatgcggtagcgctggttgaacgggcggttcttgagcggggcgttggccagcgtcacgaaatcgttgacgtccaccggcacgtacttcttgtagaactcaagcggggtgataccgatctcgcgaatctgcgggcgctcgtccttgccggttttcggcttgtcggacttgtccttatcgcacttgcaggccttggcgtcggatttgccctcgcatttgcaggagtcgccgcacttgcaggattcggtcttgccgtctgcgtcgacctcggccttgcacttgcaagcctcgcccttcttatcctcatcatcatccttggtgcgcgcgaagaagtcgaacttctccggcggctcgccaagcgacacggcgcagatgcggtacacggtgcccatgtactcgtccttcagcgcgcgcagctcgtcctcgccagcgcccgcagccgaacggcggcgcagctcggctgcgaactcgcgcagcttggagttgaggtactgcttgaaatcatcggaattacgggagttctcggactccgggtaggcgctcttgggcaccagaccgtacttgttcaccagcgcggcgaacatctgccaccagccgccgtcatcggacgggccccagttgatggcctcgaacaggcgcgagtcggtgggctcgtcgagcgtgcgcagcacattctccaggtaggtgttcgacttctccatcgcatcccagaagaacaggtaggtctcggagaactcgaagtcctcaaggttccagcgatgcataagctcgtagcgcagcgtgttcagggaggcgaacatccagcagcggccggaacgctcctgattggtgatcgaaccctgcttgagttcgatggagaagtcgcgcggcagcgcacgtacgccgcgatagtcggtggccgccttgagtacgccggccgaaaccgccgcgtccgccgcgatcaggttggcgcggtccttgttgaagtcttcggtgtacgtacgtagaagttcgggtttgatggcccgtgcgctggcgtctgtcgtcatgatgcccctgtctgatgctgatgatgctgatggataatccgttgccggcggcggggactgtcaccatccgggccggcggactgctgacacgaaagtataaggcatgtccagcaaaggctcaggaaatacaaaattaacaaacggatgtttgcccaatatacagtaagtgttttcgcggttttccgtacaggaaaaagtcggaaaagtcaatacccatattccatatattggactcaatttgtggttttgagcggggggggggtatcactttcccagttatttgggaggtggttgggtgttcaagtacatcatcaagcgcattgtgaactacgtgatcatgctgttcgtggcagtatcgatgacgtatttcctggccagcgcattcatggatccgcgttcgaactacatgtcgcgcaatccgcatccgccgatcgcgtcgattaaccggtcgctcgatctggccaacatcaacgaccagacgccggtcgtcatccgctatttccgctggctcaagggcatcctcacccagtggaactggggcctgagcccggaccagtcgccggtggcgccggccatcgcctcccgtatctccgcttcgctgcagctggtgacgctcgccaccgtgctctccatcctcttcggcgtgagcatcggcgtgtacacggccatccgccagtacaagtggcaggaccgcgtgctcaacaccaccgcaacgttcttcctggtggtcccggccgccgtcatgggcctgatggtggtgctgctggccatcaacttcaacaacatcgtgggcagccgcgcgttctacgtgaccggcctgcactcctaccaaggctccaacccggtgctttgggtgtttgactatctgcagcacctgatcctgcccaccatcgtgatgacgattccgggcatggtgggctaccacctcacccagcgcacgtatctgctcgacaccatgaacgccgactacgtacgcaccgcccgcgccaagggcctgacgctcaacgcggccattcgccgccacgcactgcgcacctcgctgatcccgaccgccgtggacgtggccttctccatcgccggcgtgttcaccggcgcggtgatcaccgaaaacgtgttcgccatcaacggcctgggcatgtacttcacccagaccatcgccaacaacgacatcaacggtgccgtggccgtggccgcgttcggtggcgtgtgcacgctgtccggcgcgctgctggcggatatcttctccgcctggcttgacccgcgtatccgactgagctgagccccgcgcaaaggacgatctaatatgatgaacgacaacgagaacatggtctccgacgccgccgcccaggatatggaactcaccgatccgcagggcagcgaaccgcagtccgccgacgccaggaacgcccaggaggcttccagcgccgacgacttccaccgcaccggccgcatgcagctgtacgtgcgccgcttcatgcgccgcccctcggccgtggtgggtctggtggtgctgattctgctgattcttttggcgattttcggctcgaaattctcccagtggagctacgatgagcccgatttcgccgccctcgcctcgccgccgtccgcccagcactggctgggcaccacggtcggtggctcggatatgtacgcgatgatcatccgcggcctcggccgttcgttgaccatcggtatcttcagctcgttcggcaccacgatcatcgccgccctggtgggcacggccgtggcgttcttcgaaggctggttcgagaaggtcggcatgtggctgctggatatgctgctcgtcgtgccgtccttcctgctcatcgccctgatcgtcggcatggcggccggcggcagcgactggctgtggctggccatcggcctgaccgcgttcggctgggttggctatgcgcgtacgctgcgcacgctgaccctgagcctgcgcgaccgcgaatacatccgcgcggcgaagttcatgggtgtgccgtccttcaccatcatcgtgcgtcatctggtgccgaacctgggttcggtgctggtcatcaacaccgtgctcggcgtgatcggtgcggtcaacagcgaaacctcgctgagcttcctgggcctgggcatcaaggcgcccgacacctcgctcggtacgctgctcaacgccggccagtccgtggtgcagacctcgccatgggtgctgatcttcccgtccgtggtgctggtcgtcctgaccttctccgtgcagctgatcggcgacggactgcgtgacgccatcgacccgtactcccgttccggcggcaaggccgagtgagaggggagacgggcatcatgagcgacgaacgcaacgcaagcaacgtaacaaccaacaccaaccccaacaccacaggagcgcaaggcatggcatccgaaccggtgatttcagtacgcgacctcaccgtcagcttcgcctccgaagccggcaccgtgcacgcggtgcgcggcatgaacttcgacctgtaccccggcaagaccctcggcatcgtgggcgagtccggctccggcaagtccgtgacctccatggccatcatgggcctgctggacaagaacgccagcgtcaagggctccatcacctaccacggcgaggagctgctcaacaagtccgatcttgagatgagcgagatccgtggcaagggcatcgccatggtcttccaggacccgctctccgctctgaccccggtgttctccatcggcgaccagatcaaggaagcgctggtcacccacaatccgaagatgaccgaacagcagattcacgaccgctccatcgagctcatgaacctggtcggcatcccggacccggaggaccgcctgaagtccttcccgcacgagttctccggcggcatgcgccagcgcgtgatgatcgccatggccattgccaacgacccggacgtgatcatcgccgacgaaccgaccaccgcactggacgtgacgatccaggcccaggtgctcgaagtgctgcgcaaggcccagcgtgaaaccggcgcggccgtcatcttcatcacccacgatctgggcgtgatcgccggcgtggccgacgacatcgtcgtcatgtacgccggccgcccggtcgagaaggcggacgtcgactccatcttcgaccacccggccatgccgtacaccatgggcctgctgggtgccgtgccgcgttccgaccgcgaacgcaacagccgcctggtgccgattcctggctccccgatgaacctggtcaacatgcccaagggctgcccgttcgcgccgcgctgcccgctggccaccgacatatgccacaccaccgagccggccatggagccggtgccgggccgcccgggccagttcgtggcctgccaccgcacccaggagatcgtggacaagggcctgaccttccacgacgtgtacacggtggccgaggccgccaagtcgaagttcgccggcatcccgcgcgacgaacgcaagatggtgctcgacgtcaagcacatgcgcaagaccttcccgctgaccgccggcggattcctgcgccgtaagatcggcgaggtcaaggccgtggacgacgtgacgctggacgtgcgcgaaggcgaaaccgtggcgctcgtgggcgagtccggctcgggcaagtccaccacgctcatggagatcatggagttcgagcagccgcaggacggcgagatcgagatgttcggcaccaagctcgaacacaagattccgcgcgagaagcgccgcgagctgcgttcggccgtgcagtatgtcttccaggacccgatgagttcgctcgacccgcgcctgccgatctacgacatcctggccgagccgatgaaggtccagcactactccaaagagcagatccgcgaacgcatcggtgaactcatgcgtctggtggagctgaaccccgaccaggtggaccgcttccccacgcagttctccggcggtcagcgccagcgcatcgccatcgcgcgtgcgctgtcggtcaacccgaagctcgtgctgctcgacgagccggtctccgcactggacgtgtccatccaggccggcgtgatcaacctgcttgaggacctgcagaacaagctgggcgtggcctacctgttcgtggcccataacctgtcggtggtgcgccatatctccagccgcgtggcggtgatgtacctgggccgcatcgtggaatccggcgacaccgaagacgtgttcgagcacccgttgcacccgtacacccaggcgctcatcagcgccgtgccggtgccggacccgaaggcggaacgcacccgccagcgcatcgtgctgcagggcgaggtgcccagccccaccgagacgttcgaaggctgcccgttcatgggccgctgcccgctcatgcccaagctgagcgccgaacaacaggcccgctgccgcggcgaacgcccggcgctgcggccgtatgacacttcccgaccgagcggccatcaggttgcatgccatttcgcatgacggtcggaaccatatagaggaggaaataacaatgaacaagacacgtaagctgaccgcgctcgccgcggccactgcggcgcttgccatgctgcttgccggctgcggcgcgggcaatggcaacggttccagcaatgcctcgagcgccaccgaaccgccggccggcatcgattcgtcgtacaccggcgacctgcccatgccgaaggtcaccgagcgttacgacaaccaccagagccgtgacaacgtcaaggacggcggcacgctgaccctgtccatcgtcgaaatcggcccgaactggaactacctgtcttccgacggcaacaccggctacatgtccgagctgtggagctggtaccagcccagcctgctcatgaccgaccaggtcaatggctccccgattaaggtgaacccggacttcctgaccgacatgaagctcgtgagcaaggacccgatggtcgtgcagtacgacatcaacccgaaggccaagtggaacgacggctccgacatcgactggaccgccttcaaggccacgtgggaagccaacaacggctccaacccggactacaacccgccgagcaccgacggcttcgaccgtatcgctagcgttgagcagggcgacagcccgaagcaggtcaaggtgacctacaagaccccgtactacccgtggcaggaagtcttcggcgctctggtgaacccgaaggccgccgacccgaagaccttcacccagggctgggtgaagaacccgcacaacgagtgggccgccggtccgtacaaggtcgactccttctccgactcccaggtcaccttcgtgccgaacgagaagtggtggggcaacaagccgaagctggacaagatcgtctacaagcagatggccgacaccgcctccctcaacgccttccagaacggcgagatcgacgccgtggaggccaacaccaaggacgacatcaaggccatccgttccgtcaaggacgcccagctgcgcatcggctacagcaccaagacccgcgtgctggagtacaacagcaagtccaagccgcttgacgacctgcaggtgcgtaaggccatcactcaggccttcgacgtgaacacctacaacaacgtgcagttccagggcctgaactggaaggccgagcagccgggctccgagctgctgctgccgttccagaagggctacgagaacaacctgcccgccgaggccaagtacaacgtggacaacgccaagaaaacccttgaggccgacggctacaagatgggcaaggacggctactacgccaagggcggcaagacccttgagatctccttcactttcttcggtgacaacgccacccagcaggccctcgccaacgcctaccaggcgatgatgaagaaggccggcatcaaggtcaaggtcgtgaacgtggccgagtccaagttctccgacaccgtgtcttccggcaactaccaggtgctgccgatggcttggcaggctccgagcgccatgaccttcgtggtgtccgccccgcagctgtacacctccgacggcccgtccaacttctcctacgtgggcagcaagaagatcgacgagctcgtcaagaaggctggcagcctctccgactacgacgagcagaccaaggctgtgaacgccgccgagaaggaagccctcaagctgtatggcactatcccggtctccaacccggcttcgtacctcggtgcgaagaagggcctggccaactacggcccgtccggcttcgccggcaacctgccgcaggacatcggctggcagaagtgatga

SEQ ID NO: 65 - DNA, 13643 bp, Unknown
  R206_24m  MAG No. k141_2336
cccgcatggacgacaagcagctcaccttgctacgtcgccacaagatcggcttcatcttccaaagcttcaacctgttgcccatgttcaccgcagagcagaacatcctcatgccgctgactttggccggtgataagcccgaccacgcctggttcgacctgctcgtagaaaccttgggactcaagcagcgcctgaaccaccgaccgaacgagctgtccggtggccagcagcagcgcgtggccatcgcccgcgcgctgattaccaagccgaagctggtgttcgctgacgagccgaccggcaacctcgactccgtttccagcgccgaagtgctcggcttcctgaagcgttcggtcaacgagcttggccaaaccatcgtcatggtcacgcacgatgcggtggccgcctcctacgccgaccgtgccatcgtattcgccgacggacagatcgtggccgatgaatcgaatcctactgccgaaacgatgaacgagctgcttatggccgaacgcgaacgcgccacgcgcactgccgtcaccagcacacgcgccgacacgctcgcccgtcttgccggcgtagaggatgtgcccaacctgcccatcaccgacgctccattgcccccagccgggagaaccggcaccatacgccatgcccgcgccgccgcacagcacactcgctgagccggaaagcgagagacaggatacccccatgttttccatcactctgaaacttatgaagaaaagcgccaggatgctgattccggcaggcatcgccatcctgatcggcactgcgttcatcgccgctaccttcctgttcggcaacgcgatgaacgatgcgcttgccgcccagaataccgcccagctcggcggtgcgaactacgtgatcagcccggatagcggcaaggacctgaccgataaggaccaggactacatctacacgcgcacggttaacgacttccagcttgaccgcatccgcgccaccaaaggcgtcaaggacgcacgtgccggctacgcgggttccgtgaccgtaacccgtggcaacaagcatgccagcagctacgtcatcaccaccgccacaaagcgcacgctgctgccggtcaccatcacgcaaggagaccagccggcggacagcaacgagatcgccctgaccaagtccgtagccgaccagctcggcgtcaaggtaggggaccgtgtgaccgtcaactcgcaggcggcgcagtatgcgggcaagaccggcgattcggccggtaataccggtgacgctggtgatgagtcggcccagaacgccgatggcacgagctcgcacgacggtgattccgatgccgcgtccggcgcgtccgccccatccgacggcaccgacacggccgccgactccggcatgaccgtgcgcgtggtcggcctcaccgacgacccgaacggtgcctacgcctactacggtggcgcttccgtgctttccgacaacgtcatcaccgcaatggccggcagcaacgatttcggcaacctgcctgtctacctcgtctatctcgacatcgacgatgccagcgacacggccgcggcatccaccgtaaaacaggtcagcacactgctccctaagcatttcagcgtgcaatcccgtgccgcgctcgtcgaggaatccgtcaaaagcatgagctcgggcgaaaccagcatcaccaccatcttcctgctgagcttcggcatgctcgccatgctggtcgcggcactcgtcatcgccaacaccttccaagtgctcgtggcacagcgccgccgcacactcgccctgctgcgcaccatcggcgcgaacaaaagccagctgtatgtctccgtgctgtttgaagccggtgtgctgggactgatcgcctccgcactgggagtgggcctgggcatcggactcatggccgcactatgccagtcgggcctgatgaaagccaccggcatgaccatgcgactggtactatccggtccggtgttcacggtgcctatggcattcggcatcattatgacggtgattgcctcgctaggctccgcgcgttccgctaccgccgtcaccccgctggaagcgttgcgacccatcgaactgaccgacacgcgacgggccggtgtggtccgcgccgtgatttccatgctgctgattgtgggcggcgtggcactgtgcgcattctctgtatggcagatgtccgagaaaatcgccggacgtgattcaatggccgacaagcagtattcgctggtgctgctcgccgccatcatcggatgtgcattgatcttccttggactggtgctttccgccacgttctggctaccggtgctcatgcgcggcgtgggcgcgctggttgcactggccggtccgtccgccaaagtggcacatgcgaacattcagaagaacccgcgccgcgtggccgccaccggtgccgcactgcttatcggcgtgaccctggtctccaccatcgccaccggtgccgccagcgccaagcaaaccatgaacgaggcgctgaccacgcgctacagcgtcgacatgattgccgctggcgccgatatgactggcaaacaggccggcgaggcagccaaagtcaagggcgttcagagcagtatctacgcgccgacccgcatgatgaccatgaaggatgccgacggcaagagcctgagtgtgcttgtcgtgggcgtggatggcgtcgacgcgctgcgcaaggtggtgcgctccgatttgtccggtgtgaccattgatggcgattccgtactgatgcccaagtattccgccgctacaggcaaggatattccgctggacaagagcgttacgttcacggctggagcggccgaagcacaagccgatgccgccaatggtccgtccggtaatgatgcgaacggcagcgccgaaaacggcaatggacaatccggcggcacacagacgctgacgctcaaaccgcggaaggtggactatcgccgcattgcctccaactacgccgcggtcgccttcgtggacgccagccacttcaccaacggtggaatcaaggccgacgggcatatcatgcttatgcgtattgacgccgagggcgcgggtgttgcgctgaacgacgtattcaccaacgtgcagaatgtgttctccgccagtgctggcgttaccgtgaccggtccggtggccgaacgtacgcaatgggagaccatgatcaacggcatgatggcattgttggtcggtttgattgcggtggctgtgctcatcgccttggtcggcgtagcgaacacgctgagtctgtcggtgatcgaacgcacacgcgaatccgccaccttgcgtgccatcggcatgacgcgcggccaactgcggcgctcgctggcggtggaggcgttgctgctttcgctcgtctccggcgtggtgggagtggtattgggtaccctgttcggctggctcggatcctacatggtgtttagtttgtacggcgacaccgtgttcccgttcgaatgggccaccaacggtgtggtgctcggcgtcgccgcgctcgccgctctgctggccagcgtggcacccgcccgccgggccgtcaaaacgccaccagttgaagccttggccgaagcgtagagcaataagctccctcatcagagggagcttttttgttacaccagcccgttatcgtacgcgaagactacagcctgtacgcggtcacgggcgttgattttggcgaggatatgcgccacgtgggttttgacggtgggaagggagataaagagcttgtccgcgatctcctgattgctcagaccatgggcgatctccaccagcacctcgcgttcacggtcggtaagcagatccagttcgggatcggtgtatgctgggcgtgacgtattggaaccgtcggaagcggccccggcaggggaggggatgccggtcatcgagccggcaccgttgccggccgcaccgccagagacgccgacggcggaaccgtacacggcaccggagcgcgcgacatcgccggtcagcgaaccatgctgcgcgtaaccgtcctgcatcatcttttcgatgagtcgcttggtggcggaaggcgcgataatcgcattgccttggaatacagtacgaatcgaattgagcaacgtttccggttcggtgtccttgagcaggaagcccgaggcgccggcattgatggccgccatcacatactcgtccaaatcgaacgtcgtcagaatgattacgcgcgtcggccggtcgtcagccgattcggccgagacggtcgcgtcggcggccgggctggccgaatcggccgcgttgtccggcgcggcggagagtgaggtaatacggctcgtggcctcaatgccatccatgccgggcatgcgcacatccatcagcaccacgtcgggatgcagggattccgccaacgccacggcttgggcgccgtcggacgcctgcccgaccacctccatatccggttgcgaaccaatgaccatggcaaaaccggcacgtaccagctcctggtcgtccgcaataatcacgcgaatgcttctgctctcgttcatgctctccactgtatccgtttcctatcggagcgccgctccataaacaccctgattgttccctgagttcttattgggcaagtctctcaccggggtaacgttcccgcgtgttgcatctgactatccaacgaagccgccggtcgcaactgcatatccggctgcacaccctcatgggcctcgtcgctgaacccggtttcacgcaacactctcaacagctgacgcatatgagccaatgcggcgcgcccccgagcaccaatcgcggcaaaagccgcttcaatctgcatactatcaggcgcaggttcggcgttgagcatcaccagtccctcgtcagcctgcgcaatcaccgattccagcgtggtcagtacttcggtttgcatcgccgcactaatacggttgcgctctaagttggccgccagcaccttttgccgctcctgctcggctcgcagcgcctcctcgcgtcgcaacagcaccagagcgtttgcgccacgcgaacggctccatcgagccatcgcaatgcaggcaaaaccgaccaacatgattcccgcgcccggcagcaagccggacaaaaccagcctccattttgagagcatggaactaccatcgggcaaaaacagatggaacagctgactgtatccattccacccagccatcaccttgatgcccgcaagccacgaatcggctgccagcgccacgctcacccagcgccaagcggactctcgtccatacaataccgccgaatacacggataccatcgcaaacatattgatggtcaaaatcgatggcaagaacaacagttgcacagcagacagcaccgccatcgccagcgcgctgccctctgggaagcggcgacggaacgccaaaggcgagagcataataatcgtcagcattatagtcggcacgcggttcggcgaatacggggcattgccgatcatttgcaaatcgccatacgtggcggaatcaaatagcgcaatcagcacgatagtggcgataacgtccatcagaagatagtgccgctcggtccactgcgcaaatcgacccacccagttcgactcacgcgtatctccttggtcgagtactttggggcgcgcccgatccatcaatcctcgtatacgcgagataacggttagcaccggatcctccgtatcggtgccagactgtggggcggcaggggagagcggaatcgtagccgccacaataaagccaccattcggccctgggccggcctgcacgctgccacccaacgactcaatgcgttcgtgcataccaaccaatccgtatccgggcttatggccgtctgctgcagacgtcgcgccacggccgttatcggatacggtaatcgacagcacatcgtttgaccagatttcatcgatggtggctttagcaccctcgcccgcatgtttgcgcgtattggtcagcgcttcctgcacaagacggaacacggcggtttccgcgtcggcagacagccggtcaggttgcgctttgccggtcatatgccgggacaccaccagatgaccgtcaaacagcgaatcgatgtcggcatatccggtactgccactcgcaccgaacacattgaacaaacgctgcatatcatgctgcgcgcgttccgcttcatggcgaatcgtacccatcgtgtgcttggcgatggccagatcatgcgcacccgcataccggccgccatccgactgcacaataatcgtggagagcgtatgtgccaccacatcatgcatatcacgggcgatgcgtgcgcgttcggccagcgccgcgatgcgcgtctcctcggcctctttcgccacaatggaagcgttgcgctcgcgcatggccgccagcgtggcgttgcgcgctcgctgccacaaggccatgatgatgacgctcagcacgctcgattcgatgaacgccgcctccatgccgaagtcagcgagcatcttggccccgcagttgacggcgccgcttgcccccacgacgccggtgaccgccgggcatgtgggcatcgtgatggcatcggacagccagccgtcgcggatgacgcgcgaaccggaggaaggtccgtcgaacagcggacccacgttgaaagacaccgaccagaccatcgccgcgaccagtcccatgacgaacgccgtgacgatgaaccgccaggaatgtcggggattgccgtacagaatcaccgaatacaccatgatcagggcgtagaaatcgaaatacatgatcgccgggccgaacacaagatgcgtgatggtcagcgccacgaacagccaggccgccggctccgggcaatacctgcgcagcatcagcggcacgaagaccggcagcgaccacagcgtcatcgacgcctgagttgcgggaaacaatatgccgcccgtcgaatcagggctggtgacgccgatgaacggcacgcagccggcgatcagcgctgcggcgagcaacgtgtcccatagcagtgtgcgggtcgactcccgtgcgcaccatgccctcacgcgcgccataatctccataacgcgcaaggctagcgtgtccggcgacgaaccggtatcactcttcaggaggatttatggactagagtcttgaaccatgacaatgctgagcaaatactacgtgcccggactggccatagaggaccattccatcgatgttccgctcgactggaccggccatgagccaggccaagcgttcgacggcgaaaccatcaaactgttctatcgcgtggtcaccgcgcccgaacacgtgcatgacgacctgcccctgctgattttcctgcaaggcggtcccggcggtgccggcccgcgcctcaacagcccgacctccgacggatggatcgaggaggccatcaggcacttccgggtgatcctgcccgaccagcgcggcaccggccgctcctcgcgcgtggacacgcacgccatggcccgcatcgccgccgcgcacgacgatgatgccgcggccggcgcacgagcccaagccgactacctgaagaagttccttgccgattccatcgtgcgtgacttcgaacatctgcgcctgaccgaattcggtggccgcaagtgggtgacgatgggccaaagctacggcggcttcctgaccctgaccacactgtccctgttcccggccggcgtaatcgccagcttcaccaccggcggcatcccgcacgtgccggccgacgccgctgaagtgtacgagcataccttcccgcgcatggtgcgcaagacgactcagttctacgagcgctacccacaggacaaggagcgcgtggccgccatcgccgacaagctgccgactactgcggaagtcgccgaattcgttggcaaactcaccgattccgtactgaatccgatggctggtaccgatgtggagcatcgacttggcgtgatcgccggcatggccgcccacggcttcccgctgatgccgaacggcgacccgctcaccatcgaacgcttccagtgcttgggatccgactttggcatgaagccgagcttcgagcgtgtccattggattcttgacgacgccttccttgatggcgatggttccgcttctgccgactcgccgttgtctgacgaatttttgaccaaggtgatgaacgccacttcgtcgcgcccgctgtactggccgctgcaggagttcatctacgccaacggtgagatggaacagccgattcgctgggccgcccagcgcgtgcgcgatggcaagcccgaattcggtgctgatgaacgcccgctcaacttcaccggcgaggccatgttcccgtggatgttcgaacaggaggccgcattgcgcccgttcaagccggccatggacctgctcatggaagacacgcacttcggcgtgatctatgacgaaggtcagctggcccgcaatgaggtgccgctgcaggccgccgtctacttcgacgacatgtacgtcgattccggtatgcagctcgacactttgagccgcgtgggtaacagccactactggaccaccaacgaattcgagcatgatggtctgcacggcccgctcgtcttcaagcatctctatgacgaagcccttaaccggggcgacctcgaagaactgttctgactcaaggaagcaagctccctctgatgagggagctctgtatacatgcacgaaaggaaaacgtatgactcagaacctcaccatcggttttatcggatatggcaacatggcccaggccatcgcccaaggcttcgttgacgcgggcgtggtcgccggcggccagatggtcgcctgcgccgcccactacgacaagcttgagaagaccaccgccgaacttggcgtgcgtccgttgcacaatgcgctggaagtggtgacggccgccgacgtggtcatcatcgccatcaagccctaccagatcgccgccgtcgtcaagccgctggccgacgaacttgccaagccgggcaagatcgtcgtctccatcgccgccggctggaatctcaagaagtaccaggacctgttcgccaccgaagacggcgaatccgtcgactccccggacatccatatccagtgcaccattccgaacactccgatggccgtgggcaagggcgtgctcgtcaccgaatccgtcaacaccctgaccgacgacgaaaccgaaaccttcgagcagctattcggccccatcagcctcatcgagcgcgtggacaccgcgcatatgaacatcgccatggtggtggctggctgtgcgcccgccttcactgacatgtacatcgaggccttgggcgacgccggcgtgcagtacggtctgcagcgagccaccgcctaccggctcgccgccaagatggtcgaaggtgtcggcgcgctctacatggccactgaaacccatcccggtgccatgaaggacgccgtctgctcgcccggtggtaccaccatcaagggcgtcgcccagcttgaaaaggacgggttccgcggctcggtcatcgacgccgtagacgccatcgtcggctgactgccaatcagagttcgcgtatattcgcatatcacagtcaaggccttcgagccgtatgctcggaggcctttgcatatggccggttcaccacatgcacgttcaatgtgtccagcttctccctagactggaaccatgtctcttactatcggaatcgtcggactgcccaacgtcggcaagtccaccatgttcaacgcactgacccgcaacaacgtgctggccgaaaactacccgttcgccaccatcgagccgaacaccggcatcgtaccattgccggacaagcgtttgcccgtgctggccaagctggtccacaccgaaaaggtcgtgcccgccacggtgaccttcgtggacatcgccggcatcgtcaagggcgcctccgaaggcgaaggcctgggcaacaagttcctggccaacatccgcgaggcggacgcgatctgcgaggtcgtgcgcgccttcgaggacgacgacatcgtccacgtcaacggcaaggtggatccggccgacgacatcgacaccatcaacaccgagctgatcctcgccgacctgcagaccatcgaaaacgcgctgcccaagctggagaaggatctgaggggcaagaagatcgagccggcctacatggacgcagtcaagcaggcaaagaccatccttgaagccggcgagacgctcgacaaggccgcacgcgaaggccgcttcgacaaggattccgtctacgacctgcatctgatgaccgccaagccgttcatctacgtgttcaacgtggacgacaacgagctggccaacaaggacctgcaggctaagctcgccgcatccgtggccccggctccggccgtgttcctcaacgctcagttcgaggcagacctgaccgagctcgacgaggcggacgcccgcgaaatgctggccgacgctggcttgagcgagtccggtctcgaccaactggcccgcgtgggcttcgacatcctcggactgcagaccttcctgaccgcaggcgtcaaggaagtgcgcgcttggcagatccacaagggctggaccgccccgcaggccgccggcgtgattcacaccgacttcgaaaagggcttcatcaaggctgacatcgtctcctacgacgatttcgtggccgccgacggctccatggccaagatcaaggaggaaggcaagctccgtcaggagggccgcgactacgtcatggccgacggagatattgtggagttcaaatttaacgtgtccaagtagttttcctcggctccccttcctgaggggagccgtcgcggaaagcgactgacgggagtgttgcggaaaggtccgagcagtgttggttgcccagacctttcttcatgttacgaacctttatgaacctcgttgagatgagatgtttgcgtctacttttcttaggcttccgcgttctcgtcggctcctgtggcgagaacattcctcaatgatttcgccacctgtattttcagcggacgttttccggtctgtacgaccagccccgcggccaagagctcttccacgtatttccttgcgctctgtttggatagtccgatgtgatgggccacttcgtccaacgacatggatttggacgagtcgaacagttcttcctgaatcacgccatagagcaccgagacggcattgcgcgatagggcatgcctcttttcaagctgtgtacagagtatccgacctttgtcgagctgatcgaccttgatactgagttcgtcaatcagctcatcctgggcttgttggatgaatccgaggatggtgttcacgaagagcgtgagttcgccgcagttcagcttgtcctccgcctccatgaatgctttgtagtaggcgttcttgttctccgcgatggtgcgggacagggatagcacggtgggcatagtcaggtcatggttcaggtacagggccaggagataccggccggtcctgccgttgccgtcgtaaaacgggtgaacatactcgaacaggaagtgcgacatgatggccgactgcagccggggaatctcgtcggaggtcgtgaggtggatcatgtcggtgaggagcgcgccgatgttgccttcgcctttgactccgttatggatcgcgaggccgtgcggcccctgtatttccacatcgcctttccggaacaggtcgccgtccggctgatcgctctcttcgatttcgtcgagcgcaaccttgtcatagatgtcgcggatgtcggcgatgcccgccggcaacgcggagtccttgtccgtgaggttcaggtacagcttggcaaattcgctgaaccgcgccttggagtcgtcgccgtccctccttgccttgtcggccgcgtccacggcgtcctgggtttccttgcgggtgctgcgcacgccttccatctcgttggtggcgaacagttcctcactgatggaatgccgtatgtagtcccagcgcatgacgccgggaatctggttccagagccgtgatacgcgcctttcggcgagaagtatattttccgtgagcagggtcgtctcgcgtggcgtggcggagaacagctcgcccaatggcgtgatgaccccggtcctgaatgtggaatctgcctcaagccgctgccgtgcgagtgccgcatggttattgaaggaatcgactgacctgtcggcatggaacagccttgccaaacttctatacttcatatccatgagagagactcacttcccaaagagcatccttgattatagaaagtataagatagagaaggaaatgagtcaataaacaactataaaatcatggataatacaaaaatatagttgtgcgcatgactgcatgtgagtgacatatggtagtgcccgaaatgcgtgtcagtagtgaaatacttcatgatctgttgttctttctgaatatgtgatggtatgcaatgggttttgccgcggtgcattgcgttgcgactatgccaagaacgcatgctcgtacaggtgcgtttatggggcatggtgcgaatgagtcggctcgatatcaccggcaatgattcagctatgcgtcaatgagaggtgtactgatcagatggcgtgttcgttcacgccgttgctgctgaatgcgatgtgttgatcatggttcgcgcaccataaagtcttacgtccgaatccgtcaaatcacgcggtgtgtgaaatgcccgttgtatataaaaaagtccggtgcaacgcacgatgataatgcgttgcaccggacttactgcagaaacaattgttacagactgtagatctgtgcgccgaacggccagagcgcgagcttggccattttgaacgactggaggccgaacgggatgccgatgatagtgatgcagttgagcacgcctgcacccagatagccgagtgccatccaccagccgaccagcaccacccagaggatattgaccagcgtggagccaacgccgccaccgtattgcacggttttgccgaacggcgtcaaggtaaggcccgccattttgaacgcctgaactcctagtggaataccgataatggtgatgcatagaaacagtccgatcagtgcccagctgatggcgattgccagtccgcccagaatgatccacagaatattgccgatgaccctcatcgtaagttcctcacatttgccggcattgcgccggataccgaatcgaatgctggattccattctattaggcgaacgcgggcgatatgtggggaatcggtgacgggacccctgagcatcccctgaatcgtccctgagccgcatgctcaggcgcctactcgggtgagcattctcacattcggctgatttctagcgaaaaacccttgtgcgggcgggctgtggactatagcatcacgacacatgaccactacaccgcagccttctcaggcatttcagtccactgccaccaaacccgccaccaaccgcgagctgcccctgccgcagtccgaccgagaccccgcgcacctgcagggccattggcttctggcccgcatcggtaagcacgtgctgcgccccggcggcaagaaactcaccgaacgcatgctcgccaacgcggacatcgccggcaaggatgtcgtcgaattcgccccgggactgggcctgaccactagggtgattctcgagcgcgaccccaagagctaccgtggcgtggaccgcgatccgcaggtcgtggacatcatctccaaactcaccagtgagaaggccacgattccggcaagctgcgtgcagcgcgacgccgccgacaccggtctggaatccaacagcgccgacgtggtgatcggcgaagccatgcttaccatgca

SEQ ID NO: 66 - DNA, 65074 bp, Unknown
  R206_24m  MAG No. k141_2591
cgagatacaggccatcgtggacgagaccgacaaccgtcccatgcgcgtgctcggctaccgcaccccggccgaggcattcgccgacgaactgctatcattaaccgaacaacaaggatgttgcacttctaaatagacaacgggcttttgtgctgatatagggatttgtgctagtcgaatccgcgaaatgttcagtaaatgttcacgtagcgaaatcggcatagaatgcgagcaaacgcataacggcacggtgctgttcctgcgtacaccaacgccaggcgaaccgccggaaagaaggggtctccatgattgagacagcggacgatatcaagacgattgcgaacgtcggcacgggaacaatgggccatgcgatcacgttgcagttcgcgctggccggatatccggtgcatctggtcggccgcagcgaggcctcgctggagaaggcgatgaaggcgatccgttctgatgccgaggacttcgccgaagccggactgctcaaggccggcgacaccgtggacacggtgctggcccgcatcaccggttacgccgactatgcgagcggcgtggcggacgtggacttcgtcatcgaatccgtggccgagaaccttgacatcaagaagtccgtctgggccgaagtggagcacgccgcccccaaggacgcgattctgtccacgaacacctccggcctgagccccaccgcgctgcagtcggtgatggggcaccccgagcgcttcgtggtggcgcacttctggaaccccgcgcagttgatgccgctggtcgaagtggtgccgggtgaaaagaccgatccgaaggtggtggacatcaccttcgacctcatggccaagatcggcaagaagccggcaaagatcaagaaggaatcgctgggctttgtgggcaaccgcctgcagctggccgtgttgcgcgaggcgttctacatcgtccagcagggcatagcggacgcggccaccgtggacgacgtgatgaagtacagcctcggccgccgctggaacctggtcggcccgatcgccagcatcgacctcggcggactcgacgtgttctacaacatcagcacctacctgttcgacgacatggacaacggcaccggcccgagcccgctgctcgccgaaaaggtcaaggaaggcaacctcggtgccaagaccggtcagggcttcttctcttggcagggcgaggacggcaagcgcatcatcgaaacccgcaacaaggccctgctgcgtgcgctgaaggacgatgccgcggaagcgtaaagcgcgagcgacgaattctcgcgtaacgtgtgctacgatggaaggctcccttcggggagccttcgttgtgcttgcgttgttcttcggtccaacttttcgacatgcgtatacgttgttgatagcgacaattgcggaaaacgcttacagtatgatgtgcacacggacaacaagccgatgattgcaaggagcggtgacgacgatgacatccacagaacacaatacgcgagccgacatgttggcccacatgggcagccttcagcaggccgcctacgtgcgcccgatcgagtaccaggagggccgtgcccacggcctcaaggccatcgaggtgaagaacggcccgctacgcttcgtatccatggccgaccgcgccctcgacgtctgccagttcgaataccgcggcgagaacctcaccttcctgtccaagccgggcctgaacggccgcaaccagttcgacaccaacgagctggaggcgcagcgctccatcatgggcggcctgttcttcacctgcggcttcgagaacatctgcgcgccgtacgtcacgcctgagggcggcaagtacccggccggcagcttcccgatgcacggccgcatccgcaccacgccggccgagcatgtgggctccgacgcccactggaccgccgaaggcgactacgtgctcgaggtctccggcgaaatgcgcgaggccgaactgttcggcgagaatctggtgatgcgccgcaagatcaccagcgtgtacggccagccgtcgatcacggtcgaggatgaggtgaccaacgaatccttccgcgacgagccgctgatgtggatgtaccactgcaacttcggctggccgttgctcgccgaaggcgccgaagtcgtgatccccagccgcaaggccaccccgcgtgacgagaccaccgcagccgacaccacgccgtggaacgaaatccaagcacccgaggcgaaccgccccgaaagcgtgtacctgcacgagctcgccgccgacgagaacggccgcagcttcgccgccgtggtcaaccgcaagctcggacttggagtcgtcatcgacttcgacgccagcctcttcccatacttcatggaatggaagtcgatgggtgcgggcgactacgtggtcggcctcgaaccctcgaactccagcgtccacggccgcggctggcacgagcagcgcggcgacctgcacaccatcgccccgcagaccagcgaacgtaagtccctgaccttcaccgtcatcgaaggcgaggccacgattgacgggctcatcgcccgccgcgacgccctgcttggctgaattgtgagataatatcggccgatatgtgaacggctgattagcgtggggagcatggttacccgggattcggaacagtatctgcgattcaaacgggagcacacgctgccctcgcatgaggcgattatggactggtatcgcggcaccggcatgcgtccgtatctgcaggcgcttgacgacgccggccgcaagaagttcgaggccgaagtgttctcccaagtccgcgaggaataccccacacagtcggacggcagcatcatcttccccttcccgcgtttcttcttcctcgcgactcggtagaagctcgccggattcgtgtactgggcggcgcgacctgtttcccgcgccgccagctgtgggttgacctcgctactgggcttgcggtgatgccgctggctgctgcgctgcttccgattgcgatggcatttgcatatgcggtgcgatgctggggagtgtgccgtcatgcatgcactgcttcaatatgaggtctcgctgggcgatgaggtcgtcttcgatctggtcacgcacgtcgcgcacggacgagaaatacaggtagaacgtggcgtgattgtagccggcgagttcggtgatctgacgcaccgagatcttctcgatcggcttggtttcatacagcttccagaacgcctccttaaggcgattgaccgtctgctgcgtaagttgcgggttcttcttgattgcgattcgcggtatggtgatttcgcataagacgcacaaccccatcgattcgtcggtcaaattcgtgaccttctcgatgcgatgctgtcgctggtggtcacgcaggacgtgctgttggaatcccagggaaccgcgcacgcggcgcaatccttgggactgttcggcatcgggctcggcgtggtggccgtgatcatcggcctgtggatgttgctgagacgtaagtggacggcaacggaataggaatagtgacagcggaatagcgcgcgtgatattggtacgcgacgtatcgtaaaagcggctacaatacttacggcaaaagtctttgcaacgagaaggaagacatgactgagcggcgtcgagcacggatgaggattcgtcgtcaacgaatttacgttgtacggcgcattgtggttgcggtatgcgcattgttgtgctgcgttcttgccgtcttctcgacgattgacgcccaacgggtgtggccccgcggtgagtcggtcgcacaggggcaggcagaggttcaggggcaggcgcagaaggtgagtcaatccgcgcaacagtcggcatcgcgagtgtctgcatcggcctcatccttggaccgccagcaggtaccggtctttaaccaggcgattcaggagcagcgtgacaaggaagcgcaacgtgcgcgatggacgaatcccaccggcaagcagcctgatttgtcgcaatactccgatctcagcgtgaaagtcagtatcgccaagcaggaagtgtatgtgcaatccggcggtgagaccatctacacgatgatcgccagcaccgggctcaacgatacgaccccgcgcggcaactatgttatcgggatgagaggcgatcacttctacaatcccgcagaaggcatgggtgctgattattgggtgcgattcaacggcccgttcctcttccactcggtgccgaccggggcgaactccggcgagtatatggaagaggaaggcaacaagctcggtcagccggcctcacatggttgcgtgcgactcactgtggccgatgccgaatggttctacaaccaaattccggaaggcacgccggtcaccatcgcctgaggcttggcctgagatcgatactgaggctatcgtgctttaggcgtctgatattggtcgtcggtagtgaagcaggtgcgatagaccatggccatgatcagaccgtcggccagcaaggtcagcgcggcgatggcaccgaagaccacgaactggtatttggcggcgttcagcggatctccgccggctatcacctggcccgccatcatgcccgggatggtcacgatgccgctggaggccagcgaagcggtggtgggcaacagtcccagccgaatcgacgagatgatggatgggcgggcggactcccatgccgtcgcccccaaggccagcatcatatccacctcgtcgcggcgttcctccatgctttcatagaatcggctcagcccgacagcaagcgcggaaacggtgttgcccagcagcatgccggtcagcggcaccaccagctggggcgcataccacgggtgcgggcgcacgatgagctcggtgaccaacgccagcatgagcagcatcgtgatgaccaggctcaggaagatcggcccggcaagacctttggggatgccgcgcgcgcgggatatcacgatctgcaccgccgcgaccagcatgaccgccatcagggcgaacaccatccacacgctgttcgaacgaatcacgtagctgatgatgaatcccatggcgcacagctgcacgagggcgcggcatgccgaccacatcagggtcctgccgatgcccatgtgcatgagttcgctgacgatggccgccacggccaccatgcccaacgccagaacaagaccccaggtgtcgatgtcgtaggcgccgttcatggttgcacctccttgtcccgcgtcagatcggtgagccgtcccgcatcgagcatcagcgtgcgggtggcgcgtccgtccggcggacggtgtcggatgcggatgatcgccatgccgtgtgcggccgcgtccgccatgatcgcggccactttggacgcgttgtcgtcgtcgagtccggcgtccacctcatcggccagcagcaccttcgggtcggtgagcagcgtgcgggccaacgccacgcgcgccgcctgaccgcccgacaggtcatgtggcgcgcgcgccaggtcgatgtcctcgcagcccatcgcgtccaacgtcgtgcggatgcgctcgtcgggcagcagctgctcggccctgccccccttgcctcgaatcgcgagcgtccagggcaggcggatcgcctcggccacgtccttgccggtcaggatcggtttttgcggcagataggagacgtcccgccgccattgctgcgcgctgaattcgtcgctgcctacgccgtcgaggacgaacgtgccgtgcgcgtgcgggttgagtcgggcgcatgcggtcagcagactcgatttgccggagccggacggacccaccagatcgatgatgtcgccgcgttccatgctgaaggacaggttgtcgaacaccgtgcgttcgtcatccgccggcgatcgcgcggggatgacgcaggacacggatatggcttcgaagaaggatcgcatattcatccagtctagtcgggggccacgtgggaaaccccagcgttcacttcctgtatacccggtgtggcataatagccaaggcaatttttgggctttgcctaagctagtttgaatttgaaataggtgaataacgtggcacagactactaacgacatcaagaacggatccgtcctgaacctggacggccagctgtggaccgtcatgaagttccagcacgtcaagccgggcaagggccccgccttcgtacgcaccaccatcaagaacgtgctctccggcaagatcgtcgacaagaccttcaacgcaggcatgaagatggaattcgagaccgtcgacaaccgcaccctccagtactcctacgaggacggcgacaacttcgtgttcatggacatgaccacctacgaccagatcatggttccgaagaccctcgtgggcgacaaggccaagttcatgctcgaaggcaccgactgcctggtctccttccacgacggcaccccgctgagcgttgacctgccgggctccgtggtcctgaccatcacccacaccgagccgggcctgcagggcaaccgctccaacgccggcaccaagccggccaccgttgagaccggagccgagattcaggtcccgctgttcatcaatgagggcgaccgcgtcaagatcaacaccgaggatggttcctacaccggccgcgagaacaactgatctccgcatcctcaacagacgaccgaccgtataaaggactaggacagcagcagtatggcacgttccaccgcgcgcaaaagggctctgaacaccctgtacgaagccgacgaaaaaagtcaggatattctcgccctgcttgacgaacgcatcgcacatcccggtgcccagaccccgcttcccgactatgccattgaaatcgtcaagggcgtggccgagcaccgtcgtcagatcgacatgaccctggacgaacactccacgggttggaaggtccgccgtatgggcgtggtcgatcgcaacattctgcgtatcgccgcttgggagattctgttcaacgatgatgtgccggacaaggtcgccatcgacgaggctctggcattggccaagaccctgtgcgatgacgattcgcccgctttcatccatggcctgctgtctgcggtgtgcaccgccaagaacgcagcaccggcaccggagtccgcggcagaagaggccgatgaggaatcgtccgattccgatgccgccgcatccgagccgaccgatgagggcgatgtttccgattcgcccgattcgtccggtgcatccgacgagcccgctgccccgtccgctgagattcagccgacggtcgattagtcatttgttgttcagcctccccattcgggaggctttttcatgggcggacacttgtgtcgccacacattctcaagtcggcaccttgccgacagccccgccagcggggtgagactttgcgcccaacggcgtgtgagtctgcgctggccgttaaccttggtacgaatacccgaaaaacataagggggttttggtgagccagaacgagtccgggaccatcgcaattccgatgtatgacaaggacgatgcagtcctcgttttggaagacggacaggtatatgtgggggagccgtacggcgccctcggtgagacgaccggtgagatcgtcttcgccaccggtatgaccggataccaggagacgctcaccgatccgagctacgatcgccagatcgtcgtgcagacgttcccgcacatcggcgataccggcgtcaacagcgaagaccctgagtcctcccgcatctgggttgccggatacatcgtgcgtgatccttctccgaacgtgagcaactggcgtgccgaaggcagcctggacgacgacctcgccaagaacggcatcgtcggcctgagccacatcgacacccgtaagctggtgcgtcacctgcgttccgcaggcgtgatgcgcgccggcatcttctccggcgacgccctgaccgaccaggccaccggcgcgctcaagaccatcgagcagctgctcgaagacgtcaagaacacaccgcagatgcagggcctgagcctgtacgacgaagtgtccaccaagcaggcctacaccatcgagccatgcggcgagtacgaaggcaaggagccgctgtacaccgtggccgccgtggacctcggcatcaagggcatgaccccgcaccgcatggccgaacgcggctgccgcgtgcacgtggtgccctccaccatcaccttcgccgaaatcgagaacctgaacccggacggcgtcttcttctccaacggcccgggcgacccggaacaggccggccccgaaatcgagctgctgcgccaggtgctcgacgccggctacccgttcttcggcatctgcttcggcaaccagctgctcggccgcgcgctcggcttcggcacctacaagctcaagttcggccaccgcggcatcaaccagccggtcaaggatctgaccaccggcaaggtcgaggtcaccgcccacaaccacggcttcgcggtcgacgctccgatcggcaagcaggtcgacgcggcgtttgaaaacggcaagtacggcaaggtgttcgtctcccacatcgatctgaacgacgacgtggtcgaaggcctgcagtgcgtggacatccccgcattctccgtgcagtaccacccggaggccgcagcaggcccgcacgatgcggcctacctgttcgaccgtttctgcgaacttatgaagaacaactccaaggaaggtaagtgatatgccgaagcgcaccgacatcaaatccgtgatggtcatcggctccggcccgatcgtgatcggtcaggctgcggagttcgattactcgggcacccaggcatgccgcgtccttcgtgaggaaggcatccgcgtcatcctcgtcaactccaaccctgccaccatcatgaccgacccggagatggccgacgccacctacatcgagccgatcgccactccgatcctcgagcagatcatcgccaaggaacgccccgacgcgctcctgcccaccctgggcggccagaccgcactcaacgccgccatggcgctgggcgaggccggcgtcctgaagaagtacgacgtcgaactgatcggtgcttccctggaagccatcgaccgtggcgaggaccgtgaactgttcaagaaggtcgttgacgaggccggcgccgaatccgcccgctccgacatcgcccacagcatcgaggaagtcgacaagatcgccgagaagttcggctacccgctggtcgtgcgcccgagcttcaccatgggcggcctgggctccggcatcgcccacaacgaggaggagctgcaccgcatcgccggcgccggcatccattactcgcccaccgacgaagtcctgatcgaagagggcatcgagggctggaaggaattcgagctcgagctcatgcgcgaccgcaacgacaacgtcgtggtcgtctgcccgatcgagaacgtcgacccggtcggcgtgcacaccggtgactccatcaccgtggccccctgcttcaccctgaccgaccgcgaataccagaagctgcgtgacatcggcatcgccatcatccgcggcgtgggcgtggacaccggcggctgcaacatccagttcgccgttcatccgaagaccggccgcatcatcgtcatcgagatgaacccgcgcgtctcccgttcctccgcactggcctccaaggccaccggcttcccgatcgccaagatcgccaccaagctggccctcggctacacgctcgacgagattcgcaacgacatcacccagtccacgccggcctcattcgagccgaccatcgactatgtggtcaccaaggtgccgcgcttcgccttcgagaagttcccgggcgccgaccccaccctgaccacctccatgaagtccgtgggcgaagccatggccctggccggcaacttccaggagtccctcggcaaggccatgcgctccatcgacaagcgccacatgggcttcaactgggatggcgagaagccgtccgccgaggaagtggccgaactgcttgaggccatccacaccccgaccgaacaccgttacctgcagctcatgcgcgccatctggggcggcgccacgctggagcaggtgttcgcggccaccaagatcgacccgtggttcctgaagcagatcttcctcatcaacgagaccgccatgacggtgcgcgaggccgagaccctgaccccgaagctgctcaagaaggccaagctcgccggtctgtccgacgtgcaggtggcccacctgcgtggcttgggcgatgaaggcgagaacaccatccgcgagctgcgctggacctacggcctgcgcccggtctacaagaccgtcgacacctgcgccgccgagttcgacgccgccacgccgtactactacagctgctacgccgacgaaaccgagctgcgcccgcgcgagcgcgaggccgtgatcatcctcggctccggcccgaatcgcatcggccagggcatcgagttcgactacacgtgcgtgcacgccgtgcaggagcttggcaaggactatgacaccatcatggtcaactgcaacccggagaccgtctccaccgattacgacatgtccgaccgcctctacttcgagccgctcaccttcgaggatgtgctcgagatctacgaggccgagaagaggatgggcccggtcaagggcgtcatcgtccagctcggcggccagaccccgctgtccttggccgcgcgtctgaaggccgccggcgtgccgattctcggcaccaccccggaatccatcgatctggccgagaaccgcgagctgttcggcgaggtgctcaagaaggcggagatgaacgccccgcgttacggcaccgccctgagcctcgaagaggccatggacgctgcccaccgcatcggatacccggtgctcgtgcgcccgagctacgtgcttggcggccgcggcatggaaatcgtctacgacgacaagcagctcaccaagtacgtggaccgcgcgcttgccgaggccaaggccgataccgtggtctccggccgcctgccctccccgctgctcatcgacaagttcctgcaggacgccatcgaaatcgacgtcgacgccctgttcgacggcgaggaactgtacatcggcggcattatggagcacgtcgaggaggccggcgtccactccggtgacgccgcctgcaccctgcccccgtccaccctgtccgacgaccagatccgccgcctgcgtgaaggcacctacgccatcgccaagggctgccatgtgcagggcctgatcaacgtgcagtacgccttcatggccaacacgctgtacgtgatcgaagccaacccgcgcgcctcccgtaccgtgccgttcgcctccaaggccaccggcgtggcgctggccaaggccgccgcccgcatcatggccggcgaaaccatcgccgaccagcgcgccaacggtctgctgctgcccaagggcgacggcggcgacatccaccccggccagcaggtcgcggtcaaggaatccgtgctgccgttcaagcgcttccgcaccccggtgggcaagaccgtcgacatcctgctcggacctgagatgcgctccaccggcgaggtcatgggcttcgaccgcgacttcccgcacgccttcgccaagagccagctcgccgcctacgatggtggcctgccgacccacggcaacgtgttcatttccgtgaacgacaccgacaagcgtcagctgccgctgctcgccgtgcgcctcgaagagcttggattcaagctctgggccaccgagggcaccgcctccgtgcttcgccgttacggcatcgagtcgaacatcgtggacaagatcagcacccgcgtggacaccgatccggaagccccggtcgaggtgcatcacgccgccggctccgtgggcaagaacgtggttcagctcattgaggaaggcaagatcgacatgatcctcaacacgccgaactcgcgcggctcccgttccgacggctactccatccgtgctgccgctattgcagccgatctgccgcagtttaccaccatcaccgagttccaagccgcactgctggctatcgaggccgtgaagcataatgattatcagatcatgagcattcaggagcattcgaagcagctgttcgaattggagcgacgggagttctgatgactacacccagcagtgaggaattgcaggcacaacgttcggatttcggtctgcgactgagcaattcaatggccaaatacggaccgctgtgtgtgggcattgacccacatcgcaagctcctcaccgactggggatacaacgtcgacgccgaaggcgccgaactcttctccatgcgtatgctgcaggccgccaacgggcgcgccgcagcagtcaaattccagacgtcgatgttcgagcgctacggagccaaaggtttcgaagcgctcgagcgcgtgctctacgcggcacgacaaatgggcgtcatcaccatcgtggactgcctgcacggcggcctgtccaccacgatttccgccatcgcggacgcctatttcaagcccggtgcaccgttgctggccgacgccatcacgctgctgccgtactatggcgcgcgctcgttgaacggcttgattaccgaagcgttggaaaacggacgcggcgtgttcatcgcctccctgacttccaatccggaaggcatgagtctgcagaccgcgttgcgccagagcggcgattacaagggacgtaccgtggcctacggcatcgcctccaccgcgcagaagcataacgtggatatcgaaggcatgggctcggtgggtctgatcatcggtgccaccatcggccaatggatgcaggattccggcgtggacccctccaagttcaccggtccgattctttcccccggttacggttggcagggtgccgaggccaaggatctgaaaaccgtgttccgcggtacgcgcggcaacgtgctggttaccgtgtcccgctttatcgcctcgcatgggccggatatcgccgcactgagccaagctaccgagtcgattgcgcttgacgtacgtcagtcgctgatggaagccactgccgaaggcgcagaaaaccagtaatcagaacggaatcagatgtcgcggcatgcgtacgtatctatctcattgcatacgtcgcatcacgattcatattcttccctgttcgtcggggctgtaacagttaccggtcatctcgccggtgagccgttaccacattggattcataatcgctgcacaccacatcatctccggaggaacccatgactgaaaacacccatgccggccgtctaatcgtcctgactggccctaccgcagtaggtaagggcaccgtggaagccaagctgcgcgccgaccaccccgaagtgtgggtgtccgtctccgccaccacgcgtgccccgcgccccggcgaggttgatggcgtcaactactggttcctcaccgaagacgagttcctgacccgcgaagcggcgggggagttcctggaaaccgccgtggtgcacggcatggcccactacggtacattgctcaagcctgttgaggagcatctggctgccggcatgccaacgattctggaaatcgatttgcagggtgctcgccgcgtcaagcagcgcgccgccgaactcgacttggaagtggtgtacgtgttcatcgcgccgccgagcttcgaagagctcaagcgccgtctgatcggccgcggcaccgaaaccgccgaacagcaggcccgacgcttggaaaccgccaaagtggagctcgccgccgaaagcgaattcgacgtcaccatcgtcaacgaaaccgtcgatcaggccgccgccgacctctggtccgtcatcgccaaagaatacgggctgtaacgtgtgcgaataggttctgttcgtactgagatgtccatgcttggcatggcgtgctcatgtgattatgcgtgttcagtccctgccagtcggccctcacaatagggggagagcctgacggcagggactgattcataccgatacaaaggggcatgcgccaccattgttgcgtcaatcgtttgatgcgaaaatggtggcagaggcggcgattgccgtgttgggggatgaaatctcaggattggcggaattccgaggattctgagttgtggttgtgtgtccccatttgtgcgtcaaccgtttgatatgcaaatgggggcacatgcatgtgtgcgccatcttccaaaaacgtcgaattatgcaaatgggggggcacgaataggtgtcggcgtgatgtggtgtggtgcgatgctgcaggtgcggtgtgacatggtgtgggatgccagcggatttcgggtgtttttcctctggcgtcccacagaacctgatgtacggtgtcgtcaccggtttgtgggattggcagaattccaatggttctgtggaatggggtgtgggatgccagccgtgtgcatcgtttgacgtgcgtggcgtcccgcacggttgcgggacgccggccccaaattggccgctaaccgtgtggtatcccgaatttctccgatatgcgagaggaatccgtccactataaggtctctagcccagcgactaatagttttcctctatgtgcgaataatacgggctgtaactaccgctttaccactagctgctggtggagaatttcggtgctgtttctggccggcgcctgcttccaacggattgcttcggattcgtgatgctcggtgacataatgccgcatccattcgaagcactgctgggtctggatggcatcgcttaatgcgcggtgttcctcattgtccgcgatgccgaagcgcacgatcaggtcagccagacggtgatgccgctgcgcggggaacagggcgcggctgatttgcatcgtgtcataatccgcgcaggcaaagccgcagccggcgatatgccgggtgttgtaatccaggaatcgcagatcgaagctgacgttatgaccgacaatcggctcaacggtgggaccggcagccggggtagcgagccatgcgatgaatcggggaagcacctcgtcaatcggatcgaggtcggccaccatcgcatcggtgatgccggtcagcgtggtgatctgacgcggaatcggccgcaagggattcaccagctgctggaattgatcgacgatatgcccctcccgcacgcgcacggcaccgatttccgtgatggcgcaactgttcgggtaaaagccggtggtctccagatccagcgccacataatcggtgggaaagagggcatcgtccatggcgattcgcccgccggcaccatgattgggctgggatggttggccgaaaacggtaatgccggaagtggtcacggaggctcctcatatcagtcggtgttcggtgacttattgtaccggcagcccggtctgacggtaaaatttttccctcccggattttctcggatatattggttaggcggccggcaacatgcggcgcatcgggaagggagcacagctgatgaaacagatagtggcaggcatcgtggcgcatgtggacgcgggcaagaccacgctgtccgaggcgctgctctaccgtaccggtgagatccgcaaattggggcgagtggatcacggcgatgcgtttctggacaccaattccttggagaaggcgcgaggcatcacgattttcgcgcaccaggcattggtagaacacggcgacctgcgcctgaccttgctggatacgccggggcacgtggacttcgcagccgaaaccgaacgtgtgctgcgtgtgcttgactacgcgattcttgtggtctccggcacggatggcgtgcaaggccataccgagacactatggcgtctgctggccagatacggtgtgccgacgttcatcttcgtcaacaagtgcgacgccgccggatttgcccgcgaggccgtgttggctcagttgcgcaggcgtctgagcgatgcgatatatccgttgccggcaatgggacagtccactgagggcagcgcgctaccgttggacgcgttcgccgaagacatcgccaccctggacgaggaggcgatgaacgactatttggaacatggcgcgctgtccgtgggcagattgcgatcgatgatcgccgtacgcgagctgttccccgtatatttcggctcggcattgaaactcgaaggggtcaaggaattcctggacgggctggagacgttcacccgcgaacgtgaatggccggccgccttcgccgcacgcgtgttcaaaatcgcccacgacggtcagcacaaccgtatgacgtggctgcgcgtcaccggcggtgcgctcaaagccaaggagatcgtctcctcatcctcgtgcgccgcggcgtcgacaccgtcgccagcgcaggaggatgatgacatggcgtggtccgagaaagtcgatcaggtgcgcatctacaatggcgccaaattcgagacggtcaccgaagtgccggccggcttggtatgcgcggtgaccgggctgacgcagaccttccccggcgaagggctgggaacggaaccggacgccgaatcgccgtcgttgcaacccgtgttgacctacacggtgttgcccgccggagcggaatccgatacggccggcacctcgggagcggccaaacgtgggggagccggccatgacagcgcgaatcaggacgatgccgagcatgatgccgccaagtcgggaaccggccgcaatgaggagaacgacaccgccggccagaccgcggcggacaatagcttgccggcccgtccccagttcgatgatctgaccttgcataaggtcatcaccgcattgcgtgagctggaagacgaagacccgttgttgcatgtggtgtgggtggaacggctggccgagattcatgtgcaattgatgggcgctgtccagctggaaatcatccagcagaccctgcacgaccggttcggtctggatgtgtcctttggccccggctccatcctgtaccgtgagaccatcactgcgccgatcgaaggcgcaggtcatttcgagccgctccgtcattatgccgaagcacatatcctgctggaaccaggggagccgggcagcggagtcgctgtggcctcggccctgtccgaaaatgatttggaccgcaattggcaacggctgattctgacccacctgaccgagcgtgagcatctcggtgtgctcgttggcgcaccgctcaccgatatcaagatgactttggtggccggccgcgcgcatctgaagcacaccgaaggcggcgacttccgtcaagccacgtaccgggcgattcgccaagggctgatggaagccagggcaggagtcagtggccggcccgagacgccggtcgagagccggccggacaccacaggggagggcaactgccgactgctggaaccgtggtaccggttccggctcgaagtgcccgcagacatgatcggccgtgctatgagcgacatccagcgcatggccggcagcttcgaatccccggtcaccgatgacgaatacgccgtgatcgaaggcgaggcgccggtgtccgaaatgcgcgactatgcgatggacgtgaaccagtacacgcacggccatggccgtttctccgccaccttcggcggctacaagccatgccatgacgccgaacaggtcatcgcagccgccgcctacgatcccgaagccgatctggacaacacccccgactcggtcttctgcgcccacggtgccggctaccccgtcaaatggtacaaagtccccgaattcacccacgtagactacgtcatgtgaggtggtgactaccaaatctgcggccgaatgaatccgttggtctccaagaaccgttgaatatcgcgcatttccggcatattgatcgaatgggccatgcccggatacacctgttcggtcaacgtgccgtgctcgcgccagaactcacccatcgccgtcacatcggctttcgggaagatgtcgtccgcagcaccatgcccgtagaacacgggcggcttcaacgaagccaattcggcatcgcccgcaacggaccccggtgccagccatccagagcaggagacggctgcggcatatcgcttcggattgaaacgcagcagatgcgcggccaagaggccgccctgcgagaatcccatggcaaccaccggccgagtggcgggaatatgctccgcaacccatgcatcaatggcttgggcggcctcagccgcctgcttgtccaacgattcgccctccggcacaccctcatgcgcccacgagccgaaccacgtatatcccatgccataggcgatgggtgcctgcaaactggcgtaatcagccgaaccggcaccgcaatagttcagcagatcgggcagatcgtattcattggatccccagccgtgcagcagcacgaacaccggggcggtttcaggaccggtcaaacgggtcaaggccttggcaatcttcatggctcccagtgtagccacgtgaccgccgcgaccgcatttgaacggtccataagcaacccatatagcaacgccgttccattcaagtgtccgatacgttatcgtcgtagacgtgccgcacggggaacggcctcgtgcacagcagccatagagaacaccataaagggggtgcgcaatgaccaggttcaatactcagctcgtccacggactgccggttggagacaacaacaccggagccgtgaacccgccgatctacaactcaacgacatatgccttcgagaaggtcgacgcgatgccccgttatgactatgcgcgcagcggcaatcccacacgtgacttcctggaacagcagatcgcccagcttgagcagggaacgcgcggttttgcgttcgcctccggcttggcggcgattcatgccgtgctcagcattttcaagcccggcgaccgtattattgtaggggacaacatttacggtgggtcgtattcgcagctcaatgagttctttacccgttggggcgtcgtggtcgagtcagtcaatacccaagacattgcagcgttggaggccgccgtcaagggcgaccgcgcgaacggcatcgcgcctgcgcaagccgtctacttcgaaaccctgaccaatccgctgctcaaggtcaacgacgtacgcgccatctccgcaacagcccgccgttacggtgcgctgtccatcgtggacaacacgttcgcgaccccgtacctgcagcagccgctttccctcggcgcggatgtggtgattcattccgccaccaagtacttggccggccactccgacgtcaacgccggccttgtggtcgtctccggtgaggatctggccaatcgcgtgtatttcgcgcagaatcgtctcggtggggtcctggcacccgccgaatgtgattcggtgcgtcgcggcatacagacgttggccttgcgtatggatcgtcagcaggaaaacgcgaacgccatcgcccgttatctgctcgctcacccattggtcaaatccgttcactatccaggattgcccggtgctggcgatcagcggctcgcagccaaggggctgaagggcgccggcggcgtgctgagcttcgaagtggtgcctggcgtggaccctgcggatgtgctcaacaacctgcacatcttccgattggctgtgtcccttggtgccgtggaatcgcttgcggaactgccttgccgcatgacgcatttcgaactgccccgggaggagcgtctgaaggtcggcatcaccgatgagctggtgcgtctcgccgtcggcatcgaggatgcgaacgatctgatcgaagacctcggacaggctttcgatatcgcctatgcccgatacagggaacgccacatcgactccgatgtacttggcgcattgactccgaaggtgttcgcttgacgtgatatggccgtatgtgccgttacgatggatgcgatgggaagccgcggacgaagcgcggcgcgcagaaaggacatggcatggccattgatgtgtacggcgccacatggtgtggtgattgccgtcaggcgaagaacacgttggatgagctgggtgcggcgtatatctggcataacatcgaagaggaggacggggccgccgatcgtgccgtggccatcagcggccagcagcatattccggtggtgctgtacgatgatggctccttccaggtggagccctccgccaaggacatcaggaacaagctgcgggagttgaatctgctgactgactgattggcagggcccgcttacggcatgaggcgtgtgccaccgttggattggtggcacacgcctcatgcgttgttgcggctgtgtgtggaccgtacttacaggcttctgaatcgcgcctggccgatggtcacatcgaaggatttgccggcgggggcgtcgtactgcaattcggtgatggcgttgcattgaccctggacgaagcgccagacacgatgccctcccacatcgagatcgaaatagtgctcatcgggccggtcggcgtccccgccttccgtgagacccaaaccaaacacgtcggaccagtgcgcggccaccgccgcggggtcgggcaccgcgaaaatcgcgcgacgggtgtccacttcgccgatggcatgccggtgcagcagtccgccgctctcgtagcgggccagttgctcggattcgctcgcaccccaatcgatgacgaacggatagcgcaggccccgatcatcgcccttgatccatagcaaccgccagcgtatctcctcaccggcggccgtcgtgcgattgcccggaacgatatggccaagatcaaggcctttggccgtgagccgttcggccgcctgttcgatgccatgcacgtgcaatgccggacgatagaatcccacatacccgggcagcagctccccggcttcatggaatatcagcccatggtccggcgtctccgacaaggcttcctcgcggtcgtacaatgccaggaactccaaatagttatcggcgaagtaggccagggagttctccgtgccatgccccacatgcttgccgccgtattgggaagtcagccctgcgtcggcgaacgtccgttcggcggacttgaggtcattcacgaattcgaccgtatggtcccaggtgaattgttgcgtcatgatcggctcccgcctttactttgcatcgccgccgagcgccgtggtgcgctcgaccgccgccagcaccgcggattgtatggatgccgcgaatccggttttgttcagggtatatgcctcggtgattcccactccgccgggggagttgttgatattgagcagcacttgaggcagcacgtctttctgtttgaggaattcggtgccgccgatgatggtgtcgagcgcgatggctctggccgcgtcccggggcagaccggccagcacaccggcatccacgtaggcgtcgatgaaatggtagacgatgttcggcgggtaaaaaccggtgattacgtcgataagtcgttcctcgacatacagcactttgccgaaagtgttgaggaacgcatccacgtcctcgcgtgccgcggccccattcagcgccacgccgctgtaaccgtaatccacggtggtgagtgtgttcgggatgatgcgggccacacgccacccatggccgagcccttgctcaagcttgtcgatggtatagccggctacgatggagatcaccgtggtcttcgccgggtcgaaacgtcgcgccactgaagcggctacgccggcgacatcgtcttgcgggcgcaccgcgattaccacgatgtcggcatccggggcgtccgtcggtgacgccgtctcggtgttgtacgtggatgccagatattcggcgcgttcccgtgagatttcctcaacccagatgtggtcgaccggatatgcggcggccttacgtcgcaccgcttctatgatggcgctcggcatattgcctccgccgatgaaatacaggtttgctcccatcggttcacctcttctgatgatggatacggatgtatgtcagttcccgtaataccgcatggattcccgaaccgtcgtcgtcccttccgaaatggcatataggtgttcttgataggcgcttcaaggatgcaatgatttcgcggatggataagacgctataagaaatgcctgtaatacgtgggcggcattccgcttgacatcggcatcgccgatgcgcttcgatgacggataacgttgcgaatcaggagaagggaccccaatatggtcaatcgtcgcgccgacttccacgccatcgtcaatcatcagtcccggacgccgtatctggttagcgcctggcagcatcttgtcggtcatgaatacggtgccgaggaattcgccaaggccaccatcgatttcgtcaagcgttgggattgggagtgggtgaagatcaacccgcgcgccgtgtactacgccgaggcttggggctctcgctacgatcgcaacgattatgccggattcgtgctgccgaagaagatcagcgccgcgatcaccgaaccggatgatgtgcgcaaaatcaaggaattcaacgctcccgacaatgaatacttcgccgaggctctcgccgcggccgcactgatccgccaaggtcttgaggatcgcgccgtgctgcagaccatcttctcgccgctgtccgtgctgctgcagatcgccgatctgccgctctacccgggcgacgattacgccactgcgacgctcaccgtcgaagacgtgatcttcaaccagcccgaggtcgccaagcttgcgctcgccaacatcgcccacacgcttgcctcctatgcacgtgtgctggtccgccccgaatccgaaggcggtgccggactcgacggtgtgttctacgcggtcaccggcacggtgagcgaagactatttcgacgcacagcgttatctcgaattctccgaaccgtacgaccgtatcgtgatcgacgcagtacaccgcgccaacccggacgctgtggtgctgctgcacacctgccgtgccgaatcccacccgaactggttcgacacgacgggtgtggacctgctgcagtgggatcagtaccagccgggcaacccgaaggcggacgccgacctgacggccgcgccggtcgccggcgccccgtacgacctgttcgcgccgaacggcgatgtcgagcaggtgcgtcgcgaactggccgagaccatcaagcttcgtgaaggcaagccgttcctgctggcaccgagctgcacggtgccgaccccggcgggcgacgaggcgctgcaggcattgagcgacatccgcgtgggctgagccggtccccatttacgcttcatgattattcgaatagagaagggaacatcatgaccatcaagacaatcatccgtacggcgatcgcatccgtggtcactgcgggaacactgattggcgtctccgcatgcggccttggcggggatgccgccagcggttccagcgacgacaccgtgaacatcggagtcatctatccgaagaccgggcaatatgcgcaatacggcaaactgttccagcaaggcttcgatctggcggttgccaaggtgaacaaggatggcggcgtcaagggtaagaagcttggtcttcgatactatgacacgcagtccgatgccaagcaagacgccgcggtggctcccaagatcgtgtcggacaagtcgatcatcgccgtggtgggtgactatgcctcgcccgcatcctcggccgcgtcgcctatcttccagcaggccggcctcgtgcattacggtttcaataattcggcacccacctttaccgataccggggaccacgtatggactccccaaatcggtcaggacaagtatcagaagaccaacgcggatatagtggccaaaaaagccaagaagatcgcggtggtctacatcgagaacgactggggcaaacaggcctatcggtacttcaagcaggaggccgagaaaaacggtacccagattgtgtacgagtccagctatctgcccgactccactgacttgtcgccgattctgattccggcgcgcgatgccaagcctgacgcggtggtcgacatcggctacgggccggacggtgctctggtgatcaataccctgcgcgacaagctggggtacgacggcctgtacttcggtggtcaggaaaccaaggagttcctcgatctcgccggcaaaaacgccgagggttcgatcatcaccggatccttctccgccactggcaccaaggacgccaaggcccagcagttcgtcaaggacttcaaggccaagtacggcaacaacccgggcaatttcgaagtgaccgcctacgaggcgatcatcgatctggcctatgccgccaacaagaccgaaccgacccgtgaaggcatacagaaggcgctgcagaccgtgacggatttcccgctctaccagggcaatggcggcacgttcaaattcaatcggcagagtcgtcgcgccgataacatcgatccgattctgctcatcgtcaaagatggcaagttcgaacaatacgaaggttgattccccgggctttcccatacaccacgaacgaggtaacgcacacaatgtttgatgttcttttcgccggactgatacacggcagcgcctatgcgctggtcgcagtcggcatgtcgctgatcttcggcgtcaccaacgtggccaacttcgcccaaggttccatcgtggccgtgggcatgatgatcgcctggtggctcggttcatcatggggatggggaatcgtgcccacattcgtggcggtgctcgtggttaccgcactgctggggctggtcatgaacatggcgatcatcgctccgcttgaaggccgtaaaccgattgcggcgctgctcgccaccattggcgtcggccaggtgctcgacaatggtctgcaggtcgtcttcgggccacagacccgaccattcccgaaactgctgcagacctataacctgcaagtcgccggcgtgcgtttcggcacttcggacatcgtgatggtgacgcttgccgtcctctcgatgcttggcttatgggcattcctcaagttcggcaaagcgggacaggccattcgcgccacttcccaggatcccgaagccgccatgcagatgggcatcccggtgaaggccatccgtaacctctcctttgtgatcggtgccgtactcgccggcgtttccggcatcttcgtgggcttgttcaacggcaacatcaatccgatgaacggcggcaccattggtatgacggcgttcgtggcggccacgatcggcggtctaggatccattccaggcgccgtggtcggcggccttgtgctcggtgtggtggaagcgttcggcatctctctgttcggagacggtgcacatgacctcatcaccttcggcgcgttgatcatcatcctcatcgtgaagccgcagggtctgcttgggccgaagaccgatgtcaaatccgagccgcttaccggcacgttcctgggaggcggcagggcgatcgcgctgccttggtggggtaatctcatcggtgccgtggcactcgtatccaccccgttcttcttcaatgactacctgtccggcgtgggcactcaggtcgccatctatgccatcgccgccgtgggactgacgttgatttccggctccgcaggccaaacgattctgggcatggcaggaccgttcgccgtgggtgcctatgcctccgcgattctggccacgcaggcgcattggcccttcctggtggcgttgcccgccgcaggtgtgatcgcggcgcttgccgcctcggtgctcaccttccccgtatggaggttttccggccattatgtcgccatcgccaccatcggcgtaggtgcggtgatggtggcgatcattcgcctcgccgagccgttgaccaaggggtctcttggcattcagggcattccgttcccgaaggtgttcggcgtcacgctgtacacgcagcagatgatgtatctgcttgacgtgatcgtgctgcttgtcacgttggtcatcgtcatgcgtatccgaaccgctcatctggggcgcgtgttcgaggccgtgggatcggatcgcgaggcttcggaggcgctgtccatccgcactggcgcctataaggcgctcgcgtatgcgcttgccgcgtttttcgcaggtctcgccggttcgttgctcgcgcaccagtacacgtacattgatccgacgatcttcaactcgaacatgtcgattctcatcctgaccatcatcgtgcttggtggtatgaactctccgctcggcgcggtgcttggctccatagtgctgatcggagcgcccgagttgctgcgtttcgcctccgacgcgcgcatcctgctgtatggcgtgctgctggtgcttgtcatcttgttccgtccccagggcctgttcgcccggaaaggctgagtcgccatgaccgattccgagaccgtattttccaccgtagacgccgtgaccggcatcgatatcgacaacgaacgcctcgataacgcggatgatctggctgaatattccgaaagacaccgccaggccgtccttgacgcgccggtgatgctgcgcgtgcgcgagctcgacaagtccttcgaggggctgcatgccgtcaacaaggtctctttcgacctgcatcaaggtgaggtcatttccatcatcggcccgaacggttcgggaaaatcaaccacaatcaacctgatctccggttttctgcagcctgattccgggctcatcgatcttgccgacgagccggttgccggtctgagccctgcggacatgtctgaacggggactgctgcgcaccttccagaacggtcgtgtgttcggcggtcttaccgtcgaagagaacatcaatctcggatatcaccggcgactcgtcgcggcacgcccgttcaaaagcctgcaaaggtatccgatcgcgcgttggctgtcgttgctcgccgagaccggcgtggcgctggttcctggaccgcggactcggcgcgaagccgatgaggtgaacatccgcgtggatcgggaaatcgaccgtttccgtgaacgactgagcgcgcgtcgacgggattgcacctacacgttgtcgtacgcgaatcgtcgtcgtaccgaaatcgcccgtgcccacatcagcgaaccgaagatcctgctgctcgatgagccgaccgccggcatgaaccagtcggagaccgccgaagtgcttcgtcaactgcaatatctgaaagcgcagggacataccatcctattggtcgagcacaagatcgatctggtcactgcattgtccgaccgtgtgcttgcgatggatggcggccgcgtcatcgcgcaaggcgccccggatgatgtgcgcaatgacccgcaggtggtcgaggcgtatctcggcaagcggcgtgaaatgaaccatacccgggtcgccgggcagtcgcatgtgcttgcgatgcagaactccattggcgccgtcgtcgaagtcgagggcaccggtgccggtaccggacgagatgaaaccgggacgttggatgatggcggggatgccctgcttgcgctcgatggagtgaatgtgtattacgggcaggtccacgcgttgcagaacgtgtcgatctgcgtacccaaaggggccatcgtctctctgctgggaggcaacgcttccggcaagtcgaccacgatgaagacgattttgggcatcaatcatccgaagaccggttcgctgtggttccaaggcgaggatgtgaccggactgtccacgcgcagacgggtccaagccggtatcgccgccgtgcccgaggcgaggcgcgtgtttccacagatgacggtggaggagaatctgttgtctggtgcctatacgcgacacgacagggagggtgtggccggcgatctggaagccatgtacgatcgtttcccgcgtttgaaggaacgtcgtatgcagcaggccggcactatgtccggcggcgagcagcagatgctggcgttcgcgcgagccctgatgagtcgcccgaaaatcatctgcatggacgagccgacgatgggcttgtctcccaaactcgtcgaagacgtactcgaacagatagcgcgactgcgtgacgaattgggcgtttccgtgctcatggtcgaacagcaggccgagctggctctctcgatcgccgactatggttatgtgctgcagaacggacgtatccggctgcatggcaaagccggcggcgacctgctcggcaacgagcgggtgcaggaggcgtatttgggaggagtgaaacaatgagcgaagccgaagggattgagacgtcctcgcatccgtccgtcatcgccgtcacgcaaaggaggttccggtgaccgcagcaacaacccgatcgggcgcatccccgacggcgttcgtaacacttcccgatgctctgaacgctgatgtgcaggaatggtaccgctggttccatcgtcatcctgaactctcctatgaagagttcggcaccacggcgcgcatccgtgagattctggaatcgcatggcgttgaaatcctcgaatcgggactcaggaccggcgtggtggccatcgtgcgcggcgcaagcgccaagcccgtcatcgccctgcgcggtgacatcgatgggctgcccatcaccgagaataccggacttgactacgcttcggataatgccggagtgatgcacggctgcggtcatgacttcaacctcaccgtggcgttgggcgcggcgattctgctcaatgaacggcgtgcctcattacctggtaccgtcaagatcatcttccagccggcagaggaaggtcgtgccaccgcggagcgccccacgggttccgtgcaggtgctgaacacgggtgtgctggacgatgtcgaggcgtttttcggcacgcacgatgcagccggaccggttgggtccatactcatacgtgagggtggcatcaccggcgcggtcgacaaattccaggttgccattcacggcaagggcgcgcatgcagccgaaccggaggatggcatcgacccgatcaccgtgctgacgaacgtggtgcaggggttgcaggcggtcattgggcgcaatctcgaccctcgccatccgcgggtgttgtccgtcacccatatagaagccggcaattcgtggaatgtgattccgcaggatgccttcttcgaaggcacggtgcgcactaccgagccgcaggaccgggttctcgccaagaagcgcgccatcgccatcatcaacaacacggccgccgcctacggtgccactgccgatgtctcgtggttcttcggatcgccttccgtgttcaacgatgccggatggacccgcatcggacgagaagtcatcgccgagcaggggcttcacgcggatgatgatcatcctcaactgggaggagaggatttctcatattaccttgatcgcaagcccggcctgttcgtgcacatcggtgccggtgagaccggtgccgcgcatgggccgacgttccggccgaatccggccgccatcggctacggcatacgctttctcacggccatcgcgcagaaagcgctcaacgagttacgatgaacgcaccccacctatcattccggctgataccgaacgataagaaatgcctgtacccgcaagcacgtgttacggtgcttcgcttcctacactggtgccgtatcagtatgggcgtccgtcggtgtttcctaagggacggcggcatgacattgaggggataatccatggcgagggatttcgttaccgcggctattcacggcggctatgaccgggcggctcacggtgaggcggcgaacccgccgatttacgccagtgcggcgtttgacatggtcagcgccgcacatggtgacgcactgggtgccggcgaagccgagggcttctcgtactcgcgtgtggcgaatcccactgtggatgtgttcgagcgtcgtttggcggaactcgaaggtggcgtgagcgcggtggccgtcgcctccggcatggccgcggtgtcgtatgcgctgttgtgtgccgccgaaggtggtggtcgcatcatctctccgaccaacctgtacggcgcttccgtcgatgccatggagaccttcttcccgcagttcggagtccatgccgatttcgtgcgcgacatcaacgacctcgatgaggtcgcttcgaaaatcgggccggacacccgcgccatctacaccgaatccgttgcaaatccatccactgaaatcaccgatattgaaccattggcggaactcgcgcatcgcaacggtattccgcttatcgtcgacaataccgtgcccaccccgtacctcttccggcccatcgagttcggagccgatatcgtggtgcattccaccacgaaaggcatcaccgggcacggcaacgccatcggcggagtggttatcgacggcggaaacttcgattgggccaacggcagattcccacagttcaccactcccgaactggtcgtcagcgatgaacgcaaaggaatagcgcgcagcttcgccagcagattcggccgcgaggcgttcattcgccgtgtacgcatcaaatatctgcgcactttcggcgcggtgcccagcccgttcaatacatacctgtcgatggtgggattggaaacactggctgtgcgagaacggcaggaagtcgaatcggccacgcgtattgccgagcatctcacgcatgcgccgcatgtgctcaaggtcaattattccggtttgggcaacacgggtcagtatgatctggtcgccaaatacttccccaaaggaatcggcacgatactgtcgttcctcgtcgacggcgatgagaacaacgtgagacgaatcatcgacggaaccgaggtattctcctatgtgccgaacatcggagacgcgcgttcgctgattgtcgatcctgcgcgcatcacgcatcgcgaggttcctttggatgcgcgcatcgccgccggagtcagcgataatctcatcagactttccatcggattggaaaacgtcgatgatttgattgcggaccttgaccaagccattgccaacgcatactgacgtgtatcgcttacgtatgcggataattgttcgttctgagaaaaacctgcgctgttattcttggggcgttgtgaatttgggttgttgtattacgaaagaaggaacaggacatggctattgacgtctatggcgcaacatggtgcggtgattgcaagcaggcgaagaacacgcttgaggagcttggcgccgaatatacgtggcatgacatcgaaaccgaggatggggcggccgatcgtgcggtggccatcagcggccagcagcacattcccgtggtgctctatcctgatggcactttccaggtcgaaccgtcggctgtggatatcaagaacaagctcaacgagctgaatatcaagtaaagacaagagttgtacgagtttgacgatctgctgcatctgtgagcgaacaatacgtcggcgtccgatgtgttattcattggtgtgaatagcactccataggcactggatataaccacgccgaaacacaggtgagcaagcgcgtctacggtaagggattgtgcttcgcgaacgagcgttgacgtgcataacagcagcgaaaagggagtatcgggatgattcggattaggggagtgagcaagagctttgccgacaccaccgtgctggatgggcttgatcttgacattcctcgacaaaatgtggttactgtcatcggcccctcaggctccggtaaatccacactgttgcgcattctggatttccttgagcacgcggattccggtaccgtcgatttcggtgatggtcttgtggatttgaccactaccaaatctgccgacattcacaaggtgcgttcgaaaatcgggttcgtgtttcagaactacaacctgtttttgaacaagacggcattgcagaatgtgaccgaaccgttggtgtattccaagggaatcaagcctgatgaagcccgcaagatcgctattgagcaactcgatcgtgtgggacttgccgattttcatgatcggtatccgagcacactgtccggcgggcaacagcagcgtgtgagcatcgcccgcgccgtggctatgaatcctgagctgttggtgcttgacgagcccacttcggcattggatccggaaatggtcaacggggtgctgggggtcatcaagcaactcggtagcgaaggcatgaccatgctgatggtcacccatgagatgcggttcgcctatgaggcatcgaatcatgtggtgttcatcgaaggaggccatgtggtcgagcagggtgatccgaagcggatcttcgaacatccgcaggaggagcgtaccgtcgagttcctgtcttcaaccaacaatgtgctgatgattccggtgactcggtagaggcgtttcacggctgttgtaattaattgtgacaatatcaagagaggggtttgtcatgttcaataatcaagtgattcgcaaggctgcggctttgctgtccggtgtcgccgtgctggtttcggttgccgcatgcggttcggcttccgcttccaactccagtgcattggagcaggtcaagcaggccggcaaaatcgtgttcgccactgagggcacctatgctccgttcagttaccatgactccaaaaccaatgagctgaccggttacgatgtcgaggtggccaaggccattgccaaggaggtcggtatcaaggccgagtttgccgagggcagcttcgactccctgcttgccggtgtggatgccaagaagtacgatacggttgccgatcagatttccgccaccgacgagcgcaaggccaagtatgatttctccgaaccatacacctactcctacggtgtcgtcattacctccaaggagaacccgaagaacgtcacttcgttcgatgacgtcaaggggcttcgcgccgctgaaaccggtacctccaactggaacaagaccgctcaggagaagggcgctactatcgttcaggttaacgatttcggtcagcaggtcgatgccatcacgtccggtcgtgcagatgtgtcattgaacgatggccttgctgcgctcgactacctgaagcagaagccggatgcggacatcaagattgccgccaagtccgagaagactccggccgcctacctgccgttccgcaagggcagcgatgacttggtcaaggaagtcaacaaagccattgtcaagctgcagaaggatggcacattgaccaagatctccgaaaagtactttggcgaggacttctctcaggagtgacatgtttcccggctctcctgtaattaggggagccgggaaatatgagctggcctcgtgaagattacgagcagacgcaacatataccacacaacaaaggatgaccaatggacgcacgagtatggggaatagtcgtagattcctttgctaagctactgattcccggtatcactgtgaccattccgctgacgctgatttccttcgctctcggtttgatactggcgattgtggtggcgctggtgcgtgtggctaaagtacctgtggcctcccaaatcgcgtggttctacatttgggtgtttcgtggtacgccgttgctggtgcagttgttcgttatcttctttggattgccgtccgttggcattacgattccggcattgccttccgcggtaatcgcgttctcgctgaatgtgggcgcctatgccgccgaaacattgcgtggtgcgattcttgccgtgcctaagggacagcttgaagctggcttggcggcgaacatgccgtatgtgacgattatgcgccgcattattctgccgcaagcattccgctccgccttccctgcattgttcaactccttcatcgcattggtcaaggacacgtctctcgcggcgaacatcaccgtggtggaaatgttcatgacggcccagcgcattgtggcgatttactacgagccgctggtcctatacattgaagtgggcttgatctacttgctcttctgcacgttgcttggatggcttcaggattactgcgagaagaagctcaacgaacacttctgatgtgtttatatggcggcagtgcttgattcaagtcgggtgtttccttggttgaaatgcccgactttgttgtttctgacgtgcgacttggctgattcaaacattagtgcacaagatgtggctgccggagtgaacggaacatgaaatctgacgttcgctttcttggacttgcctgtgagagctatcagttcccgggcgtgcgatggtagcatggatggtgttggggcgcggcacaacgatatgccgtgcttgacccttgtgagaggagttttatatgaccatcgcaagtatgttgggcggaaccatgctgttggtgctaattctattagtcgttcttatcgtgctgctgggcgccgcattgttcatcgttccgcagcagcaggcgtacatcatcgaacgcttcggcaagttcctgaaggttcagttcgccggcattcacatccgtatcccgttcgtcgaccgcatcgccatgaagaccaacatgcgcgtcaaccagctcaacgtgcagctggaaaccaagactcttgacaacgtgttcgtgaccgtcgtggcctccacccagttccgcgtgaacccgaacgacgtggccaccgcctactacgagctgcgcgatccggctggccagctcagaagctacatggaggatgcgttgcgctccgccatccccgctctgaccttggacgacgccttcgcccgaaaggacgatgtggcgttcgacgtgcagaaaaccgtcggcgccgagatgagccgtttcggcttcaccgtggtcaagacgctgatcaccgccatcgatccgagcccgcaggtcaagaacgcgatggactccatcaacgccgcccagcgcgagaaggaagccacccgccagcgtgccgaagcccagcgcatccagatcgagacgcaggccgccgccgaagccgagaagacccgtctgcagggcgagggccaggccaactaccgccgtgaaatcgccaatggcatcgtcgatcagatcaagagtctgcaggccgtgggcatggacatcaacgatgtgaacaacgtggtgctgttcaaccagtatcttgacgtgatgcgttcgttgtccgaatcgaagaacaccaagaccgtggtgctgcccgcctccacgcccggcggttaccaggacctctacgagcaggtcaccaaggccatgctcaccgcggccgagacgaagtaatcaccccgtttgcaaatcctcatccatcgatagtgaagcccctccaagcgaggggcttcactgcgttccgcgctgattccgacaagtgcgcaaatgggccgtatacagattgtgacgagtgtgagaatcatctacttatagattgtgacgaatgcaaaaatacggcatttatagaactcgataagtgtaaaatacaggatattacaaaatcagacgagtgtgaaacgaaggggtggaacatgttgaaacgcaaggcatatcagcgtattgctttctggaaagagcataagaccaaccaagcattgctcattaccggtgcacggcaggttgggaagacatatctggttgaggaatttgggcagaacgagtatgagcatatggctgagttcaacctattgcttgacgacagcgtgcgtcgttcgtttgcgcaagccaccagtcccgatgatttgatgctgcgtatttctgttgctgcacaagggccgttggttgtagggaagacgcttatcttcattgatgaaattcaagcatgcccacagattgtcacttttatcaaaggactggtggaccggggagactatgactatattctttccggctcattattgggcgtagaactggaggatgtgcgctccctgcctgtcggatacttggatgaatttatcatgtatccactggattttgaagaattctgttgggcactggggctgtcggaaaccgtcttcgacattgttcgtgacagttacggtgccgtaaaacccgttcctgattttgtccatcagcgtttgacggatttgttccaccggtatctgttagtcggtggtatgccggctgcagtgacttcgtttgttgagagcaaggtcatcgatccagtgcgtgcgattcagaccaatattcgcgcatactatgagcatgacattaagcagtatgcgccgaaggataagagactggtcattcaagaaatgtatcgacttatccctagtgaactgcaaagtcaaaatcgcagattccaagtcagttctattgccgaagtcaaacgattctcgcagattgaagatgaattcctttggcttacccgtgctaatgttgcgctgcccgtatttaatgttgccgcccccgtggccccgctgagagccagcaaagaacgtcgattgctaaaactgttctattccgatgttggattgctgaccagctcgtatggaaaaaagtcagcactgggcatactggatggtcaggctgcgatgaacatggggggagtctatgagaatgtcgtggctcaggaacttaccgcgcatggattcaccaatctgtattactttacgaaaaaaggaattggcgaactggatttcctgatagagaccgatgatggtgatgttttggccctggagattaagtcgggcagatattaccgttctcatgcggcgcttgacaatgcgttgagcgctgatggctacaccattgacaaggcgatggtgttcgcggaaaccaacgtgttccaagaggaaggcgtcacatatttgccgatgtatatgctcacgatgctggttaatgagtgatcggtgccttggtggtgcgatgcaggcgatatttgtgatggcggtcgataaggaggtgctcaacgattctgttgtcggaccggttccgagctggtcatgaggcgtcattggaaagttgcggtgtgtagggtggtgtctttgccgagagtacagtgtttctcgaaaaatgcggtgcatgcgatatgtttaatgtaattctaaatattacattaaacatgagtgagcttcccgaattcaatttgtaagtgcaacgttcgtctttgggtagcttgtcttcgacattagcttgccgagttcgcggtatcaaacctcgttgggtgtttcccagtccaggaccttcatgggggtgtcgttgatctcctggacgatggcctgcaggtcctcgtccgtcaggtcgtcgaagctggttctcttgggcaggtagcggcggatgcgcccgttgcggttctcgttgttgcccctctgataggacgagtacgggtccgcatagtaggtgagcatgccgagcgactcgtccacgagcaggtggcaggaggattccgtgccgttgtcccaggtccggtcgatgcgcgcgggcgcggggatgtccttgtagatgtcgtattcggcgcgcgcggtggacagcgcgctcttgtcggggatgaacccggcgaacagacggcggctcttgcgttcgacctgcgtgtcgatgcaccgcctcgacggggaggcgccgatgaccgtgtctgactcataatggccgaactcgcggcgcgagtccacgcgtttcggacgttcgccgatcggctgtgtcctcagctcgtcgatccggacacgttcctctgccgacaggtgggaatacactctcatatcgagcgcgacactttctctctggttatgaacttgaacactttcagccatggagcaggtgttgcgcttctatttagaactcgggcggtctatcattgcatctgtgtttcgctattgtggggaggcgtcgtaaatgccgattgtcgcgggatttcggccgttttgtgatgcggtggcgacgtcgtggcggacgagtgcgtatgcgttgcgtaggcgtccggtgcgtacggtggtgatgtggctgtcgatgttggtgatgatggcgatgccgtcgttgcaggtgtggctgatcggttgggcgtgcggcccggacgggcttggtatggggtcggggctgggcgtgggccggttcgcagtgatcctggcggtgctgacggtgggcgcggtgttgatgtcggtgtcgtcgtcgttggcgcagaacatgcgtgacttgttgcaggagccattgatggccgaataccagtccgatctgaccgacgcgctggcgcgtctgactcccgcgcagacgttggacgacgaggtgacgacgcaggtgcgggccgcgcgcgacgcgatcccgtacaacgtggcttcgtaggccgcggacgcgacctcagtggtgggcgcgctggcgtcgatggtcatgctggccgcgtccttgtggcatatgcatccgttggcggcgctgatgatcgcgttggcgatggtcccggagctgttggcccagttcggcgtggagaagctcacgaacgagttatggcccaagcgcggcagggagtcgcgtcgggcgaactatttcgagcggttgttggattatccaccgtcgagcacggagatcgcggccacggccggttcgttcggcatccctgcgcaggcgcgcgtgcgctatttcaatatggccggcatgtgggagcgtatctcgtggcgcacggtgcagttgaccggtgtgagttcgctcgtgttcgccgtgctgacgggcggcgcgttctggctgatcctgacgtccggccatgcgtccgtgtcgagcatcccggccgcgttggtgggcatcatgacgggattgtcggtcacgcgcaccactggcgaggcgttcggcaacctcatggcgtccacgccgatgattcttgcctacgaacggctcatgggcctgctgcgcgcgaaccccgcgatccccgaaacgaccggtccggtcggcgtgcacgtggagcatctgacgtacgcgtatccgactgttgcaaagcatgacgatgacgcggatgacgcgtcggcagcgtcggttccggccgttcagactccggcgttggacgacgtgtcgttggatgtcgaagcgggatcgatcgtcgcactggtgggcgagaacgggtcaggcaagaccacgctcgtcaagctcatcgccggcatcctcgacgccccggacggcaccgtgaccctgccctcgggcgcggacggcgggaacggccgtaccttggggtcgtgggccgaacggttgggcgcgtcgagcatggtgttccaggatttcacgcacatcgaggtgaccgtgcgcgagttcatcgatcccgctctgcggcaatcggacgatgagttatgtgacgggttgcgtcgcgcccgcgcgctcgacatcgtggatgggcttcccggcggcttggatacgcagctcggtcaggagtggggcggcgttggcctgtccggcgggcaatggcagcggcttgcgctggcccgcacgttcctgtccggcaagccgttgtggatactcgacgagccgaccgccgcggtcgacgccaccgccgaggccgcgatctaccatgatctgatcgccaaccgtccggcgggcaccactgtgatcgtcatcagccaccggccccgcgtactaaccggcatggaccggattatcgtcctcgaccacggccacgtcaatgaaaccggcacctaccgtcaactggtcgacagcaacggcaccttcgcccggctcgcacacgacagcctcgaatgagctcgatggcatatccggttgattgttgaaaactcagtggccggccgacagattcgtccgacgaggctcgcgcgagtgatcatagcgcgggtcgcgtcggatatgcgggagatggcacgccttatatcaaaagcgattattttcaaataaggacacggccccatcagccggtcgcgggtactacagtgaaccacaacgttcctcccccgatggtttggggaaacacagaaagaggttggtcgtcggcctgatcatcattgcgattcgcaccggcttcttccgcaagaagctgggtgccagcgagaaccttcaggagtatttcgcctgaatcgggcttgtcgtccatccgcattccgcctcagatactcatatcgataacttactaacaatccattcattgtcttcttaccagtaaaggaaatcgccatgtccaacttcattcccaacaccgtttccgcagaacgcaagcccgtggacatcgtcaccggcacctatgtggactatgccggcgtgacccgtgccaaatccgttcccgcccgcaggcgtgaagccttcgaacgcaacggattgggcgccgccctggtctgggtggtgttcggcgcggacaactcgttcgccgaaaacgagaaattcaacgtgtccggcgatctgcgcctgcaccttgacacttccgcttctgcattgcgtgccatacgagcgtgaagcggcgtttctctgctcggtgcatgccaacgtatacatggatgtcagccttgccaatccgcatatgggagcgcaggtgagggaagtgctgcgcaatgttctggcgtggtgcccatttgacaagttgctctatgcgtcggacggcatcggcatcagtgaattgcattatctggccgcggtgctgttccgcaggtatattgcgcgaatcgccatcgactgggtatcggatggcgcatggaacgcgaatcaggcgaaacgggttatcgacgccatcgctcatgccaatgcggaacggctatacggtttggcgtgaacgggtacttcgccggtgccgtcacttcccgaggaacgccgggatggcctcggccgccgcgtatcccttgcggtacatcatctccagaccctcgaagttcttcttcagggtgttgaggccgtacaaatcttcgggtgcgaggatcagcactttgccttccgcctcataatgcttggcgagttcgagttcgtcgttgtaggtcttgtaacgcatgcgcagcttctcagccgcagcggggtgggagcgttcgagaatgcgggccggagccagatccttttgctgtttgcgcacttcgctacgcaagcgggaaagaattagaatcacgcgctcataaccatcatccaacgctttctgcaccggcaccggatcggcgatgccgccatcgaaatacggcacaccatccactacatacggctcgcaggccaccggtacggcggacgaagccttgatgatgtcgaaatcatcaaaacgcacgcgcgatttgtcgaaatacttggtcgagccgtcctcggcattgcaggccaccacggtgaatccggtcggattggcctcaaaggcctcgaaatccaacggattctcaccgtcatggttgctcagcgtgccatagatatagtcgagattggcgaagttgcggttcttgaaatagctctccgcgctcgcatactccttgcggaaggcgtatttggtgtagaaggtgtggttgcgtccatgttggcgggcgatgaacgaggtcatattggccgccccggcggacacgccatagcacatgtccacgtcgatgccgtcctccagcatgcggtccataacgccgcagccgaaaatcgcgcggaacccgccgcccacatcaatcatcgcggtcttcagtgccatatcagcctcctattcatcatcatgcatccgatcacgcattcagcaggtcgcgtgaaagccgtgtaacacgttcggacagatcggaattggcgagttccacgccgccggtcgcgtcttcgggtgccagtttgcccagggactccagcacaacgcccagatggcgcacggtgccctcattgccgtcgatgacagcagcccgttcgggcagcagctcgcggaagtagtcgcggtaaaacacgaaatgcgtgcagcccagcaccaccgagtcgatgtgctccatgtcgtactggtcgaagtagccgtgcagcgtgcgcatcaccaggtcatggtcgccgagctgcccggattccacaatctccaccaagtcggggcaaggctccttgaaaatcgtgttgttggaatcgaatcgatccatcagcttggcgaacttccgctcacgcaaagtcaggggagtggccgccacaatcaccctctggggaatatgatgcgggtcggaaggcacgtcaccacggtcgcacgccactttcagggccggctccatgccgatgatcggaatatcgtagtgttcgcgcagatcgttcaccgcggcggaagtggcggtgttgcatgcgatgaccacggccttgatgccttgacgcacgaaccgttcgacaatatcgaaactcagggccctcacctgctcaggcgtcttgacgccgtacggggcgttggccgaatcgccaaaatacagcacacgctcggccggcatatccttggcgatttggcgagccacggaaataccgccaagacccgaatcgaatacgccgattggagccgaagagctcatgcctgaatcctccctatagccatgcctgcaaccgtatgttgccgcgaccgatcacaaagccgattgttttgcggtgttgtttcgctccctagagtactctgaaagccatgagtcttccgcaacgagtaaccaagacacacgcaaccggcaatgatttcgtggtgtacctcgacaagtccggcaaattcgagcccaccgccgatgaggtccgattcctgtgcgaccgtcacttcggcattggcggtgacggcctgattcgcctgacacggcctgatttcgtgtctgatttaagcgatgatcagctttcggacgtactggccgggggcgcgaaatggttcatggactatcgtaacgcggatggatcgttggcggagatgtgcggcaacggtacgcgcgccatcaccttgttcgctcagcgcgagggtgtggccgactccaccgagccgttccgcctcggcacccgtgccggcgtcaagattctgacgccacgcggcaatatgaggccgtacggagccaacgtgttccaagtcgaaatgggggagtggaagatcggcgaaaccgacgcctacgaggtcaccatccccggcgctgagggctcggcgcgcggcacgttcgtggatatgggcaacccgcacgtggtcgcggtgatcgaggatgccttcgcgtccctgccggtggtcgaggcgctggatctggtcatcaagcccgtggtgagcccgaccatcgaatccgaccagaatgtggaattcgtgcgggtcgacgacatcgatcagaacaccggcgtgggtgaagccacgatgcgcgtcaacgaacgtggctgcggcgaaaccctgtcctgcggcaccggcctatgcgccacaggcgttgtgctgcgggccaagaccggcatcagccactgggacatcaccgtacgtggcggtaccctgcgcgtggacgtcaccgacagcgacgtgaaactgaccggagcagccacgctggtcgccgatatcgatttgttgtaaaggaatcaggcagcgaacagggccgcgccttcggtgacgatgatgagtaccacgatcgccacgatccacagtatgtcgaccatgaggtcgatgttgaggcggtaatacttattgagtccggccggcaccgccgcgacatcggcctcgctgtcgccatcatcagccgccacagccttacgtgacggcaatccctgcactgccacggtcgcatggctcaacgccatgaactggatggtggtggagaacatcagggtcaggcaccacgggcacagcgcgtgaatcacgaacagcgactgtgtgctcagccagtacgagtaggccaaagcggccagtccgcccagccacgtgcaggtcgcgaaccaacgcggcaccttcacacgagccaaaccgatcaccgcgatggtaatgaacaccgattcggcggcgatgccgaagaacgcgttcggatagctcagcccgccgaacttcacgatttccgcctgccaggactgggccaccgccgaacaggacaccaccgagttcagatcgcagccgagcgcggactccggatgcctagccaactgcaaagtctcggcggacagaatgagcgaggcccccaatgccactgccgaggcgatcagcatgatgagatatgtccaagtggcactgtggcgccatccaatcaacggtcgcgcctccgccaagccaagcggcgtggtgttcgtggtactggatgatgtgtcggttgcggtgttacgagtcatcatgtccctttcgatagcgctgcgctccagattagcctctgcggttgtcagctgagtgccgaatgtctggtcttggccgttggcagaaggtgacgacctgtctgcgccttgcgtgggaatgctgagatgaggttacgatggaaggtatgactggatatgtgatgcctttggagccgcccgccgtcgggtgggacatccattgccataccgtcttctcggatggcacggaaacgccggccacattggccgaacaatccaaggcattgggactcaagggcgtggccatttccgatcatgacaccaccgccggctggccggaggccgaagccgcatcccatagggtcggtttgccgttgctccgcggcaccgaaatcaccgccacggatgagaacgtctccgtacacatgctcggctaccagtatgatcccacgaatcagcacatcacggacttgttcgccgatactcgagccgcacggttgcaacgcacgcagcgcatggtcgaattgttgtctcgtgattatccggttacctggcaatccgtgctcgcccaagtcaaggagggtgacaaaaccaccattgggcggcctcacatcgctgatgctttggtgagtgtcggcgtatatcggactcgttcggaagcgtttgcgaatgcggtcagcgcctcatccaaatactatattcccacgccctcgccgacctctcatgaagtggtggccgccgtcaaaggggcaggtggtgtgattctgatcgcccatgccggtgatgtgagccgtaaccgcagactgctgtccgatgaccagatcgaagcgttgatcagcgagggattggacgggctggaggtatggcaccgaggcaattcaccggagcaacgagaacggctgctcaccatctgccgccggcaccagctactggtcaccggcggatctgactggcatggcaaaggcaaaccgaacaaactgggggagaacctcaccgacgaggccactgtcgaagagatcgttcatcgcggcgtgctcccgttatatcggtgattcgcggcaatacaaagcggccttgagatgatgcccaaggccgcttatgcgcgattcacggtcacagcgtgccgaaaccgacggcgtgcttggtttcggagccgatgatcgcgtaaccgagtgccttggcgggcacgatgatgcgacggcccttgtcatcggtcatatcgatcgtcgcgttgtcggccacggcctgcgcgatggcccggctcacattatcggctgattcgtcggtgctgaagttcaccggtcgtgccacgttctgaatgcccagttcgatatccatataaggctccttgttctgccgtctttgtgacgaacatcatggtaagtggccgtcaccggccgaggttctgtactctattgtgccgcgtgtctgcgtcgtcatgtgcggtgttacgcgctcggcgtggcgcggaacaccgcacacgacattatttggatgatgtggatgattcggccagcggattgccctcgctgtcatacccgtccaacccggcacgggcatcgcgcagagcgcgttcttcccgctccaacagcggaatcaccgtggtttgggcactcgaggctccgtgctgaacgaaactgtccggagtatcgtcattcaccgcatcgtcggtcggggcggcggattgagatgcaggggaagcgtcggttgacgtcgtgccgctatgcccgttcatactgaggagctccttcagcgtgatcgtcaccgaagaatgggaagcgccatgtgagggctgcggtttggtcgatcccgtaccggttgcggtgccggagacactcgcttgcgggtgattggcggtccggtcagtatcgggttcgacttccggggtaagatccacgtcgccagcggccacgatgtcagcggaaccggtgcgatctggatcgggcgtgtcgtccgagacctcggccgccgcggtaccggtttcggactgctgcggttgtgcgggtacctgcgtggcgggtgcctgatgacggtcgtcctgcaacaatgtgccgacggtgattgtggagggggaaccgggctccgtcgacgcggcggcggccgaccctgcagctggggccgatgccggagtgtgcttgatcacgcccaactggtgtgcgagtcgttcgacctgtgccttgaactgcatgatgcgattgttgtccgcacggttcaacgcctgaatgaattcgcccacctgttccatctgcaaccacaggttggccctgagcatgatgagatcgtcaagtcgagagcccatcatgcggccgtatgcggaaagcacggcgttgcgatgggattcgtcgagcttgccgaaaatccaggcaaggtctcgggccggatcgttgacctgcatatcctgccagttggtcaccgtggtgatggtggaaccggagaacaggaagtcgccgtcggagaatccgccgtgaaccgtgcaggtggagaacgaccatagtccctcagtgtccatgatgcgcgcccagctgtcggtgatttcttggggaacatggccggcggagcgtaagcggcgaatccaggcggtcagctgcgaacgaatctgaccggtggtgactaccggatatttggcattggccagaaaagtcgaaggcagacgatgaatggctccgatggaggtgccgacggccgcgcagtcatccaatgtcaacaggtcgagaggccgcgcctgaccatcacggtggacggcgatcatcacggtcgtctcgcctgtgggaccgggcttgcgcggggtcagcggtgtggactccgcctgggcctgctgccccacggcctgtgcggtggccgtctggccgggttgggaaacgtctcccgggacgaatgcgaccacacggtccatatcgaagccgaggccaccaagctcgcgcgcggctgccagtgtctgcgccgctttcacacggcggatcagacgtgtacgcccttccttgctgtcagtggcgtatacgtcgtacaacttgcccgaggcatcttggatcacggtctgatcgatgcctttggcctcgtcggttgcgctggcctgcacgttctcgcgtacaccggccacccacagattcggcaggacggctgaggcgagtgccgccaacatataatcgctacgtttcatcacccttccacactaatacatccgtggcgattcgcaccccagaatgacacgcaaaacgcatgattctggcgatgttttgtcgtgagcccgattcagccataggcgtgagtcgtgccgtgagcgcgaatcgtgccacaatggacgcatggaacaggcgcaggggattcttgaggggctcgatgagcggcagcgtaccgccgcgactacgttgcaagggccggtgcgcatcatcgccggcgcaggtgccggtaaaacacgcacggtcacgcggcggatcgcctatgcctgcgccaccggggcatggaagccggagcgggtgcttgccgtcaccttttcggtaaaagcggcggcggaaatgcgcgcacggttgggccagctcggcgtaggggaaggtgccggacgttccggttcgggtgcgggaactgccggagtcacggccgcgaccttccactcagcggcattgcatcagctcaacagcgtctgggcggacatatgcgaggctccattcccgcatgtgatcgaagatcagcgtgacgtcgtctcccgcgcgatcatccgcgccaccgcacgtaccgatgccgatccgctgaccgttcgcgatgtgctcgccgaaatcaattgggccaaaatctcgttggtggcggtggaagattatgcccgggcctgtgccatcgcccatcggcagccgcccgccggacttgacaccgcccggttcgccgacgtctacagcgcctacgagcaggaaaagacctcgcgtggcgaaatcgattttgacgatattctgctgctcgtatgccatatcatggatgattttcccgaagccgccgcccaaattcgttccaccatcggctggctcaccgtcgacgagtatcaagacgtctcgcccctgcaacacaggctgctgaccctgtggctgggcgggggagggcctgacggcaagagcgcgatgaaccgcaacgtatgcgtcgtgggcgatccggcccagaccatctactcgtttgccggtgcctccagctgggatctgctgcgtttcgccgatgaattcgggccgctcgccgccgatgtcaatctcaacaccgactatcgttcgacgccggaagtcgtgaatctcgccaaccgggtgcttgcggccgcgccgaaccgtgaggattacctgaaactggtttccgcccgcgaatccggcccgcgcgttacccgaaccgcttatgagagcgatatggaagaggcgcagggtgtggcggcacgcatcgcccggttggtcgccaacggagccaagccgtccgattgcgcgattctcacccgcatcaacgcccaacagccggtattcggtgccgctttgcgcgctgcaagactgaaataccgcgttcgtaaggattcgggatggcaatcatccgcgctcgccgacgatgccgcgtccaaacgtgcgctattggaggcgatgggtttggacgccaccggacttgccgcaaacgacgatcccggcgttacgatttccacgattcacgcatccaagggtctggaattcaagcacgtgtttctgatcggctgttcggaaggactcttgccgtacggttcgccggaaacgggggatgcgctggaagaggaacgccggcttatgtatgtgggcatcacccgagctgaggattcgctgcatttgtcgtatgcgcggaccaaggatggttatggagcgcaacacagacgcccatcacgatttttgtgacgggcgtcggtaatgaatgtgaatgttcctgaacgttcaggaacgggaattggctgaaggacggttgactatgcctgcgtatcctccgagttgccgttgccgtcatcttctccgtcttcgccgagaagcttggacagttcggcatcccaatcgatatcgccggtcttgccatctgcggcagggtgggaggcggaaccattggcatcggaagaggagcctgaaggggcgtcggatgacggagacgcgccatctgcgggcttgtcgctaggcagcgaaggcagcagatcgggatgcgaccacttggcgtcacggccttcagggccttcggcggcggtgatcatctcccacaatccggcggcctcgcgcatgcgcttggggcgcagctgcaaaccgagcagactttcgaacgtacgctcggcggggccacccatcgcgcgctcgcggcgcatcatctcacgcaactgttcgatatgaggcagatgggccataccggcgcgccacaccacgcaatccacccagccctcgaccatcgccagcagcgattccagcgaagccagcgcctcgcgctgttcgggagtgtcggggatgccgaccttggtgagattcaccgcgccggaaatcgactccggatccatcgacgtggcgtcacgcagctgttcctccatcgcatccagatcgatggagatgccgcgtgcgtacttgccgatgagcgcctcgaaacgcggcatcagccacggtaccgaggcatacaggcgggcgtgagccatttcctgcagggccaggaaggaaagcacttcagattcgggaattttctcggtggtctcgaatccggagagcgcagcctcgaacgcggcggcgtcggcggaagcatcggagccggagacttgggcggtaccgtcagttgccggagtatcgctgttgccggccgaagtgaagccaatgggattggcggaagcgtcggtggatgtggagaacggattgaccgagtcggttgaagtgccggccgtatcggcctcgggcgcaggagtctcaccgttcagcatcttcgcgtattcggtggcgttctgggcaatcagtccaccagccggattcttcagcaatgcgatgccctgatcgaaactgccatgcacttcatggctcagattgccggccgcatgccccaactgcatggcaaaggacgtgttgcccagcagcttcatcagctgggctggatctttcatgccgtcgggaatcggaatcggcaccggtccggcgaacatgccggcgatctcgccatcgccgaacgcgccgccaagacgctccgaaatcaccgaagccaaagcgtcgttcatcgactcggccacaggagctgcgaacttcgcccactggtcgatggtgccttccacccagccggcgcgggtcagcacatccggatcgccgggcgcgggattgaactcgcaggcggtatccagccacaggttcgcctcactcatcgcgcggcgagccgcctcgccatccacggcggacacgctggacgcggaaccggaggcgttggcctgctgcaaggcaatcgacttggcgagcttgacgttgatcggcccttcctcgacagtgcgctgcatatcgcccatcgtgttgagtccgccggcgctgaacgcggccatcatctgctggacttcggatggattgggcagtcggctggggtcctgactcatcagctgttcacggatctcctcaggcaactggctgatctgctgccaggccatctcgccctgaatggggccgaagcatttgatcagccactcgtgaatcgcgttgtcgtccatgcgtatccttctttgccgcggtgtgttaccccaagtgtagggtctgcccgggcctgttcgctcgtggccgagcaatattttcggtttatgttcgttttcggctgatttcggccctccgcttacactgtagggtatgtttgcacgccacaggaatcaggaaccagacttcgtccaggagcagaagagcccgactgcggattcggaagcgggggatgggcgcatgccatcgttcgaagtgaagcatgattcgcgcctatctcgtggaatcagccgtgctcgggcctatgcggccgctcgtccgaaacgccatttcgtcggtgcattcgccgtgttgcttggtgtggtgattctgctgctgcccagcccgtacgtcatcgagatgcccggacccacccaagacgtgctgggcaaggtcgaggatggtgcggttatcgacatcaccggtaccggcgtgacgacgtataaggattccggcaagctgctgctgaccacggtgaacgcgtccggcgtgcccgggtacccgatcatcaacgcgcaggccgtctggggttgggccaatccgcaggtggaggtcatgccgcgtgaggccacggtaccggtgggccagagtgcggaccagtatcagaagaaagtcgaacaagacatggccggttcccaggattcggccagtgccgtcggtctggcgcatgccaaagcccatgcggacgaactgggcattgacgccagtacattgcaacacgccaaggtgacgatgcacgtggacagcatcggcggaccgtccgcaggcatgatgtacacgctcggtctcatcgacaaactcacccccgccaacgagagcggcggcaagaccatcgccggcaccggcaccatagacaaggacggcaaagtcggcagaatcggcggcatagagctgaagatgcttggcgccaagcgcgatggcgccacatggttcctggctcccgcatcgaattgttcggatgtggccggccgcgtgccggatggtctgcgcgacgtcaaggtcgccacgctggacgaggcgtatcaggcgttggtggccattggcaaggggcaggccgacgatttgcctcattgcgaggcatgacacgcgcggccagtcgttgtttctggtgagacgactcgcatgggtctgcccacaatgcggcgattttcggccgcgttaacgcatttgttcgcgaagacttgctaatgtgtcccctgtgaatcaaacggcatcacagaacgctgaagaatttggtttcgagcccggcgatatcgttcaggagtggctctgggacgacgatgtggacgattccattcgtgcccagattgaagagctcacgggcgaggatctcgtggacgaggactacgactccgctgtggacggcgtcatcgtatggtggcgcgacggcgatgatgaggacgaattgtccgatacgatcgttgacgcctacgcggtactgggcaatgacggcccgctgtggatactgactcccaagcccggccgcccgggtgccgccagctcctccaccgtgcagtccgccgcacagaccgccggtatgaacgccgccaccccgctgaccgtcagctcggactggaacggcattcgcctgcgcgcattcggcaggggccgctgataagcctcaatcaatacgcttgactttaagcgtgttgactggcgtcgcgtgctgcgtagtgctgctgggcgtgactgaatgtcatcgcgattgagcgctacggcacgcgtatgcgacaccacgtgtcgcgcagtgccggccatacgctattgttgtcatttgcgggcaattagctcagttggttagagcgccacctttacacggtggatgtcgggggttcgagtccctcattgcccactttcatttttcatcacttcgtgcaatcccctcattccacagacatgggctgtgacgatattccctgacagtcttcggcaaggggttctgaaatctcagtgagatgcgcgcagaaggaaaccggcagtactgctacaaaatcgtgaatttcggtcttcttggtcagatgcgtctcaatagtcacgtaaagttgtggcagagtgtttatatccagcaggaggtcgaatagccgatggcgcaggaacttcgtgaaggggacggcaagtcgggcatcgcacgtgcgggcaagcgcaagtgggggtatgaccccgctcaggtggacgctttcttggagcgcgcccatgctctgtatgacagcgagggcatgaatctcacccagcatgacattcagaacgtgtcctttgatttgcgcaagaacggctatgtgatcgcacaggttgacgccgcgcttggacgtctggaacgtgccgtggtcgataagcagaccacatgggagatcgcacagcatgggcgtgtgacgtggaaggcgaagaccgagaagctgtatcacgaagtccagaaccatgcggagcgtgacgagcgcgaacgcttcaagtccggagcgcccaagcagccttcgtacgataagaagcaggtggatcgtctggtcgaccagattgtggacaaggcggcggccgcattgggcgttgacggcgtgaccgaagacgatgtacggtctttggccgatctcaatgcgaatacggtcaacaatgtgatcttcacccagcgcaagggcaagaaaggctatgacgagcgacaggtcgattacttcctgaacgcctgcgtgcagttgctgagtcgcttggaatcctatgcacgtgtggccgatttcgtgtccggcgagcccacggctcctgcccagaccgccacgaacgtgaccgttcaagcgaacggcgtctcgccattgttcgcttccggaacgcagcgcccggcaactgacgaacgttttgcgccgtctgccgttgctcatgacgaatcattcgatgccctgcatcaggccgagcagagcttgttcactgctccggctccggttgctcccgcggcgccggccgcggcggcaccgatcgcctatgcgccggctcctgcatcgttcgatgcttccacaagcaccaataacaccaatgcggaacagccggtttcctttgctcccgcagcatacccggtgcatacgtccaacgagtctgcggcgaagcccgtctccgagacgccttccgtggctcctaccgcagctgttgcggctgagcctcccgccagtgccccgtccgcgccggtttccggtgtgaccgctggcagcgccccctcgtttgctccggcacagtcgtcatacgaatccgcagctccgtcatcgaccccgtcggtgttcgcggaacagcccgtggatatggtgcaggacggttcctctctggccgctctcgcccacatggctgcggtttctcaggaacttccggcggtggatgcgccgtccttcgctcccaagatgcccagccttgatacaccgaatgcgctgaaattgaatgaggtaccgggttcggtttcatccccggcaccctccgccccggcagcgcaacctgtgaatagcactgccgacgaggctgcgtccgctgccatgccggtctcctttgctcccaccagcaagccggatcgtaacacgaactccattccggttcgcgtatccgatagtcagcctgcagacagcacggtctcccgtccggctgtggaatcatctgaatacgttgccgcctcccacgacacggaagcagctcagccgtcacaggataagcacgattccaacgattcgttcccgctgctgttcccgcttggcggtaacttcgattcggatatccccgacctgtcgttccccacactgaacaatgacgatacgaagaaggaaaagtgagcatagcctccaactccaccgtcatcattctcggatccaccggatccatcggcacccaaggacttgacgtcatctcgcgtcaccctgaacgatttaccgtcaccggtctggcggcgggcggagcacatatcgagctgctggcgcaacaggccgcacagttccatgtgcccgaagtcgcggtgtttgatgagaccaaggttccagcactgcaagcggctctcgcacaggccggcgcacaaggtgtccgcgtgaccggcggtccggattcggtcatcgccatggccggatccggtgcgaatgtcgtattgaacggcatcaccggctcgatcggcctcgaaccatcgatcgcggcgctcaaggccggttcccagctggcattggctaacaaggagtccgtagtcgcgggcggtcatctgctgttcagcgcgcaagtgcgcgagaaccagatcaacccggtcgattccgagcattccgccatctggcaatccctgcgctccggaacccacgccgaagtcgccaagcttgtggtcaccgcctccggcggcccattccgcggctggaaacgtgtcgacatggagaacatcactcccgagcaggcgctgcatcatccgacgtggaacatggggccggttgtcaccatcaactcctccacactgatgaacaagggcctcgaagtcatcgaggcgtcccgcttgttcaatgtgtcgcctgaacgcatcgacgtgaccgtgcacccgcagtccatcgtccattccatggtcgaatttgtggacggcgccacgatttgccaggcttcgccgccagacatgcgtctgcctatcgcgctgggcctgtccgcgccggaccgcatgaccaatgtggccgccgcgtgcgactggacgcaagccgcaacttggacctttgagccgttggacgatgaggcgttccccgccgtgcaactggcccgccactgcctggccgcctccgagaagcatacggcggtgctcaatgcagccaatgaacaggccgtgcatgcgtttcttgatcatcggctgccgtacctcggcatcgtggacacggtcaaagccgtgctggaccagatggacgccgagcttcgtggtaacccgctgttcacggacgtggaggaaatgaaccagcttgagcttgaagcccgccgacgcgccgacaacctgataaacaagcaatgatgaataccttgaatacggaaaatcccatcgaaaagccgttccgcaaaaccggtgatccggtcgacctgaccagcgaatcgcccttgcacccgcgccgcaagtcccgccgcatcatggtgggcccggtgccggtgggcgggggagcgcccatctccgtgcagtcgatgaccaacacgctcacggccaacgtacctgccacgttgcagcagatcgccgaactgaccgccgccggctgcgacatcgtgcgcgtggccgtgccgagtcaggacgatgccgacgcactgccggaaatctgccgcaaatcgccgattccggtcatcgccgatatccacttccagtccaaatacgtgttccaagccatcgacgccggctgcgcggccgtgcgtgtgaaccccggcaacatccgtaagttcgatgaagtcggcccggacatctgcaaggccgccaccgacgcgggcatctcgctgcgtatcggcgtgaacgccggctcgctggacaaggaactctacgccaaatacggtggcccgactccggaagcgctggtggcctccgccttgaaggaagcgcacatgttcgaggacgtcggcttccacgatttcaagatctccgtcaaacaccatgacgtcatcaccatggtcgaaacgtaccgactgctcgcatccaagggcgattggccgttgcacctcggcgttaccgaggccggccccgcctggcaaggcaccatcaaatcctgcctggcgttcggtgcgctcttggccgagggcattggcgacacgattcgcgtgtccctttccgcgccgccggtcgaagaggtcaaggtggggtgcaaactcctggaatacatgggattgcgcccccgcaagttcgacatcatctcctgcccgagctgcggccgcgcccaagtggatgtgatccagctcgcatccgccgtcaccgaaggcctgaaggacgtgaccgcgccgatccgtgtagccgtcatgggctgcatcgtcaacggtccgggcgaggcacgcgaagccgacctcggcgtggcctccggcaatggcaagggccagatcttcatcaagggcaaggtcatcaagaccgtgcccgaagaccagatcgtcgacacgctgctcaccatagcgaacgatatcgccgcccaaatggaggccgacggccaagtgcccgtcaattccaccggcccggtcgtggtcccaatccagcatcccggtcactgattcggccgaataggccctcggcgtaaatatcgcggtcagattacaatagcgcacgtgtcgcaagaagaagagcatcgcctgactgttcgatccaagccgtggaccagcacccaccggctgatggtcagcctgcccatcttcattatcctgatcggcgtgctggtctccatttccaacctgaccacggtgccttggaacatcgaacccaccggccagtcgatggccacgctcaccgacgataccgaagtcaccttcgataacccgtccggagaaacgctgccggcgaaagacacgtatgaggtcaccgagcgatacatcacgctgaacatgaccagcgacggcaatctgaccaaggagcctggtgatcggggcaaggccaatgcggacggcgtccaagccatcaaggtattgattcgggaacctcagaacgcatcaggcaagcgccccggcgtggtgttcatgcacggtgccggatacggcacctgtgacaactcctttggcgacgtggcctccgatatggcttcggccggctttgtgaccgcagtgctcgacaaacccgtctggagcaccaccgacatcaaccgcgattatccggcctcagccaaggcatatgatcaggtcatcgaatacctacgagcccaaagcgatgtagacgccgccaaggtcggcatctatgccacctccgaatcgacatggatctcctcatatctgctcgaggacgatccggacgtcgccttccagattcttctgagcccgatggtgttcagcccacgccaatcactgggatttttcgtcacccaggacttcactcttgtcggcgcgaacgagggctatcgatccatcgtccaacgcgtgttcagcgcggacaccggcctgttcggactgaacaattccgacctcgccacgctcaaacccgccgcttacgccgtacccacctatgtggcttacggttcaaaagacgtgatgacggcgcaggtcgacggcgtgcgtgcgattctctacaacgcccacaaagccgataactggaacgtgaccgtgcgcagctatccggtcgccaaccatgtgctgcgtttgggggatgagtccgaagcgggcaccccgtttgcggacgcctatgtggacgatctcatcgattgggccgtcggcacttccgccggactcacgcagaccagcgaaaaggtggccggcaccaatctgtaccaatcaatcggtctgccgggcgctttgaaggcaagacgcgtcggcaccatatatggtgtgatcctgcacgtcacggtggtactgctgctgctcgcatccatcgtgctggcactggcggcgctgggccgcaaaatcgcggcggatgcccgatggcggcgcgagaaacgcgaggccaaacgtgcgggcatgctgataccggaacggcctgtgatactcggtttcgcacatggtttcggcaacgcgctgctgactttgaccctcaccactcttgccacactgctcatcttctttgccggacttggacaggtgattatgggtgtggtcaaacttgcatggggcagcgctcctaccgagacgccgggcgtcatgtattggagctggccggtcatccaagtggtgtccgtgctggtgctatgggcttggtcccgcgtctttatgcatctgatagaggtcgcttccgcccgcggactgattcagataccccctcgtcgtgaatccgttcgagacatcgtcaccggtgccgacccggtactcgcctccacccgtctgggccgagtcctgttctggctggtggccttcaccatgctgtacatactgttggtgttcgccttctggggcctgtttatttactgactacttcattgagtagagtctgccgggcgtcgcggggaaaggagatgagatgtcgctgtaccgagacgaaggtgtggtgttgcgcacctccaaactgggcgaagccgatcgtatcatcaccatcctgacgcgtgggcatggcaagattcgggcggtcgccaaaggcgtgcgtcgcaccaaatcacgctttggtgccaggctcgagccgttcatgcgagtcgatgtgcttatcgctgaaggccgctcgcttgacgtggtctcccaggctgaagcggtcgccgcttacggtgctccgatcgcggcggattatgcggcgtatgaggccgccaacgtcatcgtcgagaccatcgataaactcgccagcaccgaacacgagcagctgacgaaccaatatcggctgctcatcggcgcgttgaacgcgctcgccaaacaatcccacgccccgcaagccataggcgactcctatgtgatgcgcgccttggccttggccggttggacgccacgattgggtacttgcgtggtatgcggcaaggcggagccggcgtacctgtccatcgcgtccggcggcgtgatgtgcgaagccgaccacactaccgatgcgcgccgtatcgcgccgttcgtgttaaaccagttcgatgcactgattcgtggcgattggtcggtgcttgatgccgcgcctgtggagcgggttgtgcaggagttggttgaagattggggggagtattacctcgaacgcccgattcgttcgctgcgcttgatagattcatgagtatggcttttgagaacgttgattacacgtcgttggacattcccgcagctccgttcagcgaccctgcccgtattcccgacttccccaagaacaaggtaccccgccatatcggtgtgattatggacggtaatggtcgttgggccaagcagcgcggcatggtccgcaccaatggtcatcaggccgccgaaccggtggtgttcgacactatcgccggtgccatcgaagccggtgtgcggtatttgagcctgtacacgttctccactgaaaactggaagcgttcgccccaggaagtgcgcttcctcatgggcttctcgcgtgaaatcatccaccgccgcgtggaacagatggacgagtggggtgtgcgcgtgcgttggtccggccgtcgccccaagctgtggaagtcggtgatcgacgagcttgaggccgccgaggagcgtaccaagaacaacaaggtcatcgatgtggtgttctgcatcaactatggtggccgtgctgaaatcgccgacgcctgcgccgccatcgctcgcgaagtgcgtgatggcaagatttccggcgaccgtgtgactgaaaagatgattgccgaccatctgtacaatccggacgttcccgattgcgacttggtgatccgtacttccggcgaacagcgcacctccaacttcctgccgtgggaggccgcctacgccgagctcgacttcgtgcccgaactcttcccggactgcggccgtgacgtgctatggcgctccatcgaccattacatccaccgcgatcgccgatttggcggcgtgaaataaagaacagtcctgtggactgttcgttcacgccgcctggccgaggccgataggacatgaccaggtaatgatgagtccggcgaagccggtccttgattgctgggggtgtgaaatagtccttgttaagcccctcaaaattgagggggctgagccgtaaaacaaacagcccgatgggctgtttgtaggcgaaggcgagacgagagtcgagccagaagaatgcgagcggcagcttgtccgtaattgcggtcgagctgtccgtgtagcggactgaggggagttaccggcacacctcagccatcctctctgcaaactcatccaaaaaacgtcccgaatccgcaccaagtgccacatgcacatgcggcatggaatgattcaccagcccaaccgggtctccggtggtccggcctcgtactccattgaaatcaccggtattggtctccgcgcgcaacgcaagatcaaaacaatcgaccagtgaagaatcaagtgcaaccgccgccgccaacggatcatgcaacggcatgccgccagagaacagtgcggggtcggcttccaaatttgccttgatggaaaagtccgcgagatcagccaagaaccgcccgcgcttggtccccgtcgcacgccactggtcggccgccgatcgcggtagcaaacactggtgagtcacatcaagtcccaccattgtgatgtctgcgccggaatgaaatacacgattcgcggcctcagggtcttggatgatattcgtctcggccaccgcatcccaacaattgccgggttgggtaagcgtaccgcccatcatcaccagcctgagtttcggtgcaatatccggtgcccgagtaatagccgcatccacatccgtcaacggcccggtagccagcacggtaacgtctcggccaaactcacgaacctgctcaatcagatactcaatcccatccgcagcatcaacggagcgcctccttttgccccagctggcgagagctgtcgatgtagccgactggggacggtccacaggccgagagcgacccacacgagaacaagaccccgacgccggatgagcatgagcgtcccctaccaaatacccgccaacagaaacaaccccatcgggcacatcctcagacatgtcatccccagacatatcatcaccaggcacaccagctccatcagccagagccccggcccctgccagccaagtattccccagtccatccttcccatgaaactgggcacaccctgcatcgggaataaacgcatcagcccaagaaggatgctcggagcccaaaaacaccggaatatccgcccggccaaacaaatcaagcaccgcgcaagtattggcataagccgtgttcgcatccacattgccataactggcgatcacaccgctcagctcgcactcatccgccgaccccaacaaatacgccaacgccaacgcatcatcaacaccggtatccatgctggcaataatgcggtcaggacgttgggccatggaatcgcctccttgttagcatgattcgctatgaataaccttatcggccgatacgcaaaaatgcgtcctttcctcatgggaaggacgcatttttgcgtagattcaaactcggaatatcggaaattacttgccgaggaattcgtcggtgccaaggtccttggcctgcggggcctcatgaatcaccttgtcatgactgtcagtgtaggcgtcttcttcagccaggaagtcgaagtattcctgagtgcccttgaagtcgttggtgccgagcacgaaagagccgtccttgatcttggccggatcgccccagtactggccgtcgacgataacctgcatgctcttcttgacgaattcgggcttgaggttggcgtcaggggcttcgtccacgagaatctgcgcggcgtcatccgggttggcgtacgcgtactcgtaacccttctgagtggcctgagtgaacttcttgaccaggtcgggattgttcttgatggtcttgtcattggtgatgatgccgatggcgtcggcgttgccgggcacgccgtagtcaggctcggtgaagcagttgagcttcgggccgtacatgtcggcctgcacgccttcccacgtggcgtagaagccgccgaaatcggccttgccggattccatggtctggaaggtggaggtgccgacggtcaccttgtcgaactcgcccttgccgccgtcggtctggatcatgcggcgcaccacggcgtcggactcgttggagccgaaggtggcgaaggtcttgccatccaaatccttaggggacttgatggcggtgttggacgccagtgcgcaccaaatggcgctcggcttctgctgcacctgcagcacctgcttgatgtgagcacccttcagcgtgtagatgcccacattggtcaagttggacagggcgaagtcggccacaccgttgttcacggcctgttcggcaccggcctgggccacggccacgatatccacgtcaagaccggcgtccttgaagtagcccttgttcttggccacgtacacgccgatgtggttggtatcgggcgcccaggaaagcatgaaagtgaccttcttgaggtcggaggtgttggagttggaggagtcggcggtgttggtctgaccacatgcggcgaaaccgaaagtcatagcaagggcgcccacgagggcagcggccttggatacaaggcttttcttcataatgatggttccctaattcgttgtctctctatcgttctctgggattgcttcgaacggaagtcggcagaaaacgatatggagggccttgatttccgttcgaccagcgcccccgacattccctatgaaagctcaagaaagccggtttgccacacgctggtaaagctgttccattatagagacagggctggagacctcatgagaagccgccccgttcagtcggttctggccgccggcttgtgtctttgacggtaaaaagaactactggtccgcgtcggggtcttcgtcatcgccggccgggccgagcaggatgcgctcgctggcgttcaccgccagcatcagtacgcatgtcatcaggataatgacgatggtggcggagaagatcagcggcgtgcggaacgaattgtaggcagcctgcagccagatgccgaggcccttgcgcgcgccaagatattcagcggtggatgccgtggcgaagatgtatgcggcagatacgcggataccgccatagatctgacgtgcggcaacgcgcagcttcacgtgccagagcgtccagaccggggtcgcgccgcaggtcaatgcgacgtcggaatagaactggggcaccgcttctagtccgcgcacggtctgcacggcgatggggaagaggccgaataccgccacgattacgattttgccggaaatctcaaagccgaaccaaatcaggaacaacggggcgatggaaatcagcggcatggtttgtgcggcggcaagcagcggatagaacgccgcgttgaacgtgtgcgagcagtacagtgcgatgccgatcataatgccgaagaacacggcgaacaggaagccgaccacgccctcatagccggtgatcgccgcggccgggccgagcgtgttccacgtttcgatggtggcggcgaaaatctcgcttggcgcggagatcatcgtgggggagacatgtcctagatccacccacgtttcccagactgccagcaatacgatgacggcgatgacggtgggcatgcggcgcttgaggcgcttggcgatggacatgggatgtcaccttgctttccgcgccagtccggtttgctggtggcgcttgcggccggggcgtggaacagtaaggtgaggagcctgcgcgcctgccggtcgtgtgatggattgtgttatatgccgtccatcagtataggcgaaggcgaacgacaggggcacacaaaaaacctccctctgtgagggaggtgagagagctactccagtccgatggacttcatgtggtggagcttcagggaatccaccttgagactaccggactcggcggcgagcttgatggcgcgcgggccttcggaggcgtaggagtaggagctcagcacctggtggccaccgttgacgtagacctccacggagccgcgatccacgaacacgcgcaggtccagcttgccggaggccagttcggcgtcggtcagtggggcggcgcggtagccgtgatcgccgttggccatggcctggcgatccaccaccacgcggccgatctggtcgtcataagccacgtaggtgtaggcaccgtcttcggtggcgtgaatcttcaggccggcacgatcggcagtggaggcagccaagtcgatggtcatttcgatttccacggcctcggcgtcatcggcgatgacctgctcgccatccatatcgagcgtgatcgaaccatggtcgagagtatcctcgcgcaggccttccatttcggcgaccggcgcggtgaccacgtcgccgtcatcgccaagggtgatctcgcgcggcagggtgagctgaccacaccagccgtcatcctccatgggaatcggctgcacgaacgggctcatccagccatagacgatctgacggccgtccacattgaaggactgcggggcgtagtagttgtggccgcaatcccacaggcggaactcggtttccggcttgaattcgccgcccggctcccacgtgccgatcatgtagccggcgttgttgacgttgcggttcatgaagccgctgggcttggaccccatggcggagaagccaatgacccacttctcgttgccgtccttgtctttgatggggaagaagtcggggcattcgagcatgaacacatccggatccgggtgctggaagagcacgcgctcgtattcccagcggaccatgtccttggaggagaacagccacatctggccgcgcttgtcctcagaggagacaccgaaggtcatgtaccaggtgtcgccggtcttccagaccttcgggtcgcggtagtggtgatccaccttgtcggtcgggcagtcgatgatcatgccgcgcttggtggcggaggtgagctcgtcattgtccggcagcgcgagcatctgcacctgccagtcgccgccggtgttgtcgtggccgttggcccaacggtggccggtgtagtagaacttgagcttgccatcgtcgccgattactgcggaaccggagaatacgccgtccttctcctcttcaagggtcggggcgaacatgattggctcacgcttccagttgagcatgtcggtggaggagacgtgtccccagtgcatcggaccccactgggtgccgtacgggtgcagctggtagaacacgtgccagcggcccttatagaagcacaggccgttcggatc

SEQ ID NO: 67 - DNA, 17596 bp, Unknown
  R206_24m  MAG No. k141_2667
attggctggggtgcctggactcgaaccaagaatggctgaaccagaatcagctgtgttgccaattacaccacaccccaatttggcttggcgtagcaactccgaagagttgttcgtcgtacccccaaccggatttgaaccggtgttggcgccgtgagagggcgtagtcctagaccgctagacgatgggggcatattcagttttttcaaccggctgcgaggcgaaccgcgcaacaggtagatatattacgcgctaccctgctctcacgcaaatcccggcgtgtcgcgccattttccgccgttctgcgggaacaccccatgcaacgcgaaagcgggcatccgtatgtacggatgcccgccatgcgtcacgctcccatcatccgccggcgtgcggtggacgacgcatcacaggtgctcgcgcaagcccttcaggcgagcgagggaaaccggcttgccaacgatctccatggactcgaacagcggcggggagacgcggcggccggacatggccacacggaccgggccgaaggcgaggcgcggcttgtagccggcgtcctcgacgagggccttgttcagggtctcgtgcaggttgtcggtcttccaatcggcctcatccacgccttcgagagcggcgatggcggcatccagcacctcgccggcggaatccttgagctgcttcttggcgtcgtccgcgggctccagatactcctcggtggacagcagggagccgaccatgccggcgacctcgcccagcaggcgcacgcgcggctggaccagcggggcggcggcggtcagcacctcacgctcacggtcggtcagggcatcccagttgtcggcggaaaccacaccatcgcggtgcaggtacggcaccgagcggcgcaggaagtcctcgggctcgagcatacggatgtgctcggcgttgatggagatggccttgtcgatgtcgaagcgggccgggttggccttgacgtcgcgcacgtcgaacttctcgatcatctcgtccatggagaacacgtcgcggtccggtgcaatggaccagccgagcagggccaggtagttgagcaggccctcgcggatgaagccgttgtcgcggtggttgaacaggttggactccgggtcgcgcttggagagcttcttgttgccctggcccatcacgtacggcatgtggccgaacagcggcatctccttggcgatgccgagttccataaggtaacggtaaagcacgatctggcgcggggtggagctcaggaggtcctcgccacgcagcacgacattgacttccatcatcgcgtcgtcgaccgggttggtcagcgtgtacagcgggtcgccgttcgggcgcacgatcacgtagtccggcacggagccggccttgaactcgatggcgccacgaatcagatcgtcgaaggcgatgtcttcatcaggcatgcgcaaacgcagtgcgggcttgcggccctcggcgcggaaggcggccttctgttcatcggtcaggttgcggtcgtagccatcgtagccgaactcggccggacggccggcggcaaggttgcgctccttgatttcctcgggagtggagaaggactcgtaggcgtagccggcttcgagcagcttggcggcaacatccttgtagatggcggtacgctcggactggcggtacgggccgtgagggccacccacatcgatgccctcatcccagtcgatacccagccaacgcagggattcgaggatctggttgtagctttcttcggagtcgcgcacggcgtcggtgtcttcgatacggaagatcagcgtgccgccggtggcgcgagcttccgcccagttgaacagggcggtacgaatcatgccgacgtgcggggtgccggtcggcgacgggcagaagcggacgcggacgttcgcggggagttcgggtttggtgtttgcagcatcagtcataatcccctattgtgccgcgcgcgccggacgcggagagcagcgctcctcgctcttttgcttcgttattgacatttcgggccaacaccatcccaaaacggccattttccaacgaaatctcttttgcctgtctttggtagtgcccgatatcttgatgcctgtcttcacacctgttttgacacctactttgacgccatccacacgcccgcacgcaaggcttcgacaccatttggcgcaactgttgagttttttacccaaacgatggaagaataggagtcgacgcaatcgtcttatgaaaggggaatcaatgaccgatcccaacaacgtgccgttgccgcagatgcccgcgcccaacggtaccccggcccagcagaatcccagcacgccgcaatacggcgcacctgctccggcccccgcacagccagattatgggcaattcaacgctccagcccccgcacagccggcctacggccagcccgcatacgggcagcccgctcccgattcttccgcacccggcgcagcgcccggtgcaactcccgcctatggtcagcccgccgccgacccgtacgcggcgaatgcggctccgcaattccccgctcccggcgcggctcctacctacggccagcccggaccggacgccaacgcttacggtcaggtgccacccgcatacaaccagtacgccgctcccactgccacagcagccgtgccgttgaacaagccgtattacgactgccccttccctgaggcattcctccgtttctggaagaagtatgtggtcttcaagggacgtgcctcccgcagcgagttctggtggtggacgttggcctctgtcggcatcagcgtcctgctgagcctcctcagcagtgccacggacgacaagctcgggttcctttccagcatttggagtctggccatcctgattcccagtctggcgctcgccgttcgccgtctgcatgacacggacaagcccggctggtgggtcgccatcttctatggcgcgatggccctcggcatgatcatcatggttgccggcggtggcgcagcactgtatggcgccttcggcagccttagcaactccagctatggagccatggcaaccggcggcctcggtgccatggccattggcggactgattacgctcgctggttcaatcgtctacatcgtgttcatggctatgcccagcaagccggaaggcgcacgtttcgacgatgacgcagtagctgccccgatgcctcagggtgcttacggcgcaccgtacggcgctcccgcaaccccggacttcaaccaggccgctccgaacttcgccgctccgaacgcacccgctcctgacttcaaccagccagccccggcctatggtcagccgaccgcaccggctcctgactacggccagcccgctgtgcctacgcccgattacggtcaggtaccggttccgcagtacggccagccggagaccccggccccgcagtacggccagcccgacgctcaggccccacagtacggccaggttccgccgattcccgaaaacgttgatgatgggtccaccgtgctgtctccgcacacggctcccaccgatgacaacgcacagaaaccctggcaaggccagtgactgacgccggcgaagttcgcttaagaagttcgcctcatcactcatgaagcccaacaatgaggccccactcatcaagcggcggtagtattccccgccgttcagtaagccaatgccctgtgtactggatcattccagcacacagggcattgtgcgttattgcggcccctttcttcgcgcaacattccccggaatgcgttacggtggaggatggacgctgcgccgagctactcctacaagctgcctacggagagcgtttgggagatcacatgggattctcccgggcccagcgtcacgatgcggtcgcggcataccgccgcttcaaccgccacgaaaccgcgccattcgcccggcttggtgtagctcatattgtcgccgtccgctcccggattccacaccacggtttgcggcgacccggtacggctgatatgaatcgcacgccccaacatgtcatcgcgcagttccagacgcgcatccgagtaatacacacgattcaccggctgctcgccaaacgtcaccacttgcgcgtcctgtgttttcggcggaaacccttcttcagtggcatccagatacgtcgctccctgcaatccgaccagctgagcaccggacacatcgccgacatgcagataggaatgcaacgcggcctcgtacgacataggcgccgtgccggtgttggtcacggtcaggctcatggtcagcgcattgcccgtttgcacgtcatacacggcatgaaactgagcacccggctcgtcatcgaaccaaggcacttcattgtcgttcagctgctgcgaatccaacacataccgtatgtggctgtcgtcgaatgaaccctcgtccaacgcccaccgacgcagacgtgcaaaaccgtgggatggattgagtgccagctgcttgccatgcgcaaaacccgggccgaaccacgggaagcagatcggcactcccccgccgagcgacttaccggcctcgatatgccacgtactcggcgtccacaccacattcgcctgcccggccggggcccagcgcaacagatgcgctccgtaatcgctgattaccacgctgccgccattgttggcgagcatacgcaaatcgacaccattgcccataagtttcccattcccattgcgcgaacgatacttttcactaaataggatacttccttaacaaaaaagaatcgcaaagtatggccgcaggatgcacaaaggccgtgccaccccattcgccgacgaccgccacgcgccaatcgtgcgcaagatcatcggatgcgactggcaatagatgctggtcacgcgggccagtgcccggctcaagcacgacttccccctcgcgcaccagttcgccgtgctcccaatggtgcacataaacgcgatccgcacccaaatcgctggtcagcacgcggccgtccggcactggctacacccagtgggcgacggcgcgtccgacagcagccgttcgcggcgtagcaccttggcgtcgccactgttatcgccgccggcatccaataccaattgttcgatgccggggcaagccacatgatgcagtttgccgaatccaccaaccagaatatccatgaggatgttccgttttactacgaactacgaaactcttttcgccacacaatacgccgtcgccggcggggcaaaatatgccaaaattagccaattgcagaaaaagggcgatccccgtataggaatcgccctttgcgcaaacactcaggcggagggaagtgcctcaggccgtcaaaccggcgaagagcgccgaccagtcctgagactcatcctcaaggtcgaatcgttcggtgttcatcagtgcctccttcaccggtccgggagccctccccgcaagtttgtgtattgagtaatcggtgagatcactcgtcgtggcccccaatgcccatccggaatgcggcaaatacacgtggaattggattgaacagacgaagacgccgacagtgatcatcgaacgtgatctgccgctgctgggttcccgctacgtcgattcagtgcgcaccaaccatccctatggcgtgcgtaaggcggcggtgcgcttcctgcaacacggtcacacccgtgtgggcgcggcgttcaccgatacaccgacttcggagctgattcaggatggctggaagcaaatcgtgacggaaagcgacgccatcgaatgcccgttcaccatcaccggcattcagccgtacaacaccagggacgtcaaccaaatcgtggacaccattctggattcgggcgtgacggccatgctggtgcactccgattatctggcgatcgccatcgcgcagaccctggagcgccgcggcaagcgcgtaccggacgatatctcgatgatctccgtcaacggctttgccacgcccagctcccgcccgctgaccgtactgcgctcgtccgataaggatctggccgaggcggccatcaacctgctgatcaaccgcatccaaaacccggattctacaacccgccacatctacgtggacccgacgctgaccgatcgcggctcggtaatcgataagcagtaaccccacctccctctgacgagggaggtggcatcgcaaagcgatgacggagggagaggcaccaggcctctaaccgttacgagcgaagcatcggccagagcaacgcccttactctttacaactccacggtctctttgccgggatcatccttgacatgcgcgaacttggcggccagagcctccttattgcgcttttcgtcttcttccttggcctgacgcttagcctcgtccgggttccagagcacatcctcacggtgcttgttccattcggcaacggccagaggagcgatgtattcggcggtggcggtcagggtgtctgcgtcggcggctttggcacgggcattaagcaacccgaggatctgctcgtcggtcaggcagatgcgcggcaccgagcactgctcgcgcagttcgttgacgtagagcagaatcggcagaatcttggcggcagcattggcgacactgtccgctgaaccatcggccacagcatcaccggacacctcacccaataacgcatcgcacacggcgagcgcggtggcgaaccgaacagccacatcggcgggcttggcagacgtggccagacgaccatcggcttcagcgtcggcctcgacctgggcttccatggccgcgaccgcctccctcaccgattccgccgtcgcggaatcccagtcgattcccaacacgtcggccgcctcaacgatcagcctggcatcaccggactcggcgtagtcggccatcgtgtcgtaggcgtcattggcggcgagcagggcgtccacgatgctctgcgggcgaccgggaatctcatcggcaccttcgtagacgaactcggcgtccggcacggtgacgtcctcgccggtcaggatgcgggcgaatgcacgggtgacgcgcacctgcaggttctccgcgtactttgcgtcattgtccatctgcatggcttcggtcagcggccacaggccgatcagcgccgagccggcttcggcggcctcagttaccgccggcaatgccgcgacctgtgcgattgcctcacgattgagttcaatggtcatctatgctcctttgcgtccaccactcgattgcagtgcgtcttggctcccctctctgaggggagccaatgtcctaacaccagtgtgccgttacttgacgttggctgctgggtcgacatacgtgattgacatcacacggccggtttcgttgtcgtacgtcaccgaggtcacggaggcgagcgccgtgtgccgcaggaacatccagtgctcggggtggccggtctccagataatggcgataactgaaaatcggcgattcgtggctgaccaccacaatctgctcgccggggtgctgggccaccttctcgcgggcgaagtcgtccatacgcgccgcgatgtgctgataggactcaccccagctcggcttgtacaggttggtgacgagcttccagttgccgttcttccacagcgcgccctcgccatggccgatgcgcttgccacggaactcgttgccggcctcaatcacccgttcatcagtggtgagcgtgagcgaagcctcgccacgagcctcgcgcacggggttcagcgcatcgagaatcgcgccggcggtctcgcgcgtacggtcgagcggcgaggagtagacggctgcaatcgtattggtttggggattcttggccaagtacgtggcggtggcttgagccatgcgacggccaaggtcggaaagatggaagtcgggcagtcgctcatagagcagatggtcggggttatataccttgccatgccggacgaaatggatggtggtagcgctcatgagccgcctttctgcttcccgccctgaagggcatgagaacgttgtcttaatatctccaatctaccgcgtgtcgcggagtggacacccgtagagtatccgtgacgcaaatatgcggatgggaaaatccgacgcaaactttgcgcgaccatggacaacacatcattcgatgagggcttcgccggcaacgccacgccagcgggggacatccaatcgggagcggaaaggagcgtagtgctgttatgtccaataactcgtccaactcgaactcgagcaccattctggccggcatcaaggaagtaggccacaaagtctttggtgggtatgcggaactactgcgcattccgcataccgcccgttattccatcggctcggtcatcgcctgcatgccattcccgatggtcggcatgaccatcaccatttccgtacagcattattacggcaactattcgctggccggcatgctcaccgccattcaggcgattgcgctggccgtggccacgccgctgctgggcaagctgaccgacaagttcggccagaggcaggtctcgattccgacgattatcgtttggattgtggccgccatcgcgctggtgacggcgattaccaaccgcgcgccggaatgggtgctgtactgtctgacgccgttcctggccgccattccgccgtggggcgcgatgagccgcgcgcgctggaccaagattcttaagggtgaccgggagcgcacgaaccgcgcgctgtcgctgtgcggcgtgctcgacgaatgcatgtgggtgatcggtaatccgctggcctccacgctggccgtgatctccggtttgctggcgttctcgttcaccggcatgtgcgtggtggtcggtgcgctgatgttcctgaccgagctgaccactgagccaccgtcgcagaccgcgctggcgcgtgccgagggcatctcccgcaaggaataccgtgagcgcgaggccgccaaggctgaggcgctgaaggtggaaaccgccgccgaggagacccgccgccgtcttgagcgtgaaggcgtgaccgatgaggccacgattaacgcagccattaagcaggcggtcgccgatgcgcgttcgggcaagaaggcgtccatttggggtccgggtctgattgcggtgtgcgtcacctggttcggtttgggcgcgttccagtcggctacgggcatctccatcatcgcgtttgccaccgaagcgaatatgaagcagtacacgggctttgtgtttgcctgcttctccttcagctcgctgatgggcgcattggtgtatggcgcgaaaaactggtcgattgccctgtggaagcgcttctacttctgcctggccgtggtgaacatcggcatcagtacgttcctgttcgccaagcatctgtgggtgatcatgatcatctacttgattattggcgtatgccaggccccgacgtggatcaacggcaaccagctcatgttgcatctggtgccgccctctcgcttgaccgagggcatggcgtggatgggtgcgatgaattctatcggctcctccgccggttcggcgattgccggccagttcatcgaccgcatgggctcgcacggaggcttcatggtggtgaccaccttggcactggcctcgctggtgattgcactgatcggcttcaagcagatcaagggctccaccgagcagccgaccctgactgaagtgagtgtgtgagacgtatgctaagccccctctgacgagggggcttagcatacgtcaaaacgctacttcggccagcctttgggcgtgtgctccaaggaccagatgccgagcttgtgggagaagctgttctgccacttggcttcaagctcctcggcattcagtcgattttcagcggacttcagacggttcatcgcattggtgtgcgtatcgtcgagcagccacttgcgaatcaagaagttccagatcattaccacggcagtggccaccaacttgccgatattggtgcgcaacagatattcggcatgctgcgatacataggcatcatggttcataccataggtggaaatccagataatcgcgtcattcatgaacagaccgactacagcgcccgccacgaagataaggatctccatccagcgtgccatgtcatcacgatgcttgaatacgaatttcatgctcgccagatagttgaaaatcagcgagatgatgaaagagatggtggcagccagcacgttgtgcatgtggaatatgccaaccaataggttgaggataccccagtcgataacaaaggcgataacgcccacaatgccgaacttcatcagctgttcaatcagttttctcacaagagtattcaacactattgggctgactgcggaacgtgtattggctggaaaggccaataatatccccaattggccttgccccggtccgttctgcaagcagcttcctacgtccgcatgccatgttcaacagcagccgctgaggctagactggaagtgaaccgaatcaaggaggaattatgcccgttattcacactcatgtgtccgtgtccaccacccccgagcagcgtgaggcactgaaggccgcctacggcaaggcgattaccgctgtgccgggcaagtccgaaggctggctgatgtgcccgttcgaggacaatatgccaatctacttcggtggtagcgatgaccagcccgccgcctatgtggaggtcaacgtattcggccgctctgtgccgggctctgcttgggaaaagctgaccgaaagcattatggccgcgctgaactccacactcggcattcccgaggaccgcacctacatccgctacaccgccaccaccgattggggctggaatggcggcaacttctagttgccaccattcccctcgcagcatagctgttcgcatcgcctacggaaagcccagtgggctttccgtttaatggctcagggtggcaactagtttgcgtattctggctcccctcagtcagcttagctgacagctccccctcaaagagggaagctcagatgtagaaagcccgccggtggcgggctttctacgtttcaaggggctgatttccaacattcagaagctctactagcgtttcaaggggcttttaaaacaagaaacccggagtataaacattgcaatttcaatggtcatactccgggtttcgcaatcgaagagcccctcgaaacgcagatagacctccggaaaaccggaaatccgcccctcgaaagcgagttacctcacctcatgcctgtcatcacacaatcttgggcatgggggtggtgaggctggtggtcaggttgacgtggaccagaccggcaccggcatgcacctcgaccttcttcagggtcacggtgcgctcttcttcgggggcgcggtcgttgtcggtcatggtcgccggggacttgaccgccacgaacgccagatcatccagcgagatgcctgcgctctggcacagttccatggcctcggacacggactcggtgaagcccggcttgtagatcacgcgctcggccggtacgccgtaggcgttctcggccacccacttggcgttctcggtcagggccatgcccttgtgcgaatgcggttcggccggcatggagccgttctgcagcgcgtcgacgaaaccgtcaagctgcggggccagcgcctcgccgccgtcgcggaacaggttgccgatgatcggcgtgcggaagcccagctcgtcggcggtggccttcagggacggaacctgatcgtcctcgccttcccacaggttgatgagcgggaaggtcggaatgtccaggttctccaggcgctgcacgtggaacgggtagcgccaggccagctcgggatcgtcgcgccaggtggaggcgcgggtcaccacgatggcggcggacggccactgcgcgccatactcgcgacaggcgatgtccagccacttctgggcaccggcgtcggtgccgtaaccggcttcgaccacaaccacgtcatgcagagcgcaggccatttccacggaaaccagcgtcggaatgccgatggacacgttggcgaacgggccaccgtgcacgtagaccggggagccgttcacggtctcggtcttggccggcttgaccgcgtcggccagaatgccggtgatgcgccacaggtccacgaactcgccgaaggtcacggccttgccgtccttggtgccggcgatcatcttggatacacgctcggaaatctcgtccatcgagcgggagagcaccatgatctgcatgagctcgcaggtcggcgtgagcacgaccttctccggcacgttgcccttgccgtagtccacggcggtggagcgcagggagcggctcggcacctcggagacacgcggcacgagaatcgtgtcaagcttgccttcatcgatggccttctcggcgaaggagacgagcaggttctgggccgcctcgatggcgcccatttcgccgcacagaccccagtcgatgagctcggggtgggtcagggatgccttgccgccgccggaggcaccgcccttggaaccggctgcggtgatgcccatgctcggctgacgcagcacggcggccgcatcaatgccacgcttgttcagggcgtcgatcaaggcgatggtcgtggtggtcttgccttcgccgcgcgatgccttgagcggcgtatcggcggtgacgagcaccaccttgccgtgcttgcacggggcgtccgggttctcagccaggtacttcatgtaaccgaatgcgtcgatcttctggaccaggccgtactggctggtgaagtcttcgatggtggtcatttaatgcctttctgtgttgatgatggcggagcggggtggtggggcggccgccgcctcttcgcctagaaacagcccactgggctgtttcttaacagcttagcctctcagtccgcttcgcggtcagttcccctcagggaggggagctcaatacggactaaaagtcggacatgtggaagccgttcttcatttccatgctgcgagtgtacagcacggagtcaagcagcttgtcggtttcctccttgagctggtcggccatggtctggttggcggcggcgagaatctcgcgcacctcggggttacgcagcgcggcgatggtctcgtccggggtcatcggctgcacatcgccatccacgttgtcggcctcgaattcctcttcagcggcagactgcgcggcttcctcggcggccgtcaagcccagacgggcgatctgctcgtcggtggcggcgaccaagcggtgacccatcgcaccggtcttctcctggtagcgctcgacggcgttggacgtggagcggaaggcgccatcgcacagggcggcgatgatgcggttggcccagtagaagttctcggacgtcacgcgggtggtggtgtcctcaaggtaagcgggcgtggtgtccacgttcgggaagaacggcaccagcgtgttgaacgggttggagccgtatgccatccactggatggcgcgggaggcctgcgggcggtacgggcggatctgcatcaccgcaagctggctctggcggttgatgccgatcgtgcggtacatgtggcgggtgcgctcatcgcccagctggccgtatggatcgaacggggtgccctggtagtgggagctcaacacgtacttgatgtcctcgatggtcaccttgcgctcgggctggcgggcccacgggatgtcgtcggaggtgggcttgtggtcggcgtccgggccgtcccacacctcgtcgtacgggttgaggaagcgctgcatgtaccaggcgcgcggggtgttgtacacgtggtcggagtcggagtgggagccgaaggcgtcgcgcgggttgaacggggtggtgttctccaccgcgaggtccaggtggttggtttcgatgaattcggcgagatcttcggagcacatgtgcgcttcttggtcgcccagagcgtcctcaaggtcgaattcgtcgataccgagctggttcggcatggtcacgtaggcctcgtccggcacgcgcttggcaatccagtgatggccgcccacagtttccagccaccagatttcgttggagtcggagaaggcgacgccgttcatctcataggtgccgaattcctcaagcagcgcgccgaggcgctggacgccctggcgtgcggtcttgacatacggcagcacgatggtcaggaagtcctcttcgccgatgccgccgggcacctcgggctcatcgcccttggccggcgtgtattccacgaacgggtcggcgccgagcacgcgctcgttggtggtcagggtctcggtggcgctcatcgccacgttcgcctcgttgacgccggcctcgccccagatgccttccttgaggtccgcgttcggcacggcggtgtactgcagcgggtcgtccggcagagtgatggtcaggtgggagatcactgatttgtattcgcgcggctgttcctccggtttcacgacgatgaagcgcttcgggttgaactcgccgttcgcggaatcctcgttgcgggcaatgatggtcgaaccgtcatagctcgcgtctttgcctaccagaatcgtggtgcaggccatagtgtgatggtgtcctttctcttattcaagctccccttgtcaggctgagccgttcagcaaacagcccggtgggctgtttgtaggcgagggtgggagataagtcccaccacagatgttgcgggcggtagcccgtccgtaattgcaggacgagctgtctcgcaaagcgagactgaggggtagtcactctagctgtctctcccccagtccgcctacggcggccagctccctcatcagagggagctcacatacgccaactaaaaatcacgccttaccggtcaggaagatgccgtcggtgtcgggcgcttcgccgctgttgcgcagcgcgtgcaacagctcgttgagccagaagccctgattcaagccgggcaacggcttcttggtggcccacacctgcaggtagtactcgtggtccttgtccggcggctgcggaccgttgtaccgcatgatcaccgctgggtcagtgctgcggcccaagaacttggaggccgaagaattgcggccttgcacggtctcgggaatcatggccggcagctgacgggagaagtccggcgggatggccaacgcatgcgaatcattgaagtcgtacatcagcgcgtcaatcggcagattggccacggaccagtgaatccactcgaagccgcagaccggaatcgaatccgggtccacgaactcccagtgcaggtaacgggcctcggggttcacatcaccgatgtagaacgggaaggagacgaccggcacgccgccgttgaagtactcaggcgcggcggccttggcaaaatcgtccggaatgacggtgaaatcggcggaaatcttcatatgtcccagtatcgctcatatgtgtgacgtactgggggctgtgcgttacgggggtctctcccccagtctcgccgcgctcgacagccccctcgtcagagggggctggttgcgtcgggttatggaattagggcgcagaagagggattcgaataccagtagcgggttgccgttgccggctagacgcttgcgggcgtgggccacttcgtccagacgggtcacggcaccggcccggttcaaccgcaccgacaattcggtgatcggcgagcggttctccaggttgatgaggcccaccgaatcctccgcattgttctgcagcaccgccacatcccggtagatggaggcgatggagttcagcgcacgatccaatacgtcgcgcgtacggcgggtgaccaaacgcttcacatcgtctttcttggcgatctggttgaacgcgccacgcagtttcggcgggatgcggtcgttcggtgccagtccgttgatgcggcggaattccgcttcctggccggcggtgatgcggcttgcgtccgcctcggcctgggccttggcattgtcgataaggctgccggccagcagcaccgcgtccgaggcgcgagcgaggttcagtacgcccaccaccaattcgtcgcgatccgtcatcacctgctcgtcagtggcatacaacttggcgatgccgatgtgtccctcggccagacgggccgcacgctgcgccacttttggctcgacattggtggtggaggtcaggaatccggccaccgcctgggtggagggcacggcgaggttcacgatgcgcgtgcgcgagcggatggtgggcagtacatcctgggcactcggcgcacacagcagccagatgcagtgttcagccggctcctcgatctccttcagcagcacgttggtggtgcgctccagcatgcggtccacatcctcgatgatgatgatgcgccatggtgccgtggcaggcatttgctcggaggcggtgatgatctcgcgcacctggtcgatgccgatggtcactttgttggtggccagcactgtgacatccgggtgggtgccagcgagcacctgttgggtgacgcgcgtgggctcatcgttcatgccgtggtcggggctttccagcgccgccgcgaatgctcgggccatattggaacggccggagccgggaggcccgcaaatcagccacgactgggtgatctgacccgggtcgccctgcgcgatgcgactgagcatgtcgattaccggctgctggccgactagtgaatcccatacgctcatcggacaccgcccatcgtcacggctcctgtagaagccccggatcgcgccatcaccgtatccacatctgcaacattgtcccgcagcagtgtctgaatgtccgcttcgatggcggaccacacctgttcgatggactggctggcatcgatcacgtggaaacgattcggctcggccacggccaagtcgaggaacgcctgacgggtgcgggactggaagtcgctgccggccgactccatgcgatcttcggcatgctcaagacgattgtgggaaagcgccggatccatatccagcagatatgtgcggtcgggcagcaggttgttggtggcccacatgcttaaggctcgaatctcttctggcgtaagttcgcggccaccggcctgataagccaaggaagagtctagatagcggtcggtgatcaccacttcaccgcgctccaatgccgggcggatggtttcggcaacgtgctgggctcggtctgcagcgaatagcagcgcctcggcgcgcggtgcgatgtcgacggcgcccccatccacaccgtgcaacagcagttggcgaatggccttgcctagcgcagtgcctcccggctcacgggtaacgaccacggtacgcccctgagcctcaagatacgcacgcagccgctcgacttgcgtggtcttgcccacgccatcgacaccttcaaacgaaacaaacagaccgctcatgctattgaccttagcgttaggcgcagagttgtgcccaacaggcagttaaaccagctctacctccgtttcaaggggctgatttggtcttttctgaaggtctacttccgtttcgaggggctgttacccaagtagacaacgttccaaaacggcggaatgacgttggcgcggagccgttcatactcgtggttcagcagatgaccagccccttgaagcggaagtagatattctcaaaacgagaaatcagccccttgaaacgcaagtagagcaataattccgctcagccacgcttgggaattacggcggggcgctcgtagccctcgttggcggtcagccagtcgacatccttcttgacggtggcggcggtggagctgagcttttcggcgatgcgctggttggaccagcccttgttcgccagcttcttcacctcggcacggcgtccggcgcgcttggcctcggcggcattggtcgcagccgaagcagcgcccttcttg

SEQ ID NO: 68 - DNA, 5828 bp, Unknown
  R206_24m  MAG No. k141_3088
cttggcgcggctcgttgggtgagcgcatctggaagtcgtatggcgcgtaatggcagaatatcaggcttggcactgcccagtccgatacctcttcggacgaggagaggatgccgtgcgagagcagatattcgaagcattcggcgcggcggtcaaagcattcgcggcgagtcatgcggtgttcggggttcgagcattcgtcgccttcgttgcaggtgaagacatccaagtatgcacagtcgagcttgatgccgtgtgcggcgatttcggcgaaattgcggcgcacgtagtccggtgcgagctcggcgcacaggtaggtctggtggccgcccgcccagcgtgcgtgttcgggcatcgtaccgtctgccagccgaatcgcattgttggcatcaaaggtttgcgcggtgaagtagtaatcgcggtactggtcatgcgtgccgaaaatatcgccttgctcatggcaggcgtcgaccagcgacttcatgccttcccagccgcctgcctcctgacaagccggcagatagtcggggtgtgcgttgtcgtatccgggctgtgcccaaccatccaagtgcatgtacagtcggcctgcacccatgctgtgcaatgttcgcatttgcttttcgcgctgtgcgaaggtgaccaatgaatcgtttttctcggggtggtccttatcgtagtagtacgagtcgggctgtactttggttttgatgccgatgtgcacccatgaacgaccaatcaggtcacgcacggagggattgcgcgccgccttttcggcgagcgtacgcaggcgacctcgttcgttgacgtacgaacgataggccttgcacaccgccgtgtgatcggcgtggtcgaggaactggtagcgtaccacgcggcgataattcattgtgccgaggcttggctcaaaccaagtattgatatgggtgtacgggccatcgctgggatggtcgatgccgtaaccggcattccatggagtttcgcagatggcgatatacccgtgtccgtctgcgcggagctgcgcgaaccacggcatgtaaccgccagccgtttcgaagcgaccgtcgaaggcgatatctttggtgctcacggcggtaggccatgtgttggggatcatcacaccttgctcatgggtgatgagtgtcgtgtcatggtcgtcggcgcaatcgaagtccatggctgcgggccacgtcacattggtgatgttcaggccttgctcattgagcggaatccattcgaagagcacatcgcctgaggcacgctccacccatacataggtttcaaaggagtatgcgctgtgcccaaagccggtgaagatgctgcgaatgccggttcccgtgccggtttcacgctgctcatgggtgatggaagtggcatccgcgaacgcgaaggtgccttgcgcgcattgcagggtcggcttgaaatcagcgcaggtattccattcggcaccgtcgcgcgtaaaagcgaactgcattgttcgttcatcgaatcgcacggtagtgccggatacggtgaattccatagttaatgtgctcctgtatgttctcgattgctcccgcttacgggagctcgctcatataacaagataggggtggtctgctgtttgagaccaccccccagtcggctttgccgacagcccccgccagcggggggctagcgctgtctgtttattacttactgcttactgcttcttggtcagtgcggtgaacactgggccgccgccgtagtcgaatgcgacgccggagactgcggaggtgctggctgcggtggcattctggttccacaacgggatagccggaaggtcctgcagcagaatctcctcaccttgctgataatacttgtcggcttcctcggtggacggggcggaaagagccttgtccatcatggcatcgaactcggggttcttgtagttgccgctgttgccgcccttgccgtcggccgaactggaatcgtacagctgtaccagatagttgtccgcggatggataatcagggccccaaccgctacggtatgcggaggtcatcttgcctgaatccacattggacaggaattcgtcggaagtggacatcgggatgctcttggcatcgatatccagcgtgttcttgatgtagttgcagattgcctcaacccagttcttcgcagtgccatcagcattgtatgcaatgccgaactcaccgctccacggggagatggcgttggccttggcccacagttccttggctttggacgggttgtacttcagcacttcattgcccttgagttccttggagtaggcgctaatcggggctgcaaggaagtcgacggcgggcgtggcggtgccgtggaagatcttctcggcgatggttttgcggtcgatggacatggaaatggcctgacgacgcaggttgccttcctcgttctggccgaagtgttccagccattcaggaatggtgaaggtgagcgtattgccaccgggctcgttgtatgccttcagcgacttgtcggattggaaggaggtaagtgcggtgtcaggaatcgtgttcgtgaagtccaggttgccaccgcgtaggtcggcgtatgccgaatcaggcgaggtgtagatcctgaagttcaggccatcgttcttggcgacacgattgcccttgtagtcaggattcttcaccatttcgatgctgtggttgtgctgccaggacacgaacttgtatgggccgttgctcactgggtgctgaccgaacttcttcgggtccttgaacgcggattcgggcaacggcatgtaggcgtggctgccggccttgaccgggaatgccgagtcgggctggctgagcttgacatcgatggtgttgtcgtcaacgacggtcagaccgctcagcgtggccttggggtccacgtccggcttttgcagatcatcatagccttcgattgtgctgaagaagctggcgctggcctgcttgttggcactgttggcggtgtaattccatgcgtttacgaaggagtgcgcggtcaccggagtgccgtcggtgaacttccatccgctcttgagcttgatgacgtaatgcgtggcgttgtcgctggaggtgatgctgtctgctacctcgttgtggatgccgcccttcgcatcgtaggtcaccagacctgcgaacagctggtctacaaccttgccgccaccggcctcagtggtgttgccggggaatagtgggtgtgccggctcactgccgtacacggaaatgatattggaatctgaagcattgctggaattggaggtaccggtcgatccgcagccgctgagcagcatgacgattgccgcaccggccgcgaccagtgaagtgacatgacgtgtgttcatgaatctctcccaaatattctggcgtcgtctttttggcgacgaaagacaccataggagcttcatgttaaccatgtatgcaatattctcgaaatataaacattactgaagactcaaggcagtaattaatcccagaaacgcaaaaatcccctcatgaagaagggattttcatgtttctgtttggaacagtattcagcgaggcagcatcatcggacgctggctggccttgatcggggccggcagctcgctcttttccttggagaggtactcgtccacggctgcggcgcaggagcggccttcggcgatggcccagaccacgaggctctggccacggccagcatcgccgcacacgaacacgccatcctgggaggtggcgaacttgtcattgcgagcgatgttgccacgcttgtcgagttcgacgggcagctggtcgaggatggtctcggtgtccggatgcaggaagcccacggagatgaggaccagatcggcgggcagcacgcgctcggtgccaggctggcgagtgaacggaccattttcgccgggagccacggagacgaccttcaagccggtgacatgaccacgctcatcggccacgaagccttcggcggtggtcgagttgtcgatggtgaccttggccttctcctcttcggtgccctcgaagttcacggagtcggtggagtagatgtactcgccgccctcttccatggaggaggtcttctggtaggtgcgggcgaaggtcggccacgggctgttgtccggacggcttgacggctctttcggcatgatctgtagcacggtgacgtccttcgcaccctgacggatcgaggtgccgaggcagtcggaaccggtgtcgccaccgccgatgacgatgacgtgcttgtccttggcggtgatgtcgtgcaccggcttgacgccgaagatacggcgcgtggcgtcgggcaggaagtcgagggcgaagtggatgccgtcgagctcgcggcccggaatcttcatatcgcgcggcacgcgggagccgatggccactacgacggcgtcgtaacggtcacgcaggtcatcccacgtgatgtccttgccgatttccacgttggtgcggaagcgggtgccttcggcctccatctgcttgacacggcggtcaagcagacccttctcaagcttgaagttcgggatgccgtaacgcatcagaccaccgatggcgtcgtccttctcgtagacgacgacggtgtggccggcgcgggtgagctgctgtgcggcggcgaggccggcagggccggagccgacgacggcgaccgtctggtcggtcagacgctgcggcggcagcggcttgacgtagtccaaatcccatgcctggtcgatgatggtctgctcgtcaagcttgatcatggtcggcggctggtggatgccgagcacgcaggcctgctcgcacagggccgggcagatgcggccggtgacttcggggaagttgttggtcatggacagacggttgtaggcgtcttcccacttgccctgacggaccaagtcgttccactcgggaatcaggttacccagcgggcatccggtcatgcagaacggggtgccacaatccatgcagcgggccgcctgcgtttgggtccacggttgcaggccggtttcggcgtgaacgtcgaaccagtccttgatacgctcctcaacggggcgttcagccaactctcggcgggtacggaccttcaggaatcctctcgggtcgcccatgtcagcgcgctccttccataacctgctcgtacaccttttcccaggcgccgggcgcattgaaatctacattgttggccttggcttcttccatggccttcgtcatggccacgaactgcttcggcactacgtgcgtgaaccgcttgacggtttcgttccagtcctccagcagggccgcggcgaactgggaaccggtctcttcgacatgctgcttgaccagtgcgtacaccagcttggaggtttcggcatcaagcgacttgaagagcagtgcaccggacttgatggcactcgggttgaccttcttcatatcgaggtcaagcacataagtgttaccaccggagaagcctgcaccgaaattgcgtccggtggggccgagcaccacaacagtgccgccggtcatgtactcgcaaccgtggtcgcccacgccttcgacgacgaacgtggcaccgccgttacgaacgccgaaacgttcgccggcgcgaccggccacgaacatctggccggacgtggcgccgaaaccggtgacattgccggcgatgacgttactgtgcttgtcgaaggtgacgttgtcttccgggcgcacgatcatgcgaccgccggacaggcccttgccggcgtagtcgttgacttcgccgtagatgcgcatggtctcgccgcgcgggatgaacgcgccgatggactggcctccggaaccgtgcagggtcatgtcgatggtgtcgtccggcagaccttcctcgccgtaacggcgggtgatctcgtagccgaccatggtgccgaccgtacggttgac

SEQ ID NO: 69 - DNA, 12404 bp, Unknown
  R206_24m  MAG No. k141_3428
accgatgtgattgcgcgttacaagcgcatgcgcggctacgacgtgttctacccgatgggctgggacgacaacggcctgcccaccgagcgccgcgtgcagaactactacggcgtgcgcgtggacgtgtccctcccctacgacccggacttcaagccgccgttcgagggcaccgatggcaagaagatcgacgccaaggatcaggtgccgatttcccgcaagaacttcatcgagctgtgcgagcgtctgactgctcaggatgagaagctgttcgaggccctgtggcgcaagctgggcctgtccatcgactggtcgcagacctaccacaccatcggccagcacccgcggcgcgtggctcagaaggccttcctgcgcaacctcgctcgtggcgaggcctaccagcaggacgcccccggcctgtgggacgtgaccttccagaccgcagtggctcaggccgagcttgagtcccgcgaatacccgggcttctaccacaaggtggctttccgctttgaggacggcaccccaatctacatcgagaccacccgccccgagctgctggccgcttgcacctcgctgatcgccaacccgaatgacgaacgttacaagcagtacttcggccaggaagtctactccccgctgttcaaggtcaaggtgccgattctggctcacccggccgccgaaatggacaagggtgccggcatcgccatgtgctgtacgttcggtgatgtgaccgacgttgagtggtggcgcgatctgaagctgcccacccgcccgatcattcagcgcaacggccgtatcgtgatggacaccccggattggatcaccgacccggccggccgtgaggtctttgccgaaaccgctggcaagaccacgttctccgcccgcaagatcatcgtcgacaagctgcgcgagtccggcgatctggacggcgagccgaccccgaccaagcgtatgacgaacttctacgagaagggcgacaagccgctcgagatcgtcacctcccgccagtggtatttgaagaacggcggtaccgacgccaagctgaacgccgagcttatcgagcgcggcaaggaactcgagttccaccccgacttcatgcgcgtgcgctacgagaactgggtgcacggcctgaacggcgactggctgatttcccgccagcgcttcttcggtgtaccgttcccgctgtggtacccggtgaacgcttccggcgagccggattacgatcgcccgatcaccccgagcgaggatcgtctgccgatcgacccgaccatcgatgtgccggaaggctacgacgagtctcagcgtgatgtgcccggcggcttcaccgccgaaaaggacatcatggatacctgggccacctcttcggtgaccccgcagatcgtgacccactgggctgagccggacgaggcctccaaggccctgttcgcttccaccttcccgatggaccttcgcccgcagggtcaggacatcatccgcacctggctgttctcgactgtggaccgcgcgcacttggagaacaagtgtctgccgtgggcccatgccacgctgtccggctggattctggaccccgaccacaagaagatgtcgaagtccaagggcaacgtcgtggtgccgaacgagccgatcgagaagttcggcgcggacgccgtgcgttactgggccgccgccgctcgcctgggcctcgatgccacgtacgacatcggccagatgaagattggccgtcgactggccatcaagctgctgaacgccaccaagttcgcgctggccatcggccgtgaggacgagaaccatcacgtgggcgctgccgccgagacctcgtggaacccggccgatgtgaccgaaccgctggatcgcgccgctatggcaaagctggctttggtggtgcgtcaggccaccgaggcgctggaatcctacgagcattccaaggcgctggaagtcatcgaatcctacttctggcagttctgcgacgactacatcgagctggtcaagaaccgcgcctatggcactccggacgagcacggcaatgtgccgtccgagaaggctgtgaagtccgcccgcaccgctctgggtctgggcttggacgccttcgcacgtctgctggccccgtacctgccgtacgccaccgaggaagtgtggagctggatgcacgccggttccggttccgtgcatcgcgccgcctggccggtcgtggacccgtatgtcgaggccgccaccggtgcttcccccgagctgctgacttgggccggcaaggccgtggagcagctgcgtaagatcaagtccgaggccaaggtctccatgaagaccccaatcctgtctgtggcactgtccgctgcttcggaaggtgtgaacgcgattcacgccgccttgggcgatatcgcgcaggccggtcgcgtggtcggcaagttcgacttggtggccaagcacgccgaggaatccgccgccgaagacgcgcccgaaaccgaggtcgccgtcgaagccagcgagctcggtgagccgccagccaagaagccaaagcactgagcgttgcgcacaacaacagtaggtctcacggcaatgccgctcgttccgagcctacgggaagcccaccgggcttcccgcttaacggctcggccagccaagaagccaaagcactgagcgttgcgcacaacaacaaaagaggggaacctcctattgaggttcccctcttttgttttttgacgttcggatgacacgactgtgggacggcacgcaaatatcccgcattgtaagctggcggcccacaatagcgtgggccaccacgcgtgtcaaacgttttatatacgcggcgtcccacagaccgaatcaacaaatccttggaatttagccattcttcaaactatagttagctctgacttacaagagggtgtgggacgccgcatcgaaaaagccagtttttgatgcggcgtcccacaccgataacgcactttacgcgtattgggcacctgtcgcatgcggattttcccgcatacaccatcacaccgtcggaatcacgatgaggtatcgggtttcggcggttttttgttgcgtattggggctatcgagctgcgcgacggcctgcgccaagagcgtgccagcatcgctgatctccacggtctcattgatcagcgcgctcatgtcatgcttgagcagcgtgccgccagtgccaaagccgaacagtactggagcggtgtcaagattgttgccggaatcgccagtatcgctcgacttggctgagtcgttcgttcccgaaccatcgctcttggacgaatcgaacttacctccaccaccgatggccgaagtaagaccacccgcatagttcatcacatcgccagcagacatggacatggtgtcatcgaccagtgaggccttggaatgctgcgactgctgctgttgcgcggctttggcctgcttacgggcggcatcggccttacgcttggcttgggcggcccgggtcttgccgtagaacgattgcgattgcgaatcgaccaggccagtcagtgcctgagcctcggtcaccggaccggaagagacatcaccggacgagccatcgccatcgctgccggaagccgaggacgcgactccttcgaactgatcggagaatcgcaatacaatctggcgcaaggccgtggctttgcccgtatgctcggaggcggtggcaagcgtgctcatcgcggcatcgaccttggattgagcgtcggcgagttcatcgctaccgttggtttcggcgatggcttggctctcgtaagcggtggcgcccgaagacgtgccgccggtcagggcgctcaaattggccgtgtagacgtccgtgtatttcatcgaatacggaatcattgcggcggagagctggctctggccatcggcgtattgcttggagcctcgagtggcttcctccgaagcctcggcggtcagatcatccaccagtccggtggtgccttgctgctggatgcggcgaatcacctcatccaacgcatcgaccgcaccggcatgctgatgtgcggcactgacgttgttcaccgcgttggccaagtcgagtacggcttgtgccaaaggcgtatccccggacagttcgccggccgtgcccatcaacgccggcaactgggtggaggtaccaatcgatccagacaggtgcgtggtatatgagcccacatacgcggccatatagtcttcaaacgtccgcttatgggcggtttcgcgttcggccactacggacttgtccagcgcacgctcattatcgcgcagggtttgaagctgctcgatgagctgttgatgctccccggaaccggcgtcggtcagtgaatcgaccagtatggcggcagaggcgacgagttgggcgacatccgtatcggcagcaggctgtgcggcggcattcgcggcatcgggattagcaccaactaccggactgctggaattggaaggcaatacggcgagcgccacggaactcatggagaagtctttggcgttcatatagcagctgaattccaagccggttgcggcttttccagctgcggcgactacggtattggaaccttgcgtggttaccgtaatggagttgtcagcggaaacatcatcggctacctgcgtaggcacggtaaaggcgacaaccgggatcgtacggttggcctccttggtttgcggcttaatatcgatatacacgccgatcagtccagatgcgccggcaacctcgtttgcctcgacgtttggaccgtcaagcgagtaggtgacgctgactttccatggcagggtggcggcggaagcggggatacgagaaaccttggatgtgccggaatcactattggcggaatcggtatcagtggaaccgctattgccggaatcggcactggcgccattgccggcgccgcccttccctaccacataccaacggaccggctccccttcggcatcggcgacggcgtacatatcacttgccgtagcgagcaccggaccgtaatcaaccggagtcggacgagacatccaagcaccgccgagaatcgaagccacgcacaatgcgcaactgaccagtgcggcaccacatctcatctacgtatcccattcatacagtcggccactatgggcattccattcccgtattaatgtagtcgctgccggcaacttgccctatagacgaatatccgaaaggtgcccattcgctgcgggcgaatcaggcgaatacgtcgagtacgcccgggtcgccaccggcatcggcgatgcgctggtggcgcttcttggcttcggtaaccacgaattcacggtacatttcggcaatttccggatcaagcccggcatcgatggcgatgcggtggaggcgctcgatctgatagtcctcacgcttggtgtcttcgggcgcgaatccggcgttggctttgagcacgccgacctgcgaggtggccttgaaccgctcggccagtaatgcgatggccgccgaatcgatgttatcgatggtttggcgcagcgctttgatgcgcgccaccgcttgtgcggtttccgggtgggccgccgcctgggcggagtcgatggtggtcctttgccagccgctgctcgtttcgctcatagattcgaggatactcccgattgcggctttgcacgatgtgcaaagtcagatatctcagatgtcatagtcgccgtaggggatatggctggcatccgcatcgccgaacatggccgcaccattgcccactcccaaaacaatcgaacccattgatacatctttcatctcatatatcgtcagcgtgcatgtgaacgttgacggcaatactacaactgcaatgtgatagttgatgtatttgcatcatatacggcaagggctgcgccccgtatcaatcggggtgcagcccttacactattgttcagcggtctggtcagttgccgttgaccgcattgccggtgttggcctgctgcacgatggcggcgaggaagtcgcggttggtggcggtcttcttgaggcgcggcaccaacgtctggtaggcctgctcgggctccatgccgcccagcagtcgacgcagacggtagataatcggcagttcctgcgggttggtgatgagctcctcgcggcgggtgccggaagcgttgatgtcgatggccgggaacagtcgcttgtccgccagctcgcgggacaggcgcagttccatgttgccggtgcccttgaactcctcgaaaatcacctcgtccatcttggagccggtttccaccagcgcagaggagatgatggtcagggagccgccgttttcgatgttgcgggccgcgccgaagaacttcttcggcgggtagagggcctgcgcgtccacaccaccggacaggatgcggccggaggcgggggcggcgatgttgtaagcgcgagccagtcgggtcatggaatcgagcagtacgaccacgtcctggccgagctccacaagacgcttggcgcgttcgatggccagttcggcaaccgtggtgtgatcggaggccggacggtcgaaggtggaggagatgacctcgccctggaccgtgcgctccatatcggtgacctcttcggggcgctcgtccacgagcaccaccataaggtggacctcggggttgttggcggcgatggagttggcgatgttctgcagggtgatggtcttaccggccttcggcggggagacaatcagaccacgctggcccttgccgatcggggaaacgatgtccatgatacggccggtgagcttgttcggggcggtttcctgcttcaaacgctcctgcgggtacagcggcgtgagcttggagaactgcggacggttgagcgcttcttcaacgctttggccgttgatggaatcgatggcctgcagtggcacgaacttctggcgttggttgcgacgatcgccttcgcgcggggcgcgaatcgaaccatggacggcatcgcccttgcgcaggccgtacttcttgacctggcccatggaaacgtacacgtcgttcgggccgggcaggtagccggaagtgcgcacaaaagcgtaggagtcgagcacgtcgacgatgccggccaccggcaccagatcctcctgcggctcttcgcggcggctatcacggtcattgcgatcgctacgattatcgcgatcatcatagcgacgatcatcatcggcgttgtcgcgatcacggccacgcatgcggcggttacggcgatcgttgcgatcattacggttatcgcgatcgttgcgatcgctacggtcgcggcggttacgacgcacaaactcgtgatcgtcgttctgctcgccgtcttcggacgtttcctcgtgcttctgcgtgggcagcgtggccaggatatcgtcgaggtcacgcacggtttcttcgctgttttccgcagtgcgacgacggcggcgaggctgctcgtcctcatcatcacggactcggcgaatcagcggaacttccacgtcctcatggcgctcgcggcgacgctcggtaggcgctgcatctcccaaatcgagcgtggccagcagatcgccggcctcatcggccttcttgcgcggcttgcggcgagcgaaatcggactggtcgtcatcgcgacgatggcgggccgcacgcggttcggatgcggcatcatcggcggccttacgacgggtgcgtcgcggttcggtctcgtccttcttggcatcgtcggccacgggaagcggcaaatcgagctgcggttccgtggcggccggagccggagccggcgactgggtggccacgtcagcattgtctgtggtattggcctcagcggcatcggactgcggagccttgacgagcttggcggttttggcggccttgggagcgcgcacggtcacaccggccggcggctctccaccattgcgcgccgcctgcagggtggcgagcagctcgggcttgcgcatggtcgacgtgccgcgcaggcccatctgtttagcgagctctttgagctcaggcagcttcatatcctcaagattctggctatttgccactggttgccctttccataccgaacagacccatgcctatccaggcgttaagagtgattattgcggttgcaccgctcatgaatgttcgctgcgtctctgagttttcacgaactttgtttactgtacaacgccaactcgaccaacgcaaaacggcccgccgaaaaccaaaaaagctccctctgtgacgagggagctcaacaaggtttattcacttttcttcgtggtaggacttttcggtgttgacggaccacacgttcttcttggacgtcttgccggtcttgatgttgccgacggcctccatggcggtggccatggagtggtccatgttgttgtagcggtgctggccgttgcggcccacgcagtagaggttgccgaagccgtcgaggtactcgatgagctcgtccatgtgctcgtaggtgtcgaagtaggcggggtacgccttcttgacgcgctcacgatgggagtcgatgacttcgtccgggccgttgatcacacgcatgcgggtgagctcggagatcgcgaacttggtgacgtcctcctcgctcatgttccagaacgagtcgccctcctcgcagaagtactcgaggccgacccacacggtgtcgtccacgttcttgaccaggtacgggctccagttgttgaagatctgcagacggccgaccttgtagcccgggtcctgcacgtagatccagcagtccggcacgatcggcggattgccgagggtggggatgttggtggtgttcttgagcttcaggtgcttgaccagcaggcccacggtcacgaagtcgcggtacggcaggccgttggccacctcggtcatatcggccggggcgggcttggaatcagcggcctcgggatcgtcgccggccgcgtcgatggcgttgaccaggtccttgaccggcatcgaggagatgaactggtcgccggaaagctcggtgcggttgccctcggaatcctcgtacaccacggaagacacggcgccatcggtctggcggacctcgaccaccctggcgtcggtcagcaccttgacgccggcggcctcgcaattggactcgacggtctcccacagctggccgggaccgtacttcggataccagaactcctcgatcagcgaggtctcgacctccgcgttggagcgcttcctggggctaagcttctggaaggcgttcttgagcacgcccatgatggacaggcccttgacgcgctgggcgccccagtcggcggagatctgggaggggtggcggccccacagcttctccgtgtagccctcgaagaacatcgaatacagcttgcggccgaaacgattgatgtagaagttctccaggttgtcttccggcagcttgtggaacatggacttcaggtagctgaagccggccaccatggtgagcttgaagcccatggccttcaacgtgttggggctcagcgaaatcgggtaatcgaagaagtggcggttccagaagatacgggacacgcggtggcgcttgagcatcaccttgtcctccgtctccggatcggggccgcccggctccatgtcgtggtcacggccgagcttcttgtcatcataggagggtgcaccctgcaacggcagaacggtcttccaccaatccatgatgcgttcgtctttggagaagaaacggtggccgccgatatccatgcggttgccgttgtacttcacggtgcgcgagatgccgccgaattcgcgggtcccctccagcacggtcacgtcgtacttgtcggcaccgccgtccttgatgagttcccatgcggcggtaagtccagccggaccgccgccgataatcactacggattgcttgtcggtcattatgctccttataaacgcaaaatcagagacagtttactagaagccccggaatcgcacaccgaaagatgagcgaatgcttacagaattctcccgatatacgaccgatgcgccgtcttccatcagcagaaaggcgacgcatccaatcgtgaggtaggggtattcggcaacgctgcgtcacgcacagcgcggcgaatcggtttggtcttgggctaattcgtcagcgacgaaccttccatggattcagcgagattcctgcaagtgcaagcagcatcatcttctatcaaccgcaagcaaacaagacacacgatggcaaggttacgagtttgaacttttgctatgcgttgtatgaacaatgcgcgacgccccgccgtaagatgacggaatgccgcgcattgtcaatacaggctgtatcagacgattgcctgtcagtgaatatcgtcgggaatgtcgatatcggttttctggacttcctcgacgttcacgtccttgaacgtcacgatgcgcacggacttgacgaaacggctggaacggtagacatcccatacccatgcgtcagtcagctgcacatcgaaatacacgtcctggccagcggaacgcacgttgaaatcgaccttattcgccaagtagaagcgacgctcagtctccaccacataggtgaacagcttgatgacgtcacggtattccctatacagcgcgagttcggcgtcggtttcgtaattgtcgagatcctcggcactcatgcttgtttactcactcactttccgtatcgcgtttgcggccgcggcccagcgtacgccaccatgcttcctttgagggcttgcgttctgcctggccgtacggccagttgctttcctcttcgagactgtggcgcgtgttcttctgcgtatcgtcgtggtgcccggcctgtggctcgactggctgtgcggccgccggcgtctgggcctgggactgcacgtcactcgtcgtgacggcggctgcctcaccacgctgtgccggctcgggttccggcttgttctgctggatggcgatggaatgctcacgcgcggacagcgcctccttgacacccggattgtcctcaatcaagtgcataccaaaagcgtcaagcgaacgaatcggatcgtactcgtcgaccaacgtgtccatgacgataaggtcctggtatttgttgttttcgacatcccacaacgcgtcgcgcgaggtgccggacggcacgaagccgagcgactggtagaccgaaatcgaacggctgttcttttccggcacgctcacccagatgcggtgcatgcccaggccggccggttcgggcgcaaagccgtaagtcatcacacgcggcatggcgtcacgggagtagccgcggccacggtactcacggcccaagatgatctggatgcgggcggacttggaccagccgtcgatgtcgataaggaaaatcatgccgatgacattatcggtgctggccgcatcgagctgaccgtcatcgtcatggtcggcgtcagtcaatacggcccatgcgatggtgcggcgggattccgggtcgcccacgccggattcggcgggtgcctgaccggcttcccaggcttgggagcggcggacccatgtgtgtacgatggcgcgttcggtgaccgcatccttgccggtgatcttggatgcgccatagaaggcatcaagttcatccaaacgagccaggtcctcgacggtggcggggcgcaggtgcaccatttcgccacggattggcggaatgacgatgctctgtggcagatcgcgcttcagttgcgcttcggtagccatgctcagcgtctcgttggttgcggtcatcggtatacatcccccggttcggcttgtttcggctcacggtccagtgccgaacatatcttactcgactgggtgaacgctggaaatgctctgagacgactttcttacagaatcaataaaggctcccgctggcgggagctgtccaacgaatttgaactggaggatttccctacaaataagtgctcccgctggcgggagctgtccgcgaagcggactgagggtggtcatccgtacatggcgaccaccctcagtctcactccgttcgacagctcccgccagcgggagccagtgaatctaatcagcccttgatcttgcccatgacgaccttggtgacggccttggcgtcggcctgaccgcgcgtggccttcatcacggcaccgatgatcacgcccatcggcttcatgttgccgctcttgagcttctcgacgacatccgggttggattcgaacgccgcgtcgacggccgcctcgatggcaccgttgtcttcgacgatcttgtagtcgtgcttcttgacgacttcatccggagtgccttcgcccttaagcacgccttcgacggtctgcttggcgagcttgtcgttgagcttgccggaggcgatgagcttctcgacctcggccacatcggccggggtaatcggcagctcttcgagggacacacccttggcgttggcttcgcgggagagctcgcccagccaccacttgcgggcaccggcagccttggcaccggccttgacggtttcctcaatcaggtcgagggcgtcggcgttgaggatgtcgcgcatctgcagatcactcaggccccactcagacttgaggcggttgcggcgctcacgcggcatttccggcatctgggcc

(The sequence listing continues in the following parts.)
